United States Patent Application Publication US 2014/0057251 A1 - sequence listing, part 171

SEQ ID NO: 334167 - DNA, 1259 bp, Cannabis indica
tcaaggtatcgaagggagttcgactcttggagttttatcaagattcggttagtaggtggaatacatcaagcttgcggcatacaataagagggagtctatttatgcataagtcaattactttgtatttttgataccgatctaatgaatcttatctctgggcgtggccccgtggactagtaacaatctgaaaggattgttgaaaccacgtacaaaaatcttgtgtgtttttacttttatgcactgtttgtttttctgggtttctctggagttacagagttgcattctgtaactacagaaaactgttttcagtaccagttttattattccgcatttaattaatcatttaattaaataatcaaactgggaatattaaaatacggaatttcaatattttttagcataagccctactattaaaataatttttaataatactttatttcacttttatctttttctctcttgccatctcattttttactactaatttttctttgaggtttttgtttattttactttaattcatataatatagagtaaatactattttggattttgtattttgcaaaagttattaattggatattttgttttgttaaatgataaaattgaccttatattttccaaaattgtacaaatatgaccctgaattgattttttgtccaaataaaacttaataataatctgatttagagatattatgacaaaactagttacattttctgtatctgttcgtgttaaaatttgtcttaaaattagttacattaaaaaataaaataattgaaaattgagttcgggatcttatttttatcattttagaaaatataaggtctattttgttatttaataaaattgagggtccaattggtaatttttataaaatataggatttaaaatggtatttactctataatatattaaaaaaatagaatattttaatgatatagagaaaaatataaagtatttgatgcgtgtgtaatgtaaatatataaagtaaaataaaaaacaaattaatttttatatgtattttaagggtgcgtttgaaaagccacaatgtaattgaatttgtgtgtaattggaggtaattacacaatttggcatgtttgtctagccatgtaattacactgtaactgtgtaattagaagtaattgaggggttccaattacactctccaattctcatggcctcagaattgaatgtaattacactgtgtaattactaaaaactttccatattaaacattagctactaaaaaatatt

SEQ ID NO: 334168 - DNA, 820 bp, Cannabis indica
aatgatttactttcatgaaatatgaatttaaaatgatgtttgtgttgatttggatgtattcatgttggtttatgtgcatatttgaggattgtatggaaatcacaatttacgatgttaagtattttttaattcattctgaaaatatttttcctagaaagtagatggaaaaataataaatttaggcttctacaaaactcaatttggatttttatgaattagttatgagtttttagtttgaaaaaatatttgaaactgagcaacacgcatgcgagcgcggacaagggcttcacgcgacttcagagaagcccatgaccgagtttactcagacaagggctatcctaagcccctcctgactgtgctatgccccttatgcgtgcgaggggactcccctgtgcaatcttatttttgtgatatcttattacttatgttattatgagatctgatattacttattttattattcaaatttgaaatgatcttattttgatattaaaatttagaaataatctactttaaatctcaaatttgctaaccatatcagatttttaaaattttttattttaaaatactttttattaaaattaaattataatattagaaaaatattagttttgacattttattttattagatatttattttaattaaaaattttattttatgcaaaataacatgaaatttttgaaaatttattaattttggtttgaatagatattttaaggtttagtaaccataaaattttcaagcttaggaaattttgttttatttaattattaaataaaattgctaatatcctaatcatcaaatatcttatttttca

SEQ ID NO: 334169 - DNA, 727 bp, Cannabis indica
ctaattagataattatgaataattgagaaattatattattatataatttaatatatgagaatttatatgatttatactatgataagaccccgttggtgagccaggggcattttagtaattctgacccgagatgggtaaaataatgaaattaatttactaacgtgtatattatgcctgtgttgtctttttcaagtgtgttctgacaggttggcgcggtatagtcacaaccaggtatttcgggtcgaactgggttcggacctgaaatgcaatttgaaattgaattttttggcattttaaatattggtgaataatctgaaattaattgggtttgattgtacatgaaatgtcatttttgcccttgtatgcttaagtgaaggttatgtggccctagaggcaaaattgtcttttgaccctttattttacatttgataaaagatgaattttgaggaaaaacaaatgaattttctggtttctactccctcatacccgacccctctctctatctctctaaacctattttcaactttcattttggaaagaaatcgcttgatttggagcatcaaatttgtgggtttttgagcttggaattcaagggagttcttgttggaaattattttaccaggatcttagatctactcacaagtatgttgattaacaccctaaatatgttctttctaaaatgatgaaataaacacatataaagtatagtaaaccttacattgggtgc

SEQ ID NO: 334170 - DNA, 1370 bp, Cannabis indica
ggacctttcttccttactttcttagctgaattttttgccctcccctgagtttttgacctagttttccccatagctccagcgtcaagctgctagagcaaaaacgagggaaaagctccaagcagcaatgttggacctatagaagagttagaagaaatcgagatcgatctagatatcccggctagatatcagcattgataaaattttcgagagcacacctagacatttttgccttgtcacatgcggatatggtcagaattgatccttctatcattttgcacgttctgaatattaatcaaaatttctggccagtacaacaaaagcgaaggctattggacaaagagggagcactagccataaaagaagaagtagaaaagctacgcaacaacaatttcataattgaagctttctacccagcttgggtcgcaaatcccgtattggtgcccaagccgaacaagtaatggcgagtgtgtattgatttcacagacctcaacaaagcatgcccccaaagactgttttcaacatgaaactaaatcccttaaagtgctcctttggagtcacctcagaaaagtttctgggcttcattgttaatgcccgaggaattgaagccattccagagaagattcaggccctcctggatatgaagtcgccaactaaaacaaatgaagtccaaactttgacttgtcggatcgccgcactcagcagatttgtttcaaaatcaacagacaagtgtgtcccattcttcaatatcctgcgaggaaacaagcaattcgagtggatggaggaatgtgaaaaagttttctaagagctaaaagcacaactcgcaaaacctcccgtactctcaaaacctctggacggagaagaacttggaatattcttagctgtcacagagcatgctgtgagtgtcgtgctaatcagagaagagaacaacatacaacacccagtctatcacatcagtaaaagactcattgaggccgaaggccgatacccattgatagaaaaacttgcttactgccttattctagcaacaagaaagttaaggccttattttcaggctcaccctgcttggtgtacattgaccaaccattacgctaaatattacaaaagccagacgcctctggacgactactcaagtgggcagtggagttaggtcaatacgaaattactttccaaccccgaacagcaatcaaaggccaagccttagcagactttagggtagaatgcataggcaaggaagaaagcataccagaaagcaaccctgagccagtacaaacacctcagccaagtaacagtgaagataagctgacttggaaactacatgtagacgggtcggctacagatcagctatctggtgcaggaattgccattgtcac

SEQ ID NO: 334171 - DNA, 738 bp, Cannabis indica
gaaaaataattccaagtttaaagaccgcttggccggtcatggtcttagaaaaggccttatggccgaataagatatataaaaaataaaaagataaaaggagaagtgtttaaatagctggagtcccaagctcttggtacgggtcttctgggccagtaggagctggaggatctgttgtttgaacgggaagtacatcagcagcttgaccggaggtagaagcagccgcctcagtttcaccataggctacttgggaagcacagaactcgaggtacatgtccttagcatcacccaagtagtcaaagttggcctgaggattagccttccaaaagtcaaagaagagctcaagaccggctgtctctaaagcattaaccttctctttcagcttcgtcacctcggccgaaagctcttcctccttagacttcttctcctcttccactcgatgaagaactgctcgaagagaagtcctctcatcctaaagactgttcacttcagcagataaggtctcgatggtctcttcaagacgattagaaacctcgagatccttaatcagctcaactatcttcttctaggcgataaagagcttcttgttggcttcacacagctccattcgaacagctccaagccctatcttggcgtcttcggcgtccttcttggccaagtccacctccgccctcaaggtgttagacagagtcgtgttcctagaagcagcagacttagcctgggagtaggtgtaggccaact

SEQ ID NO: 334172 - DNA, 757 bp, Cannabis indica
ccaccgtaatttctagcctttggcttttccagcgtagattttttatttcgtcttcatagtggtgagtttgggattttgggctcatagagttagcccatttctcctttccaagatgatgtcgtgaggtattgggatctcgcggtgttggtggtggagggtgcctgagtgacgataggtcctccttccttcgtgtcacacctttacctttagtcatgacggaggtggtaactctgttgcactgctcgtacactagggtctttttgcgacgacaatctccttatcttgcttaaggttcccgcctactcacgccgtctctttctactcgaggctggacaacattctcattttcttctcttacttgaggcatgtgtttattatcgcctccatctccgatggcaggtggagggtggtcttgctttgaaatgaccaactggttgttgtcaaggcagatctccacatcctgaaggtggcgagagcgtctaggcatcttgtatcaattgtgtgtaaagaaatgacttggcttaatcttgtcgttcccacaaacggtgcccaactgttaacggtgagaactcgtcaactaagttagtggtcgaaaaatgcaaggatacccagaaatgtaataaagaaaagataaagatgaaggtgaaaagttatttgaatattcctctttatattgaattcaatatctaagttacaccaaatgattttccaacccctttcacatctgagatggggggtatttataggctttaatggc

SEQ ID NO: 334173 - DNA, 938 bp, Cannabis indica
atccatgccaagaccattgtttcgtctagacttgccattgcctgtttataggttactggatcgtcatctataccgtcaccaaccaccatattgatttcaccatccaagccataaagagatggttttgtggaaatcctcccactacgatgaggagtcgtgatcttctgaacaagaatattagtggtagatttctcagttgtattaacttgcaaaggttcaactgagggagtgggattatcctctacttgagttaaagacgatggaacaatagaaggagttatatctgaaagcatttcctccaatactactttactttgaggcttgaaattcttaatatagtcatcttcaaggaaagtggcgtttgtggacacgaacactttatcatccttgcgactataaaatagtccacccctagtctccttagaatttccaacaaacatgcaaacctcagtttgcttttctagtttgccatctttctttcttaagacatgagcagggctttcccagattttgcaatggcataaactgggtatgcgaccattcactaattctaaatgcgtcttagggactgatttagatggaacaacattttaaaagttagttgccatttgaataacatatccccagaaggacgtaggtagagttgattttttggatacttcacagtcttacacactatgattgaggactaactttctacgggtgggcatgcactcaatcactaaaggctgaatttgttttgtgaagaaggctatagaatttcaaaaattagaagaagaaaagaagaagaagaagtctcaaactctttagttgtctgaacagatgaaaactaggttaagagtcattagttgcattaattggacaatgagacatttcttctgtttttatactaattcacttagggttaggattgaattatttagaataaaaatgataaa

SEQ ID NO: 334174 - DNA, 486 bp, Cannabis indica
gcttgatataaaaagtgtacactgacacgtacttatcgtgcttcttctgcttctttttatccttcgatggttccttagaactgtactttctcttcgaacctgaagcctccgagttatcaattcttgtggaaacactacttgttgaaacgttgctgggtttgcttcccgagcttgttttcaaccaattcatttcctttcaggcttcttcctttcgaatgaatacttgagccctctcgttgaattcagtgatgtttctcactagagggccttgtaagtcgtcccacagctcgccccctgcggttgatggatcagtagagatccccgcctgaaggactgtaagttgtgtgctgtcatccaaattcctaacccttgccgcagcagtgctgaaatgacgacttaagtatgccttaagtgtctcgccagactgcttctttatattggttagcgaggccccacttcgggtcgtctatccctagcagcctggaa

SEQ ID NO: 334175 - DNA, 785 bp, Cannabis indica
tctggaaggtttggtaaggattcgaatcgatttggttaggttttggaatttttggggtttctggtgtaaaccggttaaccctatttgctgctaggttccccaaaaatttcgtgttgtcgattcgtcttagtttcagagatttggttggttaattccctgttagtttagggtattgccatgttaacttacaataggtaggtttatgttttaaaacctaagtccccagttgtgatttagcgtgtcacttaaccatgttatgatcgatgtgatttaggggcttgtaattcaccgagtagttgttccactcaagttggccgacatacctgaatttggaaacaagataagattagtataatgtcatgcatatatgtttacatgtttagcatacatgtagtttatgcatgttagaatacattgatagcagtaatagtatacatagagtaacactgattactaataaatgtatgttggctgaaatactgatcgatggtgcatcaatatgactaaagtatgactggcatattgagtataagctgacattatagtcgatagtattgtcgtatgaatgttctagactcagtaccgtgtgggacacggggatagggttatggttgggtgtatgggcgcctgattataacccgagatattattatgttttatgttatgcttttcttactgagtctattgactcatagtttctattttcatgtgtaggcaagagcaaggctaaggctgagcagccgtgagagcgagtagatggagattgtacatgttgggacggttag

SEQ ID NO: 334176 - DNA, 532 bp, Cannabis indica
tatatatatttttttaattttgttaatataataatcctcattataaaatattgtttaattggatattttttttttgtcatttttagcccatatagttagtgatcttagtatttgtgtggagtgtgtagaattttctagttaagtgaagcgtttctaactaagtcctctttttaactctataagtacgtattatcttaattattacaattgtatggttctttaaatgtatcatatgtatctaatattatattctggtactataaatatttttacttttagtcacaacaaaacttgtaactaaaagtaaaatagttgtgactaattataaatcattattcttgtgttgtgattaaaagataatgtattagtcacaaaaattacaatttattgtaactaaatgtgtttttacttacaatacttgctgcaattaaaactaaattaataacaacttttgtctaaatattatgttttagtcacaagtaattttttgctgtgactaaaagtcacatttaataaaaaaaaaattatgttg

SEQ ID NO: 334177 - DNA, 583 bp, Cannabis indica
ataatttctgaattgtgtatgaatttacattgaactttcattatgtttttctgttattaattattgtagtacaaatttcgagtcttcattgttggtctaacttaatttgttgtttttaatgggagaaattccaaaggattgtcatctgttagacaaatataaaagggttagatctcaacggataaatatttgtaaatgcgacatctagttatacatccaaagatgacaacttagactagtgtttacaatatgaaacaataaaaaaatttataaaataagaataactctgactctcgcctaaacgaaacattgttggattcttattttaatcgaaattatcctttagtttttcctcttaagtttttcattaagaaattgcttcagaagtatatcatttgataaaaaggattataaatcatatgcttatgatgtcattctattttcttctatgaaattgagtggcacaatggactatattctagatattcattcccaaaatgatataaatcctcgatcttagagaatctctgtaataccctaagattatgtaatggattagcaaaaccctaattagataattatg

SEQ ID NO: 334178 - DNA, 552 bp, Cannabis indica
actattctccctatgtctagtcctgaaaaagagagtgagggttctacatttgaacagaagaaaagaactttcccatctttgggaagttcagggcaaagtaaaaggttttgaggaaaccagaacaaaggaggacgtcagacttactcttatcctgagtgcccgcgttgcaaaaagcatcaccccgggacttgtaaccggagggcctgttttcagtttggttcggtgggacatctcaggaaagactgtcctcagttgaagaaagaggaaccaaagcctgaagctaaaactgcgcctgcccctgctcgtgtctttgctataactcaggctgatgctgctgctagcccttcagtagtttcaggtgagcttctaatcaatggttttgcttatactgttttatttgattcgggtgctactcgatcttatgtgtcatcaagactccttgatcagtttgatagacctagtgataatcttgagacggggtttgaaaccctgttgcctaccggagaattaattatttcaagaaagtgggttagatctgtgttaattagaatt

SEQ ID NO: 334179 - DNA, 470 bp, Cannabis indica
caactttcttttttacggaactcgattccgttaaaatttaaaaagatataaattttggaagattgggtgtcatggctgtcgagagggggtgcatcaatcgcacgaggcactcggacaaccagagatccgcgggcgtgcacttggccacaacccgtgtcttcagagacaggacactcccttcagacacgcctgcccaaacgctacaatccgcccacgccatgctgcaggcgccgaggtttctcggtgttccccttcccatccgcgcacgtaaggtcctctcgtgcagcctcctagggctgcacttggagcctacaccaaatttgacgatttttgtggaatttttcccaaaaatccaatttttcccaaaaatctgattttccaattttcaaaccctaatttaaaaaaaaatatattatttttaaatatatttgaacataaatatatattttaaattaacaatatttattttt

SEQ ID NO: 334180 - DNA, 593 bp, Cannabis indica
aaatgaccattggagatgatactaagttacgaaatctccgtgatgctcttggactcgtgcagggtcatgccaataccctacatcatgataggaagaactccgcgctgcagtaaacctcgcgtttgaggacaaaggtgtatgtttaccaagtggagagacaaagagatggaagtgttaagggctcatcatacagagattgaaaattgtagtcggcaagctaccgtgctgatacgaaaagcctaccaaattgtaggccagcaacctccgactgtcatccccctaggtgagacagatgaagatccagcgatgaatacttcccagactgcaaattgtcagccgctaaatccccggtcacgagttccacttggttgcctagtagtaggtgcgcagatcttgtctagtaattcatcaggagaggtcatacctgatagttccaaccaggttaacggtgccattccacctgtcaaccaagcaaatcaatcgctaagacaaccaggcgcttcagtattcgagaggttggggacaactcatgacctaaggaatgatctgagcagaaagagaggagtagacaatcagattgtcacgacgatcgt

SEQ ID NO: 334181 - DNA, 569 bp, Cannabis indica
gaataagtcactttgtcgaaaaagtgaaaatataaagttgtaaatttgactcttctgacttcatagctctcagctactttgaaaaattagacgaatagtcgaaacaaaattagaattagataagcagaacctagtgcaccaaggcataagtcaacttgggtgttgggtgctcttttcagagcttccgttatgtcgttttaacacttccaaggttcttgaatttgaggacgaggtctcctaccatgtttttgaccattttcaaagagaatgcttggagcagaatttgtatttgagagatcaaaacgagtgcaccaagttgattatcaatctaggcgctaagccgagcactaggtttgttggttttatgaaactaaatcaggcacgcaacagaaaaattcgtattatctgattatcattgtaccataacctaatgaatctctagatgtgtatatatattaaatctaaagataaaattatatgaaaagaatatatctcttaatgactatcagggtatccttaaaaattctcgttgtatttttttggttgattagaaacttataccgtagtct

SEQ ID NO: 334182 - DNA, 732 bp, Cannabis indica
caggcacaactagacgaactaaaaaatattttacaaggcatggcttcacagagaaacaatgatctcgagctggaccgagcacgtgtaactcctttctctctcgagatcaatcttctagcgttgccccacaagtttcaaatgccaactcagaaaatgtacacaggaagagaagatcctctctcccacctcaagtatttcgagatgaaaatggatttgcaagggatacgaggggatgtgtgttgcagaatttttcctactaccctgtcggaggccgcccagtaatggtattttaagttttcccctggaaagttcaattcacagaaagccttctcttcggaattccatgaacaattctcctcccctcgcaaacttccgttgcatctgggagacgtggttgaagtcaagcaaagaccaggcaaacctctccgagcatacatcaatagattcatgacagaggcgaccaaagtttcacgggtaactaaagataaaaagttgtccgtgacactgggggcattgaagtcctcggtgaatatggaaggatataaggaagaacgggccggtagactcaatgagtgattttcttcaccgtgccgaaggcttcatcaggctcgaagaaaccattcaatgaggagaaggtgagcaaaaggctggcaagtcgaaagctccttctactggaatgtccgcccaactcccccactacccaaataattcaaactcaagtggtaaacattc

SEQ ID NO: 334183 - DNA, 500 bp, Cannabis indica
tgactatcagggtatccttaaaaattctcgttgtatttttttggttgattagaaacttataccgtagtcttccaaattgatccaccacacacatagaatagtgtgggctattagaataaagtgtataatttgttcttgttgaattctcaacacatgagtaagaacaattgagagaaaaatagtttcctctttctccactgtaaatttcaaaaattatatgttgaaaagcttattttgatttctcaaatcaggcttgtacgtatttactgaaaattcaaatcagggaacatcttaactaacttgaagtacctttattaatttttaaattcaaatatttaattaattcaattaattaacctaaaaagaaaaaaaaatagggacaccctacactagggtagggcttaccatatcttatttaggaaaatgattgtcttgataacttttatctttttcctatttaattaatttaaaaaattatttatttattaaaaaaataaata

SEQ ID NO: 334184 - DNA, 901 bp, Cannabis indica
atgggatcataaaaagtttctcagcactggtacatccttaaccaaatggtcaagtcaaagctgtcaacaagacactcaaagacaccctacagaagagacttgaagatgctaaaggaaattggctggaggaactccctgaagtattatggtcgtaccgtgcaactaagaaaacagcaaccggacaaactccatttgccatgacatattgatatgaagctatgttgcctgtagaactcgaaccaccatcccactgaagattgacatataaccaagaggccaatcatacactcctcacaaaatcacttgattaagttgaagaaaaatgaacaacagtaaactgaaactgatagcccatcaataaaaggtagctcgatattttaacaaataagtaagagcacgaaaattctttgtgggagatatggtcctaagaagagtatttttgaacgccaaagatagtacgacaggtgtgctcggaccaaactcggaagggccatatcaagtggtcaatgttctagaattgggagcatacaaattgggtaagtatgatgaaaaaatgcaactcgttctagtaccaaggtattggaatgagaaacacttaacaaaatactactagtaaaagtacaaggttggatgaccatatcaagtacaaaacaaaaaaatatttactcttaagtgaacggtcttctgggcagaccacgcctaaaggttcggataaatttacgaagtactcaggttagatgaccacttatattatctacaatttgttctctttatgctaacctaaagatcagactagataaacataatagcttcaatgtaagttactaaggtaacagatatatttccgaccaataaatgaataaagatgtttatttaaattcaaattgagtcaagttcatta

SEQ ID NO: 334185 - DNA, 1016 bp, Cannabis indica
attatgagcgcttcgccttgattacatacaatagggagattgggataattgactgcttcagcgttatctgcgggattaatagtttgattggaaactgaaaattacattctttaataggaattaggaatgattgttgagggtggcgaataacctttaactagtttctcatatcgtattctttactttaaatttgttcttttctttaatttttatttttattctaatcttcaaaacccctctttttcctaattcttactaatttgtgaataattgaataaacatagtcctcgtgggatcgacccttacttacgattatactaaaataattggaagtattggaattaaaaaaatagtaaatttgttgtggcttacgacacgcatcgcccttcaatattctgatgtgtttggtgaccctgatataccaatcccattttagatgtaccttttaagtatctcataagccatttcatggctttccaatattcttttccaggactagagatgaaccttcttagcacactaattgcataaggaaggtcaggtctaatactgaccattaagtacataatggaccctattgcattagagtagggaacattggccatatcttcttgctctaacttggtcttagggcacatagactttgacataaggtattggttggtaatcggctgtgtaacagcctttgcatctttcatagaaaacttttctatgatcttgttgatatagtcttcctgatgtagcatgagtttccctttgcctctgtcccttaggatgttgatccccaaaatcttagttgccacaccaatatccttcatttgaaattttgacttgagcaaatcctcgaccttgttgatatttgacctctccttgctaattattagcatatcatcaacatagagtagcaagtaaataacttaagtaattttcgaacctttaaagtacaaacagtggtcataatagcttttattgaacccctgtttggtcataaatgtgtcaaaccttttgttccattg

SEQ ID NO: 334186 - DNA, 1673 bp, Cannabis indica
atcagaagctccacagacatctcgtccccttcgaacagctggtcgttcatctcaggaagtagccgatcttggtagtgctgaagcatctccttgcccttcttggtctcagggttcaacatgataggagtgtttgagggcctgggcgggccagacccttccgtgctacctcccttggcacctttggacttgggggccttcttggttggtggctccacctcggacaccacctcctcagagaggtcgataggagactcgaccgagctcttatccttgtgtggtatctccttcgacggtatctcatttccctttgatcgtttgggcagaggggtctggcgagctgtcacccgacctcttcttcagagcctggaacaccttctgagacatagctgcatatgaacaaaacaagaaggttagaaacaagtgtgagataagccaagtcagatgacaattaaatatgagttaaaatatcatgcatgttggcaggagcattctcccgaacaagcaaagatggaggctcatcatctgaagagtcttcttgttcctgctccgtcagaacggcttttccctttcctaccactggggtggattggcgagcaggtctttcaggctcctccctaatcttgagagaccgttcaacaagtgcttggcttcttggatgggccttcttcctctttttgctcggagtctcctatttgggtacaatctcttgttcgggctcaaccttttttgctttcttcacagcctttggtacaaaattggctggaaaaagtttatacttgacaaaattagcctcgaaagtgaagagagagatgtttcgtgcagcaggaagcatttgaagaatcttttgtgccctcttcttgagctccaatgtgaacggagggcggcagtaggatgacacatgctgaaaactggtgtggacagtgtccattcccttgacaaagtagtattcgtccacaaagtaccctatcttagtcacctcagtagtcgtggtgcccgtcaaccatttcttctcgatctgagaaaaatagaagtatcctgacctgttctgcttaggacttgacttcagatcaaagagccaattggtatcatgcggggacggctcaccgcatccttgtgaggcatagagaacgaatagggcatataagtaattgatgcccttgggaccatgggcctatataatcgagcttccaataagcagatttagaatttaccaagtaaatcctctaacttattaattcctccttgcactactatagatttaaaattccactctcaattatatagagcgctctatatgttccatgatatagatacggtatgaaattattcatcgttctaatcccaataatcaatgatcctttatagatgatttacatcgagtaaggataaatttaccgttttaccctcaatgtattttatttttataacacttaacttcctataaatgacatttcagtaaactaatacaatcactgaaataagagctcttccatttatctctattaagccaagctcgaagaaaattatcatttcacttctatgtctagatagaagctatagattctatatctatgattagcgctctcacttaattgtactatcatgttcccaagatgtaagtgttcgcccgtatgagttttaacgaacaactcaaagaacataaataacactct

SEQ ID NO: 334187 - DNA, 598 bp, Cannabis indica
ggtctggaccccgatctgggtctaggttcgggtctaggtccaagttaaggtcccgagtgggggtgcaagttttggtgtgggttatgatctcagtcccgatctaggttaagcatttcgatcccagtttggctcttagtccgagaaagggttcgtatccggatccctatccatgtccaagtgtgtgtttggtatcgggtttcagatttaggtccaggaccgagtctcagttctggtctgggtacacgaccgtttccgggccttagttcaagtcacaatttcggtttgaggctaggtccgtgttcggttgtaggtatgggtccgggtcttggtcacgatcctagtctagttctatggtcctggtttggcgattcttgttcaggttctaattttgggtcccaggtctaggtctgggttcgggtttggttcttcgtctgggttctggtcatagtctgagtcccagatctagaaaccgactactggtctgttccaggccccgttacccgaatccccagtcaagatctggatcactttcacgagtctcggtgaggttctagttcaggtcctaggttccatttatgagtttgggttcgggatcgag

SEQ ID NO: 334188 - DNA, 897 bp, Cannabis indica
aggatgagtatcatcattttcctcgttattagccatggagaaagatttttcttttggttaggagggttttttctgagcctttttcacctaggctctcaatgaatgcaccaagttgttaacacaaatttttgttaacgataataagcctatttttgtgataagttttgcacataaattatagaaagtaaaagaagaaaatataacatagagctttttacgtagttttgcaattaaaatattgcatagtccacgagtcaatcttattctgatacaaactagggttcttttttctcaaggatttttccttttttttttcagtacattctgcccctatttatagtgacatagggtggcatttaattacaatcaaattcaaatcccacaataatatttccctgaaatcgtgggccttaattatgatacacataaataaatgcggttattatttgaaaatcatacagctgtgatttatccgcttttactggatcaatactaacgtagatttagatacgctgcaaagtgtatctcgttgaggcatctcgctgggaacttgaatagcaacaataatcctggcagcgagatggagctttttccgtgtctttctgaggttgataatgtaaatcccgtcgtttccgcgattgaagacataacgctccatctatcaatcgcagttcttgatgacaaggtgaacttcagtagtcaacatcatttgaatgtcagcttctgtctgagagagctgactcgacggagcagtggatctcctttgaaagatgtctggagttgattaatgaaggtaccatgagtatgccttcctatggagagatggatgcctcgctatccgtcacttaggttcttccagctgtgatactagttagtacaatgtatattatacgctaa

SEQ ID NO: 334189 - DNA, 615 bp, Cannabis indica
atataggatcacaaaagttataagggaatcttattgtgaattaacctcttattataacttcttaattaatttttttgcacccaaaaacatatattgatttttttttcatagcggtgtttgttatagttacaacatcatagctgtacattgcgaatagtttatagtgtcgaaaatagatttgaagttttttgaacacgagtgataaactaaaatatcaggaactctgttttcaatactgtaaacttttttaaattttttaaaaatttacagggatgatattataattataacgaataccgctatgaaaaaatattccaacatgtgatttcaagcatgtggattgactaagaaattataacaaaattttataattaatactcttcttaaaatactacacccgtgctcatcaaacaaaagagcaaattaatgaggtggcaacaatttattggtccaaaaataacctaagggtggagtcatttttagagaagaaatttcaataaatatacttaaaactttatcccatatctaaaaaatatttctcaaaataatttaatacaaatatatccttattttattttaacatacccattctatccctttcaattaaaaaaaaaa

SEQ ID NO: 334190 - DNA, 1100 bp, Cannabis indica
acttcaccaagtggacagaagctaaacccctggcgacaataacttccaagaaagtccttgactttgttgtcaagaacatcatatgtcgatttggactgccatagaagattgtgtctgacaacggaaagcagttcgacagtgacatgttcactgacttctacaacagacatgacatcatcaaaagtttctctgccgttgctcatcctcaaacaaatgggaaggtagaagttgtgaacaagaccctcaaggacactttgaaaaagtgtctagaagaggcaaaaagcaattggcctaaatttctcccaaaggtactctaatcacacagaaccaccgagaagacggtcaccgggcaaacaccatttactttagcctatggctatgacgcaatgtttcccatagagctagtgacatcgtctcataggaggataacttatgaacaagaaatcaaaaacaccttgctggcgaaatctcttgacgaaatagaagaaagaagagaccaagccaaccttaagttgtaggcctactagtagaaggttgcaaggcacttcaacaaacaatttaagaaaaggaaattcttcataggagacttagtggttcgaatagtgttcccaaataccaaagatcctgtagcaggcgtgttcaaaccaaactgggaaggcccttatcaagttatagaaataataggtaagggcgcctacaagcttggtaggtacaataagaacatggagttagctctcttaccaaggtattggaatggaaaacatattaaaaagtactaccagtgaccagcttgtaagaacactgctcttcagtagtagttctggcaactcatttataagagttaatttagaaagagctaagtctccatcactcttcagtaatgacctctgcttggcatgtcgggcaggggtagccacatgacttctagaagtagactttttattttgtaagattttagaatcaataaatgtacgtcgcacaacaacacacatattaaagacaaattgatgaataaaatcggtgtttcaatttaatattgtgtctaaacaacttgctaacaagataacttcttaaagttattatttattttcagttccaca

SEQ ID NO: 334191 - DNA, 916 bp, Cannabis indica
atggatgcctatttggggtataaataaatcagaatgcatccacccaaccaagaacatacaagtttccagacaaatatgggtctatgctattataaagtaatgctattgggtctgaagaatgttggggctacgtaccagagactagcaaaaaaaatgttcaaaaatcatatcagacagaatatgaaagtatatgtagatgacatgctcgtcaaatccaggaaggcaggaggcatatagagtatctggatgaatgcttcaaaatcctcagaaaatacaacatgaaactcaatcccttaaagtgttccttcggggtctgctcgggtaagtttcttgggtttattatcaatgcttggggaatagaagctaatctaaagaaaatacaagccctcttggatatgaaatcaccaaaaaaaccaaaggaagtctaaagcttaattggccgtgtagccgcactcaatagattcattttaaaatacatggacaagtgtgttcctttcttcaacatcccttgaggtaagaaaaagttttaatggatggaggaatgcaggaaaaccttccaagaattaaaaaggaaactcgcaaaacccccgtactctcaaaacccctagacagagaacaattaggaatagacttggctgtcactgaatacgttgtaagcgccgtgctgatacgagaaaaaaataacgtccaacatccagtttactatatcagcaaacgactcgttgaagctgaagggcgatatcctttgattaaaaaaactcagttattgcctaatctttgccacaaggaagttgaggccctatttccaagcccatcttgtttgagtgtacaccgaccaacctttgctctaagtattgcaaaagctagatccctctggaagattactcaagtgggtgatgttggatatattttacca

SEQ ID NO: 334192 - DNA, 896 bp, Cannabis indica
ttacaaaaaaaaaaaaaaagtcatggtttgaacactaaagcatcatcacatgggattaatttttagaatgaattgacatattaattagaaacaatactaatataatttcaaaaattgagagcttcttatgtcgtaaatttttatttaagagtatttattagactatcggcatcaatctaaataattagaggtttatgccgcaaaatataattaacttagtattgcttaattagttgtacatttttgtatgagtgcaagaaagattcttgaattttttaatattttgtggaaactttaaaatttgaattaatctttaattttttttaaaaataaaaacaaagctttaatttaaaaaaaaaaaattgtcaaataatagaagattataatttatattttgtcttgctatttatggtataaattttttactttaaaattatataaaattaattataaattaataaaattgtatatatttttttgtcaattattgaaaggatcgcgcaacgcgcggttacgttacctagtatatctataaagcaaaaacttatgctgatgatgtgacatcttttgtgagttttttttttttttttttgctttatcttatttttgagcgtgcatttgtaattttacatagtttttctatttattatattaattagtaaaacctcattcaacttaatctatttatttaacgaaaaaactatttgtattctttgtataacttctatatttatgtttatgagtgactactcaatggttacatttttattgtgatcattatgattacattttttttacctgtaatagcaggttaccaataggtaaaaattcatattttagaatcaattaattataatgaactattttcttaaaataattaattaaatatttaacaa

SEQ ID NO: 334193 - DNA, 1404 bp, Cannabis indica
agagtaccttgaccaagctatggtcttgttccgaaggactttatcttttccgtcgaagatctgaacaggttgttcttcgtactatagatgtggttgaagttcaagattctcataactctgtacatgagtgggatctaaaatgtatttccataacatagagacatgaaacacattgtgaactgctgaaagtgctggaggtaaggctaggcgatatgctacaagtccaaccctctcgagaatctcgaaaggccctgtgaacctagggcataacttgccccttttcccgaaacatctgatccccttcatcggagacacccgtaggaatacatgatctcctaccaaaaattctacatttctacgctttggatctgcataattgttttgcctactctgaaaggcaagcattctggccttaatcttttccatagcctcattagtctgttgcactgattccagacctaagtatttcctttctcctgtttcatcccagtgaattggagatctacacttcctgccatataacatctcgtagggagccatccttatagtacttcgataactgttgttgaatgaaaactctattagtggcaggtactttctccaggagccttcgaaatctatcacacaggcacgtaacatatcctcaagtatttgaattgtcctttctgattgtccatcagtctgaggatggaaggttgtactgaacttcagtttggtacccatagcctgttgaagactctaccaaaatttgtcggatctctatccgatataatggatttcggagccccatgtaacctcactatctctttcacgtataactctgtgtattgatccattgtaatagttgtttttaccggcaaaaaatgtgaaaacttcgtaaatcgatctaccacaacccaaatagaatcgtacatgttagttaagcctgttagattacattataatagtggtatcagtatatttagtattatattggatatcgataaatgtatgctagcttaagtagtatttgacagtatcacatcagtacgactaaagcatgactagcgtaccgagtatatgctgatattatggtcgatagtattgtactacttgacagtatcacatcagcacgactagaatatgactagtgcaccgagtgtaggctaatattatggtcaatagtactgttgtacgaacgttcttgactcagtactgtgtcggacacgaggataagattatggttgggtgtatgggcgcctgattataatttgggttatagttatgttattgtctatgcttttcttactaagtttgttgactcaaagatattgtttgcatgtgtaggtaagggcaaggctaaggttgagcaactatgagagcgaacggatgaagattgtacatgtcgggacagttaggcctgga

SEQ ID NO: 334194 - DNA, 953 bp, Cannabis indica
tctttgaagaactgagtaggaaccaagtttgccttggttgtcaaggcgtcactacctagttgaatgagtgtgtcggctgttgtgccgtctttgagggctttccttctagtatagcctttgagctatcttagcagctctggtaggccatcatcttcttgtattgagctgtatatttacctaagacactatctacgactatctaagagtcgtggtgcatgtttaggtggttagcccatgcttcatgtgctagcctggggccagcatttggagcttcatgttcagccttgttgttagaagctttgtatctgaccttgtttcctggtgcctcagttttccccgaggtgccgtgggggctaggtctgcatcgtgtaagtggtcaatgcacctcctggattgttactctcgattcttctttggttcttgcttttctcctgaactttgagagattgggggagatatgcttctatgattagccgtgaagtgggtgagagcttggcctttggtggccatgcttggttgtgaggtgcttttatgttggccgagtctcaatggttcacttgagtagtttgcctgatgctctaggtttctgtagaacctactgcaactgctgatcggtgtacacctttataaggcgtatctagaagtatgaccttagcgttttggaagccaagatcaagtttcgatcagcttctccatgagtgtgaactgacttagtaccgatgagtctcttgttggcgtcgtatatagggtgatgtacattgtcttcttctcttgcgagggcagcactcacaacatgttctgtgactgcttggttcacgcttagctcttctttgtctagggatttttgcaacgcaagtggctgagccaatctatttcttcagctcttggaatgcagtttcacattcctttgtccactcgaatttgttgttgcttctgcttcatgttgaagaagg

SEQ ID NO: 334195 - DNA, 803 bp, Cannabis indica
gaaggctgaacatgaccaacttctccattaagcatgaaagagaaactagtagagtgcaagcaattcatgatcaatgaaacccatctatcatggaagcccatctgtctcacaacttccttaatataggtccattccactctatcaaacgccttactcatatctagtttgagagccgagtagcttctgttccctcttgtcttatgctttaaatgatgtaccaactcaaaagctacaagaatattatccgtgatgagacgattggagagaaaagcgctttgtgtttcggagattacataaggaagaacctccttgaatcgaattgcaagagtcttggaaatgattttgtagatgacgttgcataaacttattggtctaaagtctcccataccgtttggaaccttaatcttaggaattaatgtgatgagtgaatgattaaaggattccatactactagggctgaacattttgagcgggtttgacccgaacccgagcaacccgcccgaacccgaactggtgaacccgcaaaaaattttttttaaaaaagtttcgggcgggttgggttcaacccggtacccttcgggtgggttggcgggttgagattttaggggtaccgggtttcgggttgaacccgcgaacccgcccgccaacccggtttataaatatattatatatatttttttattactatttttatatatataatatggactttagatttttatggactatggatattggatatggatgtattttgaaatattttagttttcacttttatcatgattcatgaacatgaatatgaa

SEQ ID NO: 334196 - DNA, 765 bp, Cannabis indica
caagtgtgccggtcagcctgagtggaagtgcagctcgacgttttacagggccctaaaccataatgttcaaaatccgatgagagactcgctaaaacacttatcggggatttaaaatacaaactaagcttaaccctatcgataaaaaggatgccaataccctaaattacttaaaaacgggaaaaactagggctcgggaaaaagccccaaccggcaggccggttcccaaccggaagtccggttcctgggaccaaccggtcgaccggttgacgcaggctcccaggaaccggaattccggttctgaactgggaaccaaaaatccgacccccacaactcaaattaatcccaaacttttcaatactttccagaacacctgtatgcactaaaataaaccagttccaagcaacaaatctcaacaattcattcaaatttcaaaaacaccattgaagacctaacttaggttttctaagctctagcttgaattattcacaacctaaagctcaatcccagcttagaacagtaagaaataacactactcaacttcagtaaatgaacccaaattgaattcatacacacacagccccaatcaagcttaaaacaccaaaacataaccccaaaacttaaataaaacattgagtaacattaccaaagagatataccttgatttggattctataaacaagctggaaactctccaatttcagcaagaattccttccccttgctggttataggcagcacgaaagagagagagagagacttctaaatt

SEQ ID NO: 334197 - DNA, 576 bp, Cannabis indica
ggcccggggaaccctgccaaaaccggctagccggtttgcaccagagttcccaaagcctctcatttcttgctcaactctccaccaaatgcaatgaaaccttccagagtacctaataagggtatacacaatacattccagccagaaaattacagaacaaaccattgaaactcaagttgccattaatgatcaaagctttgagttcaaaactcaaacttgcataaaatcaacaacaaatctcaaaaccagctgctaggaactaaaatcaatccaaactagccctaaaattcgaactccaaacaaatctaaccctaacagcccctaatttacaatttcacatacacaaactaaagaaaaagctttaaaaatataaaaccaatgatctaggggtacctttggttgttcctccttgaattccttgctaaaaactcagagaaaataggatggaaaagttggttctagccctggtttgcctcagccgaaggaaagagagagagagagagagttcaagagaaatgctatccttctaatttctttttgatttttcctttgattggaaaaaggattttaattaatcct

SEQ ID NO: 334198 - DNA, 520 bp, Cannabis indica
cagctccgtaagggtacaacaatctttgaaaatccctcaacaaaccgaggataatacacagctaagcctacaaagcttctaactttagtaactgactttggtcttggccaatcccgaacagcttcaattttggccagatccaccatgatccaatctttatccactatgtgccctaggaaagagacacaagataactttaattcacactttttgaatttagcatatagcttatgatctcgtaaccgttgcaaaaatgctctaagatgcaactcatactcttcttctgattcaacatacaccaagatgtcatcgataaacacgatcacacatctgtcaaggtaatccttgaacacccaattcatataatccatatcaaatatagtatgcagccttgctccatcactcacccggatggtgcttcttgcatttaggacactcgggatatgatcacaatgaggacccgcagccctgaccgccacctctatttccccagaactttctattaccccctgatactctg

SEQ ID NO: 334199 - DNA, 534 bp, Cannabis indica
ggctgtgaaacagccttcgaatctttcatagaaaacttttctatgatcttgttgatatagtcttcttgatgtagcatgagtttccctttgcctctatcccttagaatgttgatccccaaaatcttagtagccacacctatgtccttcatttcaaattccgacttgagcaaatccttgaccttgttgacatttgacctctccttgctaattattagcatatcatccacataaagtagcaagtaaatgactttagcaatttccaaacctttaaagtacaaacagtggtcataatagcttctattgaacccctgtttggtcataaaagtgtcaaaccgtttgttccattgtctcggggatttcttcaatccatatagagacttgtcaagcttgcaaacatggtcttccttgcatttaaccacaaacccctttggctgctccatataaatgtcttcttctaggtccccatgtagaaaagttgtggtcaaatccagttggtcaatctccatgtcaaactgagtagctagtgagagcatc

SEQ ID NO: 334200 - DNA, 781 bp, Cannabis indica
caaaaatactaattagagagattttagagtatttacgctaccgtctcatatctctcctttatatatatatatagatggtttagatatatgtagagtattataagtaaaaaaaattaaaataaccaaaaaatatatactaattttttaaaaaaattaatttaaaaaagaagatatataaggcaaaatatgagtaattttttaaaaaaatatctaatttttaaaaattttaaataaaaaaaaacaacaagacaaaaaacaaagacaaaacttgatactttttgaaaatatattatttttaaattttattttattttattttaattttttttaaaaaaaaaagagaaaaagaggaaaaaatcaaaaggaaaaaaattaaaaatttaattttaaaaaaatggaataaaaacgtggaaggttattttttttattagttttttttttaaaagttaaaagacaaaaagaaaaagaaaaaatcaagggagaaaaaataaaaatttaattttaaaaaatggaataaaaaatgtggaaggttgtttttttttatattagttattattttttttgaaaagttttttattagttatatatatagatattaattgtgattaaaaatgtggaaaatgagaaaaatattagagtagaataaaattattttagagtgccacatcaccacctcatatttctcctttatatatagatatgtaaatttgatgcactgatacatttttatttattttggtatttgaaataatcttttgataatttttttttaaatcatata

SEQ ID NO: 334201 - DNA, 921 bp, Cannabis indica
aaaataattaaaattaaaaaattaaaagtatattttaaatataatttcttttttttttctctttcctcttctacctctagccacactcgacccctcttcttcaattcttcttctttttttctcaaactcaattctcccgtagccatggaagaagtgtggaaagacaagcatttaagccccgaccccaactccaaagccccaaatctctctctatctcggggctcgatgtttatcaccgccgacgaagtctcaccattaaaaatggaggccaccacgggcctcgacgtcgttctctggaggcaaggccaccatggcctttgagtttcaaaccacgagctctgaaattcccgtagctccctttgtcgttcagtcgccgtcaaaagctcgttagagtaaaaaaatctgagatccattgagtaaaacggctttcaaaaacatattctactcgtaaagatcttttagatctggtctatagtttgtacaagcttcaccttcgacggtagatggccaccgtacgcggtagaactctggttagctcggagaccggagtgtggctggagatagaggtgggtcggggtcaaggtgtggctagaggaagaagacaagttaaggtggtgaggttggaggaagaaaatgattatgggtagtgggtaggggtgttcattgaatcacatccaatctttttaggtctatccagatccgatccaatcatatatatatattggatgttagattttaccatccgatccgatccaattaattttatcatccaatcgatccaacatccattggatgttggattggatcggttctatccattggatgtatttcatatatatttatttatttaatttgagtttatctaatattttagacctagtattttttggaatggatcggatccatccaatattttagatc

SEQ ID NO: 334202 - DNA, 815 bp, Cannabis indica
cccatgtgttagtgcaacaaatcagaaaaccttcataatcttttgtgcttaagcctaataaattactgtaagctaaaaaatctctaacaattaatccgtaataagattgcttcagattaaagaatttttttttaaaaccatcataggctttacaccattctcatacaattttattaaaatattaattaatggttctaaatatacatcgatattatgtccaaattgttgcaaactgatatcattaaagaaagcatattaactttccttttcatcactaaccatggaggaagattgtacataacaaggaagacatgctatgaactatgacgactacttagagatctatgtagatttacttcatccataaatagaccgggacgaatatgtcttggttcagatttgaattcaaaatttatgtagtttactattttccaagcttgggaatctataggatgtccgagctttccatctttcactctcttggtctcgtgccgaatcaaatttttagaatgttctacactacgatatgatcgtttaagtcgtgaaatcaaaggaatgtaccacatcactttttgggggataagtttcctattcttcttactcttatttattttatcgcgggataaactacaagttaggaaagtgtccatgtctgcatattccttacgatataaaatacaatcgttcggacatgcattgaccttttcatacttcaatcctatataatttaaagttttcttcactttatttatagattacaggacgtaattgtcaaatagaaagatattttttaaagcagctaaaaattgagtaaa

SEQ ID NO: 334203 - DNA, 894 bp, Cannabis indica
acattagtaagtactctagttagcaagtaaaacattagttgcattctcctttgaagaattatggagtttttgactatgttaggtatagggaaaaaatgtggaagggatagaaaataagtttaaaaaattgtggtagatccttattatttattcttctcagtgtatattttcatgttccttctgcatctacactgagatgcctacaataaaatcttaatataattgtttctatattttatattacatatgttggcatcattgtatgttaaaagtgaatactgtataactgactttgctgggatggtattgtaatagtaaattatcttaggaaaatatgataacttggaagcaaagggagactattttgcaacaagatgagtgatttttattgttattattacttgtttattttattaattgtttgtgaactgctgtactttgcggtttttttgttccaatcagtaactggagttgttggtttggtacaacccactcgattttgggaaattgacattgcttttaattgaattttaatcttatttgaattttccttttgggaaattagaattataacaaaactaacaatttacagaatccattatttaggcatattggtacattgtacttaacagtttccatgtaatacatattatgaaattatgttatatgggaagagatgcttacctgttattgtacacatatagaaaattaagtgtcgggatgtcatgaatacactgaaatgttagacaattgcatgaattattcaaagtctttgtcttccaatattttagtgttttgaatgtttgttaatttaagttattttgtcttgtgtaataggtttataaaatggtatttaaacggaagaggggggctgctgcagacaaaaaggatgca

SEQ ID NO: 334204 - DNA, 1293 bp, Cannabis indica
aaaaaaaaaatctaaattggctatttttgattgtatatgatgatccaacgatcaaaattaacttctgaaactgatagtcaattttcgaagcctggcaagccccacttcgggtaagttggagcttatttttgtaactcccttggggtgaaatttgaagtcgataacatgtctgattcagggccatccattgcttctttgtaagtcaatggatcctccttgtctgtgttagaaataagaacatgtgcttcatgttcgtagcaaacaggttgtctcataatcctcccactacgacaatgtattggggtttccttttcagaaaccatgataaccgctgttggtcgttcaactaatggtgctaaaatcattagttcaaaaatctcatttctaatttcctcgataaccacttgaatgtgtggcttgtgacttttcatatagtcatgtttaagaaaagtaacatttgacacaaatactttattatcttgatgaatatagaaataggcacttcgagtctcatctgaatatcgtacaaatatacacacttaagtcttaggagcaagcttcctagacttaggtttaaaaatatgagcaggataaccccaaatacgaaaatatttcaaactaggttttgtcccattccataattccattggagtattgcctatgatattcgagggtactacattcaaaatgtaggtagctgctagaagttcgtatccccagaagttcaatggcagtaatgaatagtacattatcgatctgaccatgtctaacaaggtctattttcttctctctacaacaccgttctactgaggtgttctaggtgttgtaagttgggacaagatcccttcttctagaaaatagtgtttgaatttggaatccaaatactcgccaccacgatctgatcaaagtgtctttattgatttacctaattgtttttcagccatactcttgaagtctttgaactttctaaaagttttagacttcttgggcattaggtaagtatgactgtatctagaattatcatcaatgaaagtggcacagtattcagaaccacctcaagcttgaatattaataggttcccacacatcagtatgtgtaagctcaagttattctttggctctattgccttttgcagaaaataatatttggccatcttgccttctagacaagactcacataccggaagagttccatcttgtagttttgtcaaaatatcattctttgttaactagtttattctgtctaggccaatatggcctaaacgtagatgccatagatacatttcatcatcat

SEQ ID NO: 334205 - DNA, 1066 bp, Cannabis indica
agggggattcgaatgtgaagaatatgcttcttgtgctaaaagccctgaggaaataattgtgagacctcaggagattatggcagagggtcaagatattacctgcctaattccaaattatggtggaagtggtaggagctccacgattgagcggaagaggaaacccacatcatcagtggtgggtttaagacagaacaagcggttccgaaggtttcatggcaaaagaggacgtcagggttattcttaccctgagtgctcacgttacatgaaacaccatcccggagaacgtaaccgaaaagtatgttttgaatgtggtatggttgggcattttaagaaaaattgcccacaggtggagaaagtagagcaatagcaggaagcgatatttgttcctactccggtgtatgctaatgttcaagttgatgatgcagcgagcccttctcttgtggcaggtcagatccctgttaacgacttcttttattttgtgttgtttgatttgggagctatatgttcatacatagttatgtgaataattaatcttttaagtaaggctttgtgatattttagaaatggggtttggaaccctaatgcctagtggggcgttggttagttctaatgggcgctttaggtctatgctggttaggattgaagataggaagttgagcgttgaccttataaaattggaattaattaaatttgacattatactgggaatggattttctattcaagtgttcggccagtaaagattgtaagcagagaatggtgtctttttagcctgaaggtgaggatctatttgtttaggatggatcagtccaggggtcttggatctcggttacctttgtaataggggctagcgatttactatgcagtgactgtgtagaatttctagcagtgataattgatttcagcagacctgaaacatttgggtctgaggcaatcagggcagtgaaaaattttcttgacgtgtttttccgagaagttgtaggggttttcgcgtcgccacatcgaggaattggtttcttaattggtatggcacctggagtcgaacttttttgtctaagctccatata

SEQ ID NO: 334206 - DNA, 680 bp, Cannabis indica
attgtaaaaaatataatttttataggtataaaaataaaagtatatatgtagaataataatagaaaatataaagtttttagagaaaaaataaaaatatataaaaaatataaatgaaaaaactattaattcttgcgggcaaaaataaatattttcaaattttatcataaaaattaatttataaaaatttgaagtaggcaactaggcaaatatcccacaagtacctattccctccgcccctgataaggtggtgatagatatgttccaaactttttcttttccagttttttacttaaatttttttaatttttttactcttctttacaaatttatatgttcgtccccttttaatttttacttttacattttgccccctcctatattttttctatatctctctccatgatcctaatatagtttaatggcatgtttacttgtttacttaaagggaatgagaatgaatgttatggtattgattctcataccattgtttactaaattttggaaagggagaaagtagtgggacccacacaaatttgggagaaaacaaaaagaaagcttctcccctatttttatagggaatacctttccctttcctagcttaatttattctaattttaattttattaattaaaaataaaaaagacaaatatgccctttaaaaatctataaacaaaaaaata

SEQ ID NO: 334207 - DNA, 1021 bp, Cannabis indica
aaaataataataataataataataagaaaaatataaaatattatttttgttgtttgatttttttaataaataattagtatttttagtccttgaacttttgtcactacctgattttgtcccctaaaatataacagttacataattatgccctttctgttaagttttgtttctttaccgttaaaaattagtatttttaccctttgtactttgaccaatacaaaattttgccccctttaactaaaaaaaaattattttaaaaaatgtaatattctatcttttttaaaaacaattataatattctattaattcattaaaaaaaataaaagattggattaaaatattaattttacttaaaaaaatattttcaaactttattttatttatcaacatatatcttaaaaaatcaaaccaaaattattgagaacctaataaataatttaaatgaactaagattcttttgaagaaaaaatcaaacttttttatagttataaactcatgccttaacaaataaaaagaaaaaatccatggttacctgatgcatcagtccctttgtaacgactcagctggtgggattagatgactgtaaagtggctagcctgatggagagtcatgatagaaggtgggatttagaagtgctgaatgatttgttcaacacccgtgatcgagatctgatttgtaagctccctatttcttcagcttcttctgatttctggtattggtctctcaattcttctggtgtgtataaagtgaaggacgcctataatttgttacacaaggaagatgggttgcttttgtcatctgatgagaaaagattgtggaagatagcttggaacatcaatgtcccgcctaaggtgcttcattttttgtggcgctctctctctgaaactcttcccacgaaggttcaactggtctcaagacatgtcccacttgatctgcgatgtcctatgtgtaactttgaggatgaatcgattgtgcacttgttaatagaatgttcttttgctcaaagttgttggcatagatc

SEQ ID NO: 334208 - DNA, 554 bp, Cannabis indica
ttttttccataacaattcttcttttctttttatttttaatttttaattgtaaagctagtttcttatatattgttgcttaggtctaggattgacttctatcaatcaagggagaactatatatatacatatatgatatgcacacgtagtgaagatttttgagacgtacacaatgatattattgtcaacatatatagtagatattaggaaattaggtataccaataccaacagcaccacgattctaagattttatttttgaaatatctcaaaatcagtctaatattatttgtacaaattaaaaacgcgcatgttagtgtgtctaattaagtcaataaaaatcactattgaaagagtgatgaacatatatagcattgctattgaaaaaactgatgatatacaacattcacgtgcaacaatattagagaatagtgtgcagagatttcattgtcaacgtttctgggaaaaaagataatgttggtgctgatgttcgaaccgaggtttgttttcggtttctttttggttttctcccatatttgaaattttacaccttctgta

SEQ ID NO: 334209 - DNA, 499 bp, Cannabis indica
tcctttatgttgatgacattttgatcattagcaacaatgtcaagaaaatgactgacatcaaggaatggctagagactcaatttgaaatgaaagatttgggtgaagctgcctatgttctcggtattcagattataaaaaactggaagaacagatcccttgctctctctcaaacaacttacatagataaggttttagagagattctcaatgaccaacaccaaaggggaaactatgccttctagatttgctttgtgataacactggagccatacccaacagtaaagagcctcgaagccacaagaaaagcaaggatatagaaaggaaatatcacatcataagagaatatgtggcaagaggggatgtactggtggaaaaactgtacacagaggacaacctagatgttatattcaccgaagtcttggcaggaactgcatttgaaaagcaccaatagaatttaggattaattgtaatgtactgattgttttatattagtacaagtg

SEQ ID NO: 334210 - DNA, 599 bp, Cannabis indica
attaccggctgcttcttctcattttttgagcttcatttgagttatctaggagttcgccagagttgaggtaggctgctattggcgtcatccagtttggggatgtatcaatcctttcaatttcttccgtgccagtgatgctaggctattcgaggaactggataggcaccaggtttgccttgtcatttacattgctgcctgcaattcgaggtaacacatctgcagttatatttttttgtcttggaatttgtctgagactgtagcttttgaattgtgcgagcagatcgtgtattttgctcagatatgctatcatcttttctccccgagcctggtattctttggatacatgatttacaaccagctgtgaatcactgcaaatttcaatgtgttcaggtttcatctcccgggctagttttagcccagcgattacagcttcgtactcggcttcattgttagatactctgaatccgaacttgactggagcgtgcaggtgttgcccctcaggcgtgacaagggcaatccctgcaccggatagttgatctgtagccgacccatccacatgtagtttccaggtcagtttttcttcattgttacttggctga

SEQ ID NO: 334211 - DNA, 690 bp, Cannabis indica
tgaccttccccaggcggtgtgggattgcacagcttacccggtatgtccccttacggatcacgggactactgactgtcacaattatatacgttattatatatattattcagtgtatatatgcttatatatattatacattatatatacgttttattgcataataattataatactccatttcatatatttataatattttatgcaatatatacattatatatataaacacgtgaaatttttagtttttcggtccgtgtttgttccgattttattttttcgttttcggtatttgtttcaattcctatatgcatcactacattcatatagtattagtaagcatgaaaaaaaattttggaaaacaaagaaatatcaaaaaatttctggaaacaccgttcggacccaaaatttttgtgtgaacttaatgtctttattttacgtgttttcgatgcatgaaatctatatgaatgtcttaatttttgcatttagattcatttggaattgatttgggtctttttggttgtcgaaattatctttttcaattgggtttgggtcgggtccatcggacccgtgtgcagaaaaacgggtcaaaatgactcgttggctgaagaagacaaccccaaacgacgtgtcatttttccatgagaggctgctgtcgtttattcaaacgacatgtcattttccataaagtgg

SEQ ID NO: 334212 - DNA, 503 bp, Cannabis indica
ataaatatgtaacataaataaaaaaaaatactctcagctaaataaaattacaaaaataccctttcggggttagcggatattacaacgtccctgttggacagggtgttacatctatagtgaagtaagttccgtgaaaaatatattgcggttggatggctagcaaatattaatatttagatttttttggttttgtatttatagttttgtttataaatattgaaaatttaggaataattaattttaagatgttatgctatcgaatttttggaagcataattttttcaatttgattattatttattttaaatatatattatgaattaaattttttataaaaaaatagttagatttttactaatattatatatgagtgcactcttaaggggtattgcccacgaatgggtaaaatcaaaaagatttaagtttttatgctcaatttttctatctaattaaaaaaaaaaaatctcatttttacatcatataggctgagcttgttccatcga

SEQ ID NO: 334213 - DNA, 785 bp, Cannabis indica
aatgtttcttagtccatttggaactctcctcaatcctttgcattcataaatacgcaaataggcaagtgtaggcaatgcactctcctctactttccactctttcaagttatatagaacagtaaggacaagagattcaagtcgagggaaacctcctcttgagcacaccatctcttctcctaaaaaactattttcagaaatggcaaggactcttaatttcggtagcttctctaatgttggcattggatcatcctgaaggaacaacctagtcaactctaacttcaaaagatttggggagaattggttgacttttggtaatcttactataggtgaccacaatctaagcttgcacatttgaggacagcttaatatcaaaggaacaatatctatcctgttggtactattataattcatcacttgtaacgaaaatagacgagtgaatgtgagaatgtggggattatgtaagaatgtgttgaaatttccatccacaaaaatacttaatttcttgagactctccaacagtagaagatcacttagtagatgatacttggtgcctatacctaccaatgtttgtaaatttttagacttagttaacctcaagaaattaccaaattctatgccaccatgtccaaaataaatatgtagatgcctcaattgctccaactcacacattgagcttggtattttataactcctggtccatactctcaaagtctggagacatcttaaattgccaaaagaagatggaatctttttatttcccatttaggaatacttaataaccttag

SEQ ID NO: 334214 - DNA, 532 bp, Cannabis indica
atcgacaaaaatcgcacaaatataaaaattgcaaacacaatcgctataaataaaatcgcacaaagtcgcacaagaaatcgacaataatcgcacaaaaagacgtttccacattaaatggtaattaatgtgacatttattatcccgcctaaccaactacttgattatgtcgctaacatatcgcacataaatcgctacatgtcgcgaaaattgcccagattgctttttgcatgacaaacatgtgtacaattgtgtaattcaatttttacatttattatcccaccttcccaaccactagttttctctataaaagccaattgtctatctcataagttacacatattttcttaatttttttcctcttaagataattctcttagcaatgtctactagaaggaacaagggcaaatatccgattcttactcctgaagagatcaagcaggagcctgattgtggggaaattacgcctcaaatgcaaaaagtgcttgacgacatgaaacgttttgaaaatgaacggcttatgaacgagtggagg

SEQ ID NO: 334215 - DNA, 701 bp, Cannabis indica
agttctatgtatcgttggaaagctcgttccgagctctatgtggttatctgtattttaaatgccatgagtatcttttatgaatgtggaatcaggggttaaccctatttgtgtaaatcccagtattgtgactaggattatcggcacctggtcaggagcacctgcggatttggaatctctgctattgtgggacatcaggtaagacagtagttagcacgtagatttatgcacggtggcacttatattggaaacgatatatgtgagtaattagtaaccgagattagggttatcaccctaacatgagcggttaatagcctagggttattaccctagtgatgtatgttatgtaaattctatgccatgttgaatatttgtgtaaattgagatttagggttacgtgttcaaggcataaccaggttggactcggtaactagaactgagatgaaccattctaaggccttgttgtatttagacatgtgagcgcaacatgtaggtctacgttacgtggacataaataggcatgtgagcgtaacatgcgggtctgtgtcatacaggcatatgagaatggcattactgtttatatagtgtgataaatatgtttatcaatatcttattactgtcttgctgggcttggctcacaggtgctctactgtacaggaaagggtaaagctgtttctgatcagccatgagtatgggagctgaac

SEQ ID NO: 334216 - DNA, 641 bp, Cannabis indica
ccaaaagcgagagaaaccccatccctctctttccttttttacgcccccacgttgccacacgggagggacatttgatcattttacccctaagcttgaaataatttgagattaatcatttaagggtgttttagtcatttgactatggggttaggtggctcattcctatcttgacagctgccttttatgaggctgaattatacattatgttagttaattaagaaagaaattagaaattaaggggaaaagccaaaaaataaaataatagaaaactctctttctcttcctctctttcggctgaagcaacaagaaggaatcaccctcacaacctggtatttttctagaattaagctaaggattcaagtaattttgaggcaaggtaaaccctagaacctttgaacttgtgtttttaagctttaaagttggtttgattatgtaattttgaaagataagggctgttagggttcaaagtttgtgtaatctgatttctaggttgattttgagttggttttaagctctggatactagttttggtgtatggagatagaattgagtatgcttgagctttgaaactcaagtttaggtctttaatggcataatttgattcagtgacttttttttgggaatttctggttggaatatgt

SEQ ID NO: 334217 - DNA, 740 bp, Cannabis indica
cagcctattggatcttgatctttcgagaaacaatttagctggtgaaataccagatttgttaggtaattgtaaaggattattgagcttaaacctcagtcacaatatgctatctagtgatataccaccagagcttggaaatttggtgtctatacgttatttattggatcttagcaataatttacttgttggagagatacccacaagcctgtccaagcttacaatgttggaaattctaaacatctctcataaccacctctcaggaagtattccccaatcattttccaacctaataagcatacgttacattgatttttcttacaacaacttgacgggtctaatcccgactggaaaaatattccaaaatgcttcaataagtttttatgatggaaatctcggattgtgtggaaaagctataggacttaatccctgtagaaggcaaagaaacaaaattagcaatggtcttatattgatcattggtcttgtttgtggcctggtactgtttgttactgtcattgttatcactctcgtattgtgtcataaactcaaagtgttggataagcacaaaagagatcccacaaaaaatggtgcgcatgagtcattgatatgggagaaggaagcaaaattcacgtttggagaaattgtagaggcaactgaagactttgatgacaagtattgcattgggaaaggaggttttggtaccgtttacaaggccatattgagagcacatgagttagttcttg

SEQ ID NO: 334218 - DNA, 927 bp, Cannabis indica
atcatttcagattttatgtcaagtagtacgagaaaaggtagttcaaaacggggacgcactgatacttcagatcaacccttgagtagtacgagaagatttagctctaaacgggcacacaatgatactcaatcaccatcagattcaccgcaatccttgacaccttctactgatgacccttcaacagttccattacatgatgaacaacgtcaatcttcaaaaggtacaaaattttatcatcactcttattttggaaaaaaatacatttataaatacttattaattatatatttttcttacaaaaaatagaaatacaaaagaacgtacgtggtcctactcgtggagatcgcttaagccgtgaactgaagaatgacaaaataactaatttaactattacctataataagggcgagcttcgagtttatggtgataatgcttctgattttacaactaatgttggcgtaaatgtacgccatcatgctccattgcaatatagtggttggagcaaagttccacctgcagaaaaaaaagctgtatatgctcgtatacaggtacatttgttaatatattcatttttcaatattttttttaattaggtaattttatatttatttattcaaaacttatgcaggatgtattcaaattggactttgcaaaagatccatatcttgaggtaatttgtgatgaatattgcaaaaatgcatacagcaatcatcgtcataattgtcaccgacattataaaaaaatgatcgaggaaggaaaaaatccattagagcatcgacctacgggtttggtgataaaagaagctgactggaaatggatgtgcactgcatgtttctccagcgaagagtggaaggtatcataatgtctatttcatcatataaatttttaattttcttaaaaaattattaatgtcaattactttttttt

SEQ ID NO: 334219 - DNA, 649 bp, Cannabis indica
aggaaattacattgtatactcattttactttactgttttaattttcatcttcattttcatattctttaagatctacccacttttataaattatgtctttcttaaacccattaagttaatgtaaattatataatacacttaatagagattgagagtatattgtgcaatctactcaaaaaaatgagtatattttaataaaatatcatataagggtatttatgattaatggatacaaaagaggtatttattttttcacttatccctaataaacataaaggaaattatattgtatacccattttactttatttattttaattttcacttttatttttatattttttaagatatacccattttcatagctgatgtttccattataccctttaggttaatataaaatatgtgctagacttaagtggagagtgagagtatattgggaaatcaactcaaaaaaaaaaacctcaaaaaagtaggtatattttaattaaatataatatgatgatatttttgattaatggatacaatatttattttttaacttatccctaataaataggggaactttcaattatatactcaatactaaaattatgtaggaaaattctacaatgcaccccttaaaatagatatattgatgcacccatatct

SEQ ID NO: 334220 - DNA, 802 bp, Cannabis indica
atataaatctctgtaatttataaattacacttatttactcacttacaacaaatttaaattttatgctgaaatagattagtaggatcataatctcacttattacttgatcaacccataatataaatataaactctaaatatttaccattaggcttattgagatattacaaccatcccctccttatagaaatttcgtcctcaaaatttatttgaatattttgggatattatccccatatttatgattttgactctcaaattgtgatatctatcttgttgtttttctacaacactttttaactagtggaattgtctcatttcatagtacttccttgttctagtcgaaaacttcgacaagatatttttcccatataatacatttgtttgaagtttatcatcgtcacagctcagaatatgggtcgagtctgatacatattttctcatcgtgaagatatgaaacacattatatactccggacaacgcaggagttaaggctagttgataagctaactggcctactactccagtgaataggtgtctaatatttctctcgtaccacacttattaaagtacctaaccaatagtacatttaattatcacttttagatatacacttcatcgggggaagagattattctaagataatctaacctttatctaggggtgaaaatcggtcagttatggtttgtttttacaattttctaaccgaccgaccggttggttacggttttattttacaagaactgtaaccgactatttagaaattataaccttataaaattgaccgtacagtttttggcagtt

SEQ ID NO: 334221 - DNA, 993 bp, Cannabis indica
caaggcttttatattgaattatggagctaacttgttcagttaaaaatgccttttttggaacattagtgtttcttttaacagtgcaaaggtctttcaagaatttggagtaggcaggaatttgtttaatggcatctaagaatgggatgttgatacttacttgtttgaacacttctaagatgtcactatattggttgccttttttgagtggaagtaatctttgtggaaaaggagcttttggaatggaaggaagaatttgatcattatcttttgacaagtcatttgtgttggaactttgaggttggctttggtctttttcaacttgaggtgtgtaatcgggtttggcaatttgttttccggacctaagtgttgaaatagacttggcttcttctttatgacttgggactcctacttcatattggcctttaggatttgggacgggttggctaggaaatcttcctttttctctctcagttacggcattggcaagttgacccaattgtgtctcaagtttggcaatggattgagattgattttgcatgatttgttgggtggattgcatgaattgttgtaaagtgtcttctaaggaaggctttctttgtggagggtaaggttgacttggttgggcatgattcggatttggcatgttgaattggtttccttggttcatttgtggttggttttgtctccatgaaaaattgggatggtttctccaattaggattgtatgtgtttgaaaatgggctatcatttggtttaccatatgaatgtaatgcattagcctcttcggaaaatgtttcaagaaaagaaggacatgattgatcattatgacaagtactagcacaaacatcttttttaggttgaacatgagaattcatagtttgacttatgactaaggcttctacttttcttgctaatttttcaaaagatgttctcaaatcagtttcttctttaatttcatattttcctcctcttttaggtgaattatttgctctag

SEQ ID NO: 334222 - DNA, 611 bp, Cannabis indica
caagacatcaactttgttaaaatgtgcaaatcattcataaattgactccaaataaattacaaaacatccaaaaaaaatactgcttttgttaatcatgtaaaagagagaaaaatataggaggagtgctcttaatttttttctaagatagataaagagtgttaaaaaatattatgaaaagtgtgaaagtaaaataatcatattttagtaaaaattaaaagaaattaattaaaaaattttaaaaaacgtgattattaaagaaaaatattatgaaatagtttaagtctgaatagtaagaaaatataaaatttgagaaaaataaatatagcaagtgtttgtatttttttaaaaaaaaaataataaaataaaattttcttagagagtgaaaaattgttagaaaaaaaagatataaaaatacatacttattatatattaagttttttatatatataaagataaaaaaaaaagtgtagaaaaaaaaaagatagagagaaagagagagagaattgaaaaagaaaaaagaaaaataaagagagaagagaaagaaaaataatgtcagccaagcttactaagaaaaataaagaaaaaaaaaggacagagctaagaaataaaaa

SEQ ID NO: 334223 - DNA, 1723 bp, Cannabis indica
gggcataaaacccaacacttcctccattcataaaatggaatctttgggaacattttagaaacatcaacgttgcctactcttaattaaccctctcccatttttgaaatctctttgcaaaataaaagatccaaatctcaccacaatatttagatcccgaagaaaaaccaatcaaaaataaagaggagagagagaacaaatctaaagggttcattgtcgctaaactagtcaaaccaggggtctcggggtcaatgtcggttcttcacagagagagagagaagtaagaaggagagggtgagaggtctcaggggtctcgcggtttggggtctcgtcgcctagggtcttggggttctcgggatttagttgttcccggaacaaggaggctgagagatagggagaagagaagagtttggttagtgattgacgattggttggttgagaagagaatgatatgggcaagaggaagaatttatttatttatttttattattttaatttattttttaaaattttaattaatttttaaataataaaaataattaaaattatatggaaaaattaaaacataacatgtgtgttaaccgaaaaacgttccatagtgacgtggacataaatgtttgacatgtggcacgaaagataacatctcggagttcagtagtcccgagtcatagcagtcgaccagggaggggtctctagccctgcatccaggttgactctgacaactccagaatgggtgtttgggtcctgccaagttgtttccaactcactatctttcagtattatgtaccatgaagacatgagttgtttccaactcactatctttcagtattatctttcaggcctcgggagctaaaaacacacgaaacaacacttcagaaatcaccccggccgcctagggtttcacccagcgcccaagttgacaccccaactagtgttttagtttctataattgtcttaatgcaaataggtcaaactttgcattgggacatgaactagacataccacagacatatttgaggcatcataatcagattcaaagaaccttcattttttgagcaccggatgcatgggcacccaacgctcaagttgacaatttgccaacctaggccaattctgaggaattttatcgaaaagtcttcctggtatattctttgttttcatcaaagattaagattcaactattccttgggagcaaacaaaactttcaagaggccttaaactagacctagcgcccaggttgacgtattatcaacctgggctgtttccaagtagtttttcgaaaaagtgttctagtaattttttccatcattagaaataacaaatatacaagtaaactcgaggagaaaacgatagttccaagggcatcaaaattgagcctagtgtccaggttgataattaacttggtgtgctggtttcaatcactgaaatgcaaattttgctccaagcattctatacaaaatggtcaaaaataatgtaggagacctcatcctcaagttcaataacattgaaagtgtaaaaatgacatcccgaaagcttcaaaaagagcacctagcacccaggttgacatatggtctggtgcaccgggttctacttatctgattctaattccgtctcaactgtttgtctagtttttcataataacttggagtcatgaagtcagaagagtcaaattcacaacttcatatttttacttttttcggctaaagtgacttactcagaaattggg

SEQ ID NO: 334224 - DNA, 595 bp, Cannabis indica
tttttatagtctatttttctttatgattgtatatgttatagttatttagaactacctgtaattttttttagtaaattctaaatagtttataaagtcaaaaataaggttttaaatattttgtatacatatttataatattttgagcatattgattttgtatatataattataatataatgttatttattatatagggtatgagttaaatagaattaaaattagttttaaagaccaaataggaaagaaaattaactttagaatattttcatttcaataagatttattatttctagttatagtataaaattaaataagaaatgttcataccaaagatatctaaagtattatgtttgtagtacttaagtacataccaaattattcttttagtagcaaaagcatttaaattataatgcgtttgtactaaattatttgattagcaacaaaaatattcaacttcttaaatttataacacttaagtaataattaatttttttttgaaattatttcattaataactaaaaatacaaaaaatacaaaaaattacaaaaatatatatatctacagtatttttaacattttaaggactaattttttt

SEQ ID NO: 334225 - DNA, 721 bp, Cannabis indica
tgttctatgttatatacaaatagatcttgggttaattgttaatttatctaacattgatatgatgtaatatgaaaaatattaatttttaaggaattttagaaacataaatgggaaaaatttgttagagttgttgattggagccaccacaaaaagttagtgttttttttattcttatattttaattttttttcattaatattaatttgtgtattatatgttaatttgtaaataaatgtaatttgtatattaatttttttagtttaatttttaaaaaaacagatttaatagtttttaaaaaaatagattttatgtatttttttttataagtgttactaattgtataattttttttaggtatatgtaagttttgtgtatgtagaaataatgtgaatttgtgatgtatttgaagattgttggagtgtttaggacaaatttaaaattttttagataggttaaaatatagttgttatgccgccgaaatgatagtagaattttgatataataaaaaaatataataattaatttataataagttattaaatttataagaaattattgaaaaataaaattataaaatacgttcttatttaaataattaattatttaaaaaattgtagtaattaaatttaaatttaaataatttaaaactaagtaattagttaaaataaagtataaatttatatttttttaaaaaatattaaataattagattttcaattta

SEQ ID NO: 334226 - DNA, 632 bp, Cannabis indica
tccaatttagatggtagtaaatctgaattaggtattggcactgagtgtgtactatggttcggggatttgtttgatactcgaaatagcaagggtacttatggctgacaacaaaatgtttatcttcgaataccattttcaacaacaggtacagattagtacagatttaaaatgctatctatatccagagtcggtcctgagttgaaatgggccatagaaaaaaaaaacaaaaaattgagcccttaatggtatattcttttctttaaaaggtatttttttttatttgggcccctaaaatgagtgagccctaagcacaggcttagcccgcctatacctagggccgacactgtctatatccatattaagttcacatgtgttctgtattgtttttgcctttctcagctccaaaagaaacaagtgttggtggtaatggtaattcaaaggtgaagaaagtagtgataattgtagctgtcattctctttgttggattagttttgattggctattacatttacagaaggagatccattaatggtaagagattcaactctaccctttacttcgtttttgtcatacaacacttttggcttggaattgttttgatttgaacagaacagagcatttggttttgtaaa

SEQ ID NO: 334227 - DNA, 413 bp, Cannabis indica
gctgagggagctcataaggagaatgaacttatccaacctaagcgtgaagctaagttgaaaggaggtgcaagggccaaatagtatgctcatgagcccttgaatcctgaagatgaggctgaggaagagcaggtgactctgctaaaaaggaggaagaaacttccggcccagcccagttcacctgctcagcaatcctctcccatgcaaggaaaagggaaagtcatcatgggagatataagagacttgtcaggtgataatggactctcaagtcttgctcggacaaatcatttcgcaggatattccatctttttttaaactccttgactatcatgcatttatgcttctaatgcccttttttttctttaaccatgttatttttgttctgtgcaaacatgtctcaaaagatgctcgatgct

SEQ ID NO: 334228 - DNA, 552 bp, Cannabis indica
taggaatttctatacgattttttgttgcaatttaggttgcagcactagttgcaatagagatttctatgtagaattccgtaaaaatgtaaaataaattgttttaaagtgtaaaaataaaaaagacccatttttttaacagtcaaactatttaattattatatttctaataaaactttattttcttttacaaaaaaggatacttccaccgctaataaatttttgaataattaattagtttataaaatgatattaattatgtgaattttccacttcaatgcaatctcctatatctttgtcacaaacctattcctccaatcaactagctatatcacgttctttccctttttctttggttctcattcgtcatgccgcacgaccagacccaatgatatttgtaatgaccgctctagtttatgaattagtaaaggcaattagcactaatttttattattttattattatttgtgaattgaattttaatgtggaccccaatatttagaaataaatattagagttataatttctcaatttcggagattttattaaactcta

SEQ ID NO: 334229 - DNA, 755 bp, Cannabis indica
cccaaagccttgaaatgaaaccccctgccttctccctctcgcctggttcttcttcttcgcacacccgtgttcttcttcttcttcgtctggatttctggaccccatgttcttcttcttctatgtcgatacccgtgttcttcttctttttcgtctggatttctggaccccatcaagtcgcacacccagatctgcccaggaaccatgtatggggtcattgttcttctccctcatcggcgtcggcctgcgaacactcctcaccaacgccttcttcctcctcaccatcggagcagctctatttcaccacagtgcatcctccttttcctctcttctcgacaacttgtgaatcagaggcttgacgatgaaaatacaatgtagtttgtgcttttatttttgggtttgagttttatttatgtttatagatttgtagttttggcttgagtatagagttactctacctcatttaagggtttcaaaatcaaagttttgcttagatctaattgtttagtttgtattttgtttgtaatatttagttttgatttgggatcctaatattaaattttgttcttgtcaaattctgggtttgccgtgaatgtgttaaacaaattttgtatagtttatgaatattttgttgaagaatttgggtttgttaaaaatctgaatttagtttgtttaactggtttcaatttctcaaatttgagtttattttttaattcaaagaaaaaaattaagtttagaaactaatcctattcctgaat

SEQ ID NO: 334230 - DNA, 924 bp, Cannabis indica
aggtaaatactattttggaacctgtactttacaaaaattaccagttggactatgttttgttaaataacaaaatggacactgtattttctaaaatgatacaaatagaactctgaattaattttttttatcaaaataaatgataaaaatatttatattttttcgtatctgttcgtattagaaattgtctttaagttgtcaaaaactgagctcagtgttctatttttgccattttagaaaatataaggtccattttgtcatttaacaaaagagagagtccaatcggtaacttttgcaaaacagaagtccaaaatcctttttttaacttaattgtaacaacttaatttatttttttgtactactatatttattttttcatagaatttattgttacagtttcatattttaattttttttcctttttgaattagtgacatttaaaatgatgatttattgtttaaaaattaaacaaataattacattaataataaaattttatgattttcgtggggtataaatgtatgggagaagttgaagaatactttattttttatatattaactaaatttacctccaaataaaatttaattcaaatatacttcctttttatgagtactgtacccaaattatcctcacacactcacataatagatttatatttttttgtagatggatgtataggtttgtaggaaagtttgggcgaaattttaattagagaaaaataaaagttatcgtgaagtaataggagtaaaattggtagaatgattggaaaaagaggtaaacataataaattttaaaaaaaagggtaaaattaaaggaatcagttaaaagaggtatgtaatttcttctaaatataataatatataattaataagaataattacataaagtatcattttttagtaaaaaaaaatacatttttacgtt

SEQ ID NO: 334231 - DNA, 571 bp, Cannabis indica
tcccaggaaaattggaggtgcctgcttacggaacctttcttacaggggttccatccggttcattgcaaccaccagttcggcctgcacatcaggagcaggtgccactgctgcaggagcaccctgctgtcttaattgccgaatcacttcctcttattcattgattctagtttgcatttctgcaaacctgttttcccaattctgggcatcctgagcagctagggcaacctgtggcgggttagcatcaccccgaccacgtgtcgtgcccctaagacctctaccacggccacggacatttgggggaaactgagctccctgaccttcatttgacccaacggaattaccctggctcctggtgtttcacctggcgtccatactaatctgaacaacctgcgtaaccaagagctagtctggtcagatcgtgattaaagaaaaacttactaatgtcgctaatttggaaattaaaaacatacgcctattctactatcaggctactaacatgcttcctaactaccttttcttatatcatactataaaaataaactactaaagcaataaaagcttactgaaccgt

SEQ ID NO: 334232 - DNA, 2734 bp, Cannabis indica
agaattcatgcaaacatcaatcacttcaaatttcttatattgataactgatcagattgtaaagagttttattctaccattagcatgtagaattcatgcgacagaggtattactagcctaccctacggcaagacgctttcaacttcgcaaagaaatgtgacaaatgtcagtgaataaccacgtatgcccatcaacctccgagccacttgcattctatcacaagcccttgaccctttgcagtgtggggcatcgacttgataggtgaactaccaaaaggaaaaggtggagtcaagtacgttgtagtcgcggtcaactattttacaaaatgggctgaggccaaagcactagcaaccatcacagcagctaaactgcgcgagtttgtctacaactccataatctatcgatttggcatcccttataagctcatttcagataacggaagcaatttgactgtaaggagatgcgacagttatgcgaagaattggggattaaaaagcattctcagtagtcgcctgtccgcggagtaacgggaaaactgaagccgtcaacaagataataaagcacaccatcaaaggaaaactcgaagagcgtaagggggtatggccagacgagctttcacaagtcttatggtcatacaacacgaccccccaaactacgtctggtgagactcctttctcgctctcttatggatgcgaggctatgataccagttgaaattggggcaagttccctacgaagagatgttttcaacattgaacagaacgaagaaaagcggtcgctttaccttgaccttctagaagaaaagcgcgatcaagcttacctgaaaaatgcgtcttatcagcggcgaaccgcaagatacttcaactctaaggtcaaggaaagagttctgcgagtaggagacttggttcttcgaaaaataatggcaaacacgaaaaacccagcacatggggtcttcagagacaattgggaaggaccatatctcatcgcagaaaagattggtaacgcaacataccgactcgcagaactcgatggtgctgcaattcaaagagcctggaatggcgaaagtttaaaattttattatcaatagtactcgcactgtatcgtttgtactcgctatgtatttatacttagtcattttatttacataaatattctaagtataaggggtatataactcactatgtactattgatcaataaagagttatgtaatattgataataaagagttatgaaattttttgaggatgttgaaatttttctaccttaatgattattacattaagctgtaattaagccgcaatcgagatattataaatagcgaaaacacgagtacccgtgtactgcgaaaatgttataatatagataaatatccccgaagggatgtaaatttattcaaaagaaaaataaacataaatttgtctaagtacaagttgcaagtacccttctaccgcataaaaaagtctagcaaaagtaaatattaagcgttaggagtggcaggggcagatccatctgcgactttgctggcagcctcgtccacgacttcctcggtgtccgcagcatcggcatcctcgggaaatagatttcctccaccttgagtctgcatgggcgacatggctcgaaaagcctcagccatctcggtcgcttccgcccctaggattgagaagtcaaagtctgaaattttggaaagagttgtatagatataatcagagaccgtctggtcatactgcttctttccatgctccttctcaacctccaagtcgcgagacatctcctcgatcttcatctgagagttcttggcttcaagctcgacttgctccttagacttgcgaagttcttcgagctcttactccttgtcagcagcttcttgttttagcttcttgacgttctcctgaagctgggcattctgcctcttcagcaattcagctttcttagagccagtagcaacggctttcatgaacatggtcatggtttgcgaagccaactccacagaacgcggaataagctctttagaaggagtcctctccaccttggacatgaactcctcgcccacaaacttttcctgcagaaccaggaattcgcgagttcgaacagctggatcgatcatgactttctttcccttgccttgcgtacccttagttggcttcttagaggaatccgcgataggggtggccataacatcgctcttccacttttggggaacaataagagacgttgtcgctcttcgagtctttggcttgcggttgaggaccggtgcggacttcagaaaaatcatctctgcaaggacaagaagagataagtaccaataaaaatatattttaatgcactagtttatacatacgatatgttacctgacgttggccaagaagtttgcttggaaaggcgtttgtctatccgctcttgttgcttctcagacggctccttgtacactggctctctttgaagacttgcgttctctggaatcagcttgtgttcccgcagcttggaggtcgtgcacagtagtcgccagtcacgatcttgcacagggaggcttccgagaacttcagcagtttctctgcgagtcgcgtcaagtgcaggtcgagccggtctatctacgtcaataaaaaagaacgagttagctcaaagtcacaagataatttgaaaattgactaagtaaagaagcacgcgacgtactaggtcgacgattaaagtcagtcctaatccctggaaccttaaacacataaaaccatttggatttc

SEQ ID NO: 334233 - DNA, 666 bp, Cannabis indica
gattcaataagtatatcaactatttcatactttgtaataccaaaagtttcatcaacagatcaagaattcaagaccatatccaaaagaagacttcaaaagctcaaagtcaaaagtcaactagaaagtaaaaagtaaaagtcaactctcgaaaaattttaactttggatcaaaacatgcaaattaagttaggaagctcatctaaatcaatactatacacaatcaaatggtataaatttactttagtcttgttaaagcgatttgcatagtatattagaatttataagtttaaatattaacttgtgcgacaagttatttttcaaaaataacatataatttttataaattagattttaagattattcatcttttaactaagataacacagctggaatttttaaaatcggataaacgagctaagagttatgcacattttaagtaaaaaaaatgatattttgccattgcctcatttttggcctattgtttttcacagaaacggtagactattttaaaaatagcaaaccgtttttcccagtatttctttttgaaaaatgtgctaatggctataaatggctaatttttattcctacactatataaactcatttttcactcaaaaatcaaggttggttgagcttctattcatattattatatcattctaagtgttc

SEQ ID NO: 334234 - DNA, 508 bp, Cannabis indica
tattttaacccagaaacgactcaaacccaagattgctcaagacgtgcttgaatgttcatgaaaatggtggatttcgaaacctgtgctcttagctcgtttggtcatgaccattagcttccttagatcgtagaaaagttattcaaagcgatcaaacaaacccataaattctctaagtgtttcagaattaaatctctctttctctctctaagtttcacatgaaactctatcggtctctctctctgcgcacaacctcctcccttcaatttctttatgcgttctaaacctaaaagtatctcataagtatcctatatatgtattctcaaattctaatcttaatatcctagatcaataacttaaaattttaaaaaagtaataaaatatatatataatagtgtacctataccatattctataataataataaaaaaattaaataatctgatacaatatatttagccatattattattattatacctataatactattcacaaataattaaatatta

SEQ ID NO: 334235 - DNA, 856 bp, Cannabis indica
gatttacatggaccaacctaaagattttgttgttcgtagtcaagaacataaagtatgtaaattaaataaatctttgtatagtctgaaacaggcacctaagcaatggcatgagaaatttgataatcttgtcatcttacatggctttaaagtaaatgaaagtgacaaatacatttactataaatctgaaaataatgtgtgtactattatttgtttatatgtggatggcttgctgatttttggatcaaatattcatgtcgtgaacaatgtgaaatctctgttatgtgaaatttttgacatgaaagatctaggtgaagtggatgtaatccttggtatacatatcactaggtctgaaaagggaatttctttagatcaatctcactacattgagaagatcttaaggaaatataattactttaactgaaaacatgcttgtacaccatatgatcacggtgtaaaattatttaagaacactgatgatggtgtaagacaatctgaatatgcgagcataattggcagtcttcggtatgccactgttatactagacccgacgttgcctatgtcgtgggattattatgcaggtttactagtagacctagtgtagagcattggaatgctatagtagaggggcaagaaataacccaaaaagaacattgactcttggattacattatcaaaagtttccagctgtacttgaggggtacagtgatgctgatgggaacactttatcatatgactccaaggcaaccagtggctatattttttagctatagctggtggtagctgtttcatggaaatctaagaaagagactattttggctcaatctacaatggaatctgaaatgattgcactagctac

SEQ ID NO: 334236 - DNA, 667 bp, Cannabis indica
tcgtttccataatgattgggggcgttttaggaaggcatgtatgatccgttatgcattcctcgatcatccaagcgttactactagtggattcactatagttgactagaaccgatcttggtcaaagttactcgttgcttggaaatcatcactatcggatatcaagaggtggtgactccaccactaagcagaataggaaagttaccgcagcatctggtggttcagggcaaagcaagcggttccgtgggaaccgaggtagaggtggatgccagggttactcttacccaaagtgccctcgttgcaagaaacatcatccgggagagtgcaatcggaaaacatgcaaccaaactagctcaaatctactaaaacatgcataaaatagcctctgaaaacaattacaaacatcaacaacatcacagcaacagattttaacaaattctctttgaaaacaaaagttttgaaccaaaactctaaattagtttcaaaccaacccaacatgcatcaaaacagccttaatatccttaatttaacatacttaaatctctgaaaaaaataacaaaattacagcagcaacaacatcacaatatcaagcatgcaacacactaattccatcaaaattcaacaaatttttaagaagaaaagatgaggagctaacctagcttagattgaa

SEQ ID NO: 334237 - DNA, 889 bp, Cannabis indica
cccgaacccaaacttagaccagggattaaaccacgacctgaactcgaatccaaactcagtctctgaatcacaacaagaattagaattggactaggactctgccaagactaggacctaaacccaaacccgaaccccgataaaaacccagaccgagacccaaacctgaaccaagactaggactcaaacccgaacctagactaggataaaaacccaaaccagaaatgggactgtgacatagaattgggatagggacctaggaaccggaacaaggacagggacctagtacctgacccacgactcgaacttgaacctaggacccagctcgtgacttgtcacccgaaatggaacaaaactgggacctaagatcgtgattcggatctggacccagtgcttggaccgaacccatagccgctgtctgcatctggtgaccaaccatggacctgaacccagactaggacacgaagccagacccagacgtgaacccaatcccagacccgaatctagacccgaactggtaccctatgacccaaaattagagccgaaaatggaagtagaataggacgtgagaatgggaccgaaactaggaaatggacctggaaccgtaaccggacctagaccaaggctcaaaactgtaaccagactaggaaccagactccaactcaaacctaaacacgaacttggacccaaacttggatcccaatccagacctagactcgggacccaaacccgcaaccaaactcctacgcaaacatggaaccagacttgggacacaaaacaggggccgggacctagaactgcaccccagtctcagtcctgaacccaaactcagacctgggacctaagacctgaaccagaaccagaaccagagatcaaggagaaagattccttt

SEQ ID NO: 334238 - DNA, 518 bp, Cannabis indica
ctccctctctcctctgctttctcttctcgctcaacccccggtggcgtcagcagtctcgtcgcctggtattgattgtctccgttggtcttgatgccaagcctacgatcctcgtcgctgagaagctcagtgcggttgggcttgatctgctcaaggactttgctaacgttgattgctcgtataatcttacccctgaggagatcggtgttggcaatgcatggagctgggtggggagtcgagtcagctagggtttctaggatttctcttattaacaatcttcttccgcttcgtaccgcgacgatagacagaggtaatgttgggtgtagctaaggcagtggccgccagggagggcatgagattgctctcgcccgttcgaggagatggagcggaaggtcttctgggtcatcgacttcgtcgtcattttgatcgagatcaagagggttttggcgatttcctaggtcttggtgggtctgatggtgatcgcgatttgaaggattcggggattctagggttatggtgga

SEQ ID NO: 334239 - DNA, 556 bp, Cannabis indica
tttttttttttttagttttttactatttgactcttatatgtgtaaaaataagagatgacccataaaattaaaaaattaagaaaattctcatctcttctcaattttctttttctaaattataatattacataatacattatcagcatggacctctaaccaatgtataatataatatttgttatatgtaatcttgaactgtttcaaaatcatgatataaatatatatatgtatatatacctatgtgactgaaacacattcgaactagtcatttttttatttatttattttgttatgaattaatatttatacaatatatatctatgcttatatatatttatatagatgcctatatattatatatgcgtgttcatttgtttatcatatggtattgtttaattttactttcttattccatattttagtattttattgtctatgtgttatattttgttgtacttttattttctttccaaagcttatgtatatgtctaataatttacactttatattgatatagttttttttatggcaaaccttgcaaaacttgactttgtgg

SEQ ID NO: 334240 - DNA, 601 bp, Cannabis indica
tttaattttttacggtaataattcctaagttataatctggaacttttgtaggtacctgactgttaattgttaagtaaatttccacgtggcaattcttgattggtctaagctattaattttttttttaaaaaaattaatttaaatacaccaataagaaaatgacacgtggataatgacataatattcaacagttagttccaaaaatataacttaggtattattaccgctaaaaattaaacttagtattttttttacaactgggagttaaacttaagtatttatgccgcaaattactatttcttttatactctttttttttaacaaactcttcttttatactgtatttaatcaagttcttcttcttctttttttaataaattaagtaagagcatctccaatagaggtataaatgagtggtaaaaagctaaaatataactcatttaacaaaaagtgtgctccaatagtatgccaaaaagtgatgtaaatttggcacatagcaaatttggtgccaaatttggcacaatatttgctatgatgtaaaatttacaccacaataaatgtactattttttcatttacatttatgtcatttatattatttt

SEQ ID NO: 334241 - DNA, 1149 bp, Cannabis indica
gtgtacacatcagccgtctatattgtcaattaaataatgtaaagcaagctagtttgaaggtttttactgtcgaaatttgagtttagagggttaagtgcaattagagtgatagttgagagggtttagaccgtaaaaaactcctactttttattttttttgttttggcatcttaaagaattttttagtctacttttttcatgatcgtctacgttatagttatttaagacattatgtaaaatattgagagattcgaaaaaatttaacatactgaaaatagagttacaaacagtctgttgcacacaaaattcttttattttatacacgtgtaaaatagactatttgaactctattttcggcatattaaatttttctaaatttcttaaaattttgcaatatgtcctaaataactacaacatagacgacaattaaactaaaaaattcttttaaatttcgaaacagataaaggttacatcgatagaccccttttaagaggtgcactatataatttttttaataattttcttatataaataatttaagaatctttctatataaggttgtacataattttttgtaaaatcgccgcccaatccaaataatctgtccaaaccaaccaagataatctgacaaaaaatacaaaccgaaaaactcaacgaaaatataactcgtctaatttttatatttggcgggttaaaaataatactaaccctcctatatcaaccggtattaacccgagcaaccgactaagaagaattatatatatatattatatatttatatatcatataatatatatgactatttaaaatatataaagttttaactaatatgtttctttaatagtgatttatttaaactttgaatacaatctatatatatttgtcttattattataatttactaaaatataataattgaatataaaaattaaaaaaatatattagttgtaatatcccaaaaatctaactatgtcaataaggcatattttgttaaatatgaaataatatgtatatttaatgcataaatagataaaattataatattactaagctaattatgtaagggtaaatatcattttggaccttgtgttttgcaaaagttactgattggaccatgtgttttgttaaatgataaaatggaccatgtatt

SEQ ID NO: 334242 - DNA, 544 bp, Cannabis indica
gttctaattttgggtcccaggtctaggtctgggtttgggttttgttcttcgtctggtttctggtccttgtttgagtcccagatctagacaccgacaactggtctgttctaagccccgttacccgaatctcgagtcaagatctggatcactgtcatgggtctcggtcaagttctgattcagatcccatgtcgcatttctgagtttgggttcgggatcgagtttggggtgtggctcttggtcccgaccttggttctatgtccctagtcttgttccatgtttgtgtctgagttcaggttcgggtcccgagtccaggtttgggttgggatctgggtccggctcccaattcgggtctaggtcttattttgagtccgggtccttttccggttacggttctggatctaggtcaaatttcagttatgattccaactccaaatcctagttccagtcccggtcaacttcccgttttggttccaattttgggtcacaaggtacgggttcagttccacttttttgtttgggacttggttcaggttcgggtccttgt

SEQ ID NO: 334243 - DNA, 1258 bp, Cannabis indica
ggttatagattttgaccattttacccttaggctttaaattgcttaagtataagctaaaagggtattttattcattttattatggggattaggtggcttcttcttagcgtggaagctggccattttgaattactaagccaagtaaaataattagtgagtattatccttctggaggaaattaagaaaaatcaagaaaatctctcctttttctctttcctttgctcgaccaccacaaagaccaagaggaaacaaacaaacttcaccattgtttctagaattcaacaaggaatccagggtgaatcaagtagaggtaagtcctagcactctaattctttagttgttcaagctcaaatttagttcttgtatgcaagttgatgagtttttggctgttagggttaggtacgtttgtaattgggtttctaagtttaatttgagttagatttgagttctatttgttggtttggtgtggtggacgcacaagttttagtttaaaaactcaagcttgattcatccatggcatattttgattctggatgtatttccaaattctattacttgaattatgttgtttatggtcattataggtgttctggaaggtttcgtaaggtttgggcacattttgagaaaaatttgaagtgtttggggaaacctggtgcaaaccagttaaccagtttgacaggtcctgtaaaatcgattaactacaataggggcaagtttcccgaattattcgattcatcaatttgtgttagtttcagagccttgcttggttgattctgtgttacttagggtattttagtttcagttgtccataagaaaacctttagttggaggtttggatttctcggattaaggttttggcgtgtcgtttacccatttatgtggtgtggttcgttcaggtcggccaactcacttgaattcaaaaatgaagtaagaatagcatagaaaatattgtatatatacgaatgtatgtatgtctaatatttatatgcatccttgttatgattcgtacagtaccaacacttgtacggtagcgatacagagtgcataggtatagtgtgcaatgtttaaagagtacgttacagtgttaccagcacaagcacagaaaggtacaggctgtgtgtggtatagcacttagtggtactcggggtacgaaataaaccttacaaacactcgtacagtactagtacgtcgtgtatgtggaacagtggctgtaccctagtaaagaacgttcttactcatttgttaagccttgtaaatag

SEQ ID NO: 334244 - DNA, 805 bp, Cannabis indica
cttcaccttggcagccatttcgcccatggcttccttagcctcccgaagctcacgcctggccctggcgacggcctcaccctccaccttcagcgcctcccgatgcctcgcctccagctcagcctcccttcgttggacctcctctcggagcttcgcctcagcctaggcttccctccgcttggcctcctcctcgagcttcgccttagcaagagcctcccttcgctcagcctcctcctggatcgcccgcctttcagcggacaggtcccgcaggatcctcacggcctcgtctatgcccttgaactcggacatgactaagccatgattgactatggtcttggaaaggcggctggtctccgcagtaatctgaaaaaggagataagagtgagaataaatgccttcgacaaaatatcgaggaaagaagtaaaccacaagtacttaccgcagccatggcgttgctgatgtcttgaacctggtagacggagttcaaggaggcacaagcagcgtaccttttgggtgggaattgagttaaatgggagacatactcgctggtcatctccgaggcaaaagggcccaaggtgggcccaaggaaacggttgaaccagtccgtcagcaggtccatgttcaggtcccacggattccggaaggcctcctcgttgagagtgttttgctactcctctcgtaagaccctcttcaaggcctccacctcagcatgcccccaggtgtactcgtcaagggcgtagttgtatttggctacccgaaggttctgcctctcctcgtcactagggatcggagtcaacactatgccatg

SEQ ID NO: 334245 - DNA, 1424 bp, Cannabis indica
aataaagatttcttagaatagtctaaggggatcctggtcacaactaaactcaaaatccatacataaacatacagttcgaatccattgatagaagatggacattaataacttgtgaaagtcatactgtattgtccaatgtattctaggaaactgaaaataaaatttctatttgttttaagtcaaagacttaaatttataccaaatttacaatgaattttattctagcttggaccaccactactaatctaactctaagtataatttgcctaaagtaagcatatacaagtagaagagttctaagatcgaggatttatatcatttcaagatagaatgtcgggagtcatttgtgccatttaatttcataagagaaagtagaatgacatcataagtagatgatttataaaccatttatccagtgatatgttatttaaacaaaatcgaaatgaataaactaggaggaaactaataaaggataattttgattaaaataagagtccaacgatgtcccggcaggcaagagtcaaagtcattcttattatataaacttcttcattgtttcatattgtaaataatagtctaaattgttatttacaaatacttattgttatacccgaaattcggctaccatttcaatggaggatacgtgtcaagttaaggggaatatggattgatgcgtgtaacggtaatcacatttaatggaataactcattaaatgcagaagtaacagagtatacttgcaactcgctgacaaggtcttatgcgagataaagatatacaaactgttgcctcatgtattaacaagaaaccatacgacattggatgcctaaggcgagacatcaactttgtcacaactgggatgatgaaagtggtgcatattgattgtgaaaacacttatcgtataatatacaaactaatataatagttgggtggactcaagacctgataagcgagccgcctatctcgctataggaaggtgtgctcctattactttcaccaatcaacttcagacgtcttttagtgaaattatagtcttgacgagttagaagctgacattccaatgatgactgctgaagtactctttttatcattaagagttgtgattgtcaaaatgaagtgttacaccttcaagcaaagaaacaatgaggtgtatatcatcaacctcaaaaagataggggaaaagctccagcttgctgtcaaggtcattggtactgagttcctatcgagatatcccagaatgccatgatttaaaatgtgtttaaatacacgatcgacctagtaaaagcggataaatcacagctgtgtgatattcaaacaataacctcatttatactacgtgctacgtaataaaaccccacgatttcaggggataaacgttgtaaagattacagtcaactctataattaactgcctactatgtgattata

SEQ ID NO: 334246 - DNA, 520 bp, Cannabis indica
aagttcagggggcaaaaatcttaattagccaattgtaaatattcaaacaaagttagaatattcaatagcaattatacgagtattcacttagaataacgagtactcaaagtatagcctactaaatacacaaaaatgaaagcaaaaataaagagaagagaattacagtggttcagtcagagtttggtctgcttagtccactttttgtaataattttcagcttagtttatttgatttggatcacacatttatatggaaagaaagtgtcctttaggattacataattggtcagtctcaactgtttttttttataataaatgataatattaaatcaaaataaacgtttaaagaataaatgctttcagatataagtccttccaatgttccgtcctcttccactcgagaagaggacaatcccactccctcagttgaaccaactgagaaaactactgctaaagtttctgttcagaagatcaccgctcctcgtcgtagtgggagggtttcaacaaaaccagctcgttat

SEQ ID NO: 334247 - DNA, 2203 bp, Cannabis indica
tattctaagacacgtgaggatcatgctgaacacttgacaatagtattatagacattgagagatcatcgattatatgctaagaaagagaagtatgacttctggatgactgaagtcaaattcttgggccacgtaatttctcaagatggtatcactactgatcatgcgaagatagactctattctacagcgggaaagaccaatgaatgtcactcaagtttgaaggttttttgggttagcaggctactatcgcctctttgtagagaatttctctcgaattgatatgcctttgacaaagttgacaaagttgtgaagaaactttcagagaattgaaggaaagattaattttggcacctgctctcactattcttaatagtgaggaaccatatctggtattcattgatgcttcaggtactggactaggaggtgtcctcatgcaaaatggaaaggtggttgcctatgcttctcgacaattaaaagcacatgagaagaattaccctacgcaagacctagaactttctacaataatctttgtcttaaaaatttggagatgttatttatatggcgtaatgtttgagttatactcaaatcataagagcttgaagtatctttttactcaaagggacttgagcttgaggcaaagaagatgggttgagtatatgggtatgatttcaccttgcagtaccaccccgaaaaagctaatgtagtagctgatgcactaagtagaaagcctcatggtactttggcatgtttggctcttgaggactagaaaaggataatcacaatgggtgattataacttgcaatactatgaaggggaagaagtagcttgtatatctaacatagtggctacaccagtgctacttcaacaagctagacaatgtcagtggcaagatgaaaagctaagacttatttggaaccgaatccaggatggtgagcaactagatgggtggacaattaatagtgaaggatacctataccatatgggaagactagttgttgcagatatccctaatcttaaggagtccattttgattgaggcccatagatccaaatttgatgtacatcttggaagtacaaagatgtaccaagatttgaagagacaatattggtgggaaggtatgaaaagagatgtggctagctttgtagctaagtgaatagtttgtcagcaagttaaggctgagcatcagagaccttcaggtttacttcaacctttgcctataccagaatggaaatgggacaagattacaatggactttgttaccggatttccaatgagacctttaaagcatgactttgtttgggtaatttttgatcgtttgactaagtctgctgattttattccaatcagaaaggattataagcttaccaggctagctcgactttatgtagacaaatagtttgactacatggactgcctacaagcattattttttatagagatcctcgatttatatcaaggtcttgaaaggccttgcaacaagccttaggaactgaacttcacttgagtactacccatcatccatagacagatgggcagtctaagaggatcatacagactttggaacacatgcttcgctcttgtgttttggattttggaggtagttggggagaacacttgtcactagtggaattcacatacaacaatagctaccaagccagtataggtatggctccttatgaggccttatatgggagaccatacagatctccattgtgttgggagaaccagatgagcatgtaactattgggtcccaaattatcacttgtatcactaaaaagattaagggaatccaagaaagagttaaggttattcagagtcgtcaaaaagctatgtcgatctccatcgatgggaagttgagtttgataatggtgactatatcttcttgaaagttactcctatgcgtggcgtaacgagatttggagtgaagggtaagctagccccgaggtatattagaccttttgaggttattgagaggattagggaggtcgcttaccgattaaacttactaggacagttgggacatgttcatgatttgttccatgtgtctgtgtagaggaagtatactccagatccgtcatatgttattgagtatgaggctatccctcttcaggatgatgtgacttatgaagaacaacttgtcaaaatcttggtgagaaagcaaaaagtgttaaggaacagagagattccagtaatcaaggtcttat

SEQ ID NO: 334248 - DNA, 1401 bp, Cannabis indica
gtgagtagatctaagatcgtggtaaaataatttccaacatccgcaaccctagatacacaacacctataactgaccttcttgctgtgagcaagaaattggtccctcatttgggcagggacttagccccttttagcaccaaagtttttgaggacattacttgcagcttaacggagctaaccacggataagtgggccattggcagaagttctgaccctgtactcttagcaaatgcttcgaggcagcaggcaaccagggtattttttatttcttagcaccaaatgctattgtaatttcctgatggtttccaattggttttagatggccttcttcgtggaacaaacatgaagggaagtgcaaacaatggtagttcaattagacctttctctagctacccagaaagagtaggagctccaaaggaaggaagttgagtctcacttcaaggaggcagaggagacgaccaataaaaagtatttacaaaagtacaacgaatataatacagcttttgcatctcaaactgaagcaaaatacaaggctcgtcttgaggtcttggaggctaccaatgctacccttaccactgggtgaaataatgccctaaaagccaaaactgaccttgagaattaggctgtgtccagaagccttgagctttgaaacaaaatgggtatcatcaaggggttagaggctcaggttaaatctactcaagcatttcaaaagctcgtagacgaccaagttatagctttcaagggtggtattgcagaaaagaacgagcggatcgagaaaaaatccaacaccatctaagaactgaaataaattaagatctcgtatcagcaagaccttaatgatgctttaaaggagatttcttttctatgtaaagaactcgaggccgagaaggaaaagtgttgtgaggagcaagagtctcatatagcactttaactagttccgtgaaccttgctcatgtcattttgctggcccacctctaagagactatccccaacattagtagccacttgggtgatgatatcgaggacttttctaatagagtcaaaactttcaacaattctatggacgagtaccttcaggattacgatgggggagtagctgctggtgatgatgagggcgagataacggtcaaagaggcagaggacgaagaagatacaaaagatgctcaggtgggcgacacccaaactctagaagttgtggatattccctcagtaaaggatgattctcttccccaggctgtccttgcagcactgcctacagacccaatctgtaacgccctaaataattaggcacgctacccaaaatgcttatgaaaccctaatcccctattcgggattactaattaaaatagtgcagaatttaaacttttatattaaacaaactgaaaataaacttgtaatatat

SEQ ID NO: 334249 - DNA, 542 bp, Cannabis indica
actttatcttctatccctttagcgagacccttgtttttacctcgagtcactgttgctttttcatcaagtgacctaaattttgaaattatgtccaccaagatttgtaaattaaagaccccccatgatcctaatgtcacttttgaggctgagcttattgaatcctaggtaagggccattagagactatgttggtgatgtattaaagacttgcagcatcaagcaagggcgaggatgctgcatcagatctgttgctcctggggaattcagctactttctaccataaatagtaattcgcgaggagtgtggtggcgacaatactagtggctcatctgggataggcgcttgaagcctcgagcacatcaaggctggagcacctccccttgagagagtactacaaagaattcagtaattatcttggaatttccccttttcaattgattccaatttcttacagaattctgccaggcctaaaattcttataccatattttaggctgggagtgtcccactcccctcgagatagtttatttttattccgtcaaag

SEQ ID NO: 334250 - DNA, 1093 bp, Cannabis indica
acacctcgcttatcgggtctcgatcgaaccagactgttatacttagtttgtacgttatgtactaagtgtttccgcagtcgatatgtgtcgctttcgtctttccagatgtaacgtacgtgttgtctggctatatgccttcaatgacatatggtttctcgttaatataataagcaacaatttgtatatcttttcctcgcataaaactttacaattagcgggttgtgaatatactctgctacttacgtaattaatgagttattccactaaaagtgacatcatcgatttgtattctctttatcttgacacgtgtcttccactaagatggtagccaaattttgggtataacaattccccttaaaaagttcttttttagtaaaaagtgctttttaataattatagagggtattttggtcatattccctttttggaaaaatgcgtcttttgattcttgcagttgtacggtttcgagagtcattatgagccgtcttctcatcttctgccccactcccacccgttagatttcccaatcctttgaccttcttgtcactggacttcgtgtataaaatggtggcttaagcttgccatattccacacacttctggttttttggtgagatccattttgatattggatcgttattctctcatcaagatgcctcatctgagttctaaaatttgttcctctagatttataacaccaaaatttgccaactacctctattttctatacgttcccaggaacttcgaatctcaatttgaattggaaacaaaagattccaaggctgaggagcttccgatcaatccaaaccgagggaaccccatttattgttatgggcgatcctcaaaagtgattgttgagagtaagtattagcccttgtaaatggcagtctgaactggactctttttttttgctccactgatcccttgtttcttttacagatttggacatagaacttacgagcgatcctagaggtcctcctcaggctgacaaggaatcaaaggagaaagttggcgtggtttcaggtgaatcaaggaggaatgtttgcgtggtttctatcaaagaatccaaccaacccaagacccaaacctgcacc

SEQ ID NO: 334251 - DNA, 519 bp, Cannabis indica
gtagacgacccacttggaccgacaaatatatttcatttatttataaaagtaacataaatataaataccacatttgtacaatggagattggagagtggaggcatatatttggtatcaacgttatttattttaaatacaaaatcagagtgttaaagttaaaatttttattttaaattttattttgaaaaataaaattcgtttgtaactattttgtttttaatttaaaaacaaaaaacaaagttgtgttttttaaaattcactttcatttttattttttaattttttttaagtcgggtctagggttcggagtcggattcgggttcgggtcagaaggcgggctcagcaccatggtcgtggagaggagatttaggtccggatctggtcgaaatctaaaatattgattaagaaaaaaaactgattaaaaaaatattaaaagtgatttttttttgcttttaaaattttgatttctaattaaaaaatttaaaaataaaaacagatttatggaatatgtttttgaaaa

SEQ ID NO: 334252 - DNA, 1851 bp, Cannabis indica
ctctctctctctctctccctcacgtgacactctctctctttctctctctctcttgtctcacacgccactgtttaacgcttaaatgttacttccactagcggttgttgcaatataaatcaggcagtcgatttcacaagaaggtgactaagaataaaaatgttagtaaaaatataaatacaaaagtttaataaaaaataacaagtaagtaaccaagtaaggttaataaaaagagataaatgcttcaagagtcatccatatgcttatttagctattttgtacctttgattcacaaagttgacacaaatgatgtatcattaaagtttattatattttgagtatacaagttcttaaaaataaaagaaataaattaatctcatgtagagcctagaaatgatattatacatcaagcaataatgttataaaatactaaacataaaaccaaatcgatattatttttactaattaggaacacatagaaagagtatgactaattctatatattattagtaaaaataaagacaaagagatagagatggtggtgatagtgatagaaataaacattaatattacttttattaatttttagacacataggaagagtatgacaaaacctacacatcatttaacaataagtaaataaagatgaacataaaagatagaataaaaatatataaaaaaaatttgactaagtctatatgtatatttagtatctaataacatatatggcagtatagatggatgaagaaaataaaaataaaagtagagaatgaacttacactactcaaataactattacaaaataaagtgaatcaaaagatacaaaataacttcactttgcatatgtaatcatcccttatattctaaaaaagattaggccattatgctaattattctcacaaaaattatagaaagaaatatgagaagaagagtgagagaaaattttgctatagattctttactctctaaaaattacacacttcactattaaaatgagctcctatttatagatccataaacggactaataataaataaaagaaagtttaagattataaaataaatattaatattaaatttgacatttaaaatcaaaaataaaattaatatcatttttgttatcattgttagtttgtcttctaatatttggatgatgattgagtcttgaagaggaaaataaggttgatgatgacctagatttatcatcattatattacatgcattggaaggaaaaaaattgatgatgggcttcatgggctaggcttggcctttttgaattgggttgctttagactttaacaaaaataccttttttcttttcttttcttctcaactttgcttctttcacttctttcaataaaaatacacttcaattcctacaaaaaaaaattataaattgagtcaaaatcaaatattttcattgttatagtgagatttctctcacctagaaactcgagaccagactcttatttaaaggacacgtgtattcagatttccaatgaaagctggaatgtccatgagagacttctcgaagttttagacctcgcccaggataaaaccagcgagatactgcgagtgcgacctaagtcgcaccgcataaccgtaattctcattatgcagggtagatccaactcgcgtgtgtcagaacatgtgcgagtatcccctctatatttacgcgaaaacatagagaccaactttctatgatacaatttggtcccaacgacccaatagccccgacagaccgatataatttcgcatgtccaagttctaccagctcaaacatgcgatgtctacgaggggcgattacctaagggcgcagacgttccaaacgtactggcgaccctgcgagctcaaca

SEQ ID NO: 334253 - DNA, 570 bp, Cannabis indica
agaggcagttttttcaacccattttataaaaaccgaaactaaagtgtgtgaaaatatccgtctgatttaaaattgacatttagatgtggttttttagtaaaacccgtaggtatagaatttaattatatctatgttgttggttaggggttggggtaaaattaaaggttcttttgattaaccctatggcgtcggttattttctattaaccgacatcgtaggtgcagccgttattcgatacgtggcacctatggcgtcagttcatagcaaataaccgacgccataggatcatatataagacccctacagtatcgtctttctcatttcacaacttgctgaacacgaagaatagccagccatagtagccccaaaccaacaaaaaaaccctcaccaaccaccactaaaaaagcctcattctccctcatctcttcaccattttaccccatttttgttttaaaatcttctatattcaatacctaaacctatactgtaaaaaagtttggtttttttaaccgaacctatcattaaaaaaggtggtggcataacttcagccaccaattttagcgaaaaaaa

SEQ ID NO: 334254 - DNA, 593 bp, Cannabis indica
tttttcaagcgtataagaatcttacctttgccttccacgggtatttttgattcatctccaaaagagacattcccttttaccatttgattgagctccacaaccattcttctttcttcgaacatgtgattgctagcgccggtctcaaaataccatttattttcttgagcttcatctttgttaggggtgatcataaaatctagaaaatcaaaaaaatcgttcaaactgacctaccgaacaccattggaattgaaaccgacaaaattgaaaaccgaaaaacagttaacggttaaaactgccattgaacggtcggtttttttttggataataaaaggaccaaaaaaaccaaaaccgatcgttatacatatatatatatattaatttattaagtttttttttttgcatgtattatagttaataatattatataaaaataatatattattttttgtattaatattaaagttataagaataagataattagtttttgaacaattaatttatatgtttgtagttgtaaaatgtagaataatgtagttatacaataaattggatcattttttttttaaaaaaaagttcggtttgggtggttta

SEQ ID NO: 334255 - DNA, 1073 bp, Cannabis indica
ccttcccattattaatagttgtcaccaagctagcgaaacaaaaatatcacaacaccaaaccaaaacatacaattatattagaatgatagacttcaaaataaaacttagtaaacaaactaagatttaacacacaactcatatcactagctagggttgttcatcaaaccgctcaaaccgtctgcaccgcaaaaacaaatgaagtttaaaattctttgcggtcaaggtttgaatttttcttaaaccgcgcggtgcgattgcagttgcaattttaaattgttaatatgcagttcaaaccgcactgcaccgcatattataaaaatagtaatttcattatttatgtccaatatgtgaaggcccagttcaaaacccactaattattgtattgttgaaatttgaatctttttttcatatttattttcaagcctatggtatttttgacaagtgttgctccagctttgttgtatttgtgatagtttaattatttggtaatagtccaaactacaaaaattgcgaaaaccacaccgcactgcaccattttttgcggtgtagtttatgtggttttttagtttcgcagtgcggatgcggtttgagaaattggaaaaactgcatgtgcgggttggtttgagaaaatggtcaaaaactgcaccactcgcacccaaggtggggcctgaattgaaatgggccataggtaaaaaaaaaaaattgagcccttattataaagataaatggtatttttaaaaattattataaaaatatatttttttaaaagtatctttttatttggacccctaaaatgagtgggccctaggcgcgggcctagcccgcctatgcttagggtcggccctgcccgcactgcgaacaaccactagctcaatattactaaaaaactaaaaaaaaaaaaaaccaacaaaaatttctaagtataactagccaaaggtaaaactgctgaaaatcaatatcaaatagattatatttaaaattaaacttatcggtaaattctctataattataggccctccacaaaataacctacaaaataacaaaaagaatttctattaccacacaatataatg

SEQ ID NO: 334256 - DNA, 587 bp, Cannabis indica
acagtggaacgcgatgtttggccagtagagtcacttttcttatagtttagtattttaaaaatagtttggcaatttagataaacattgagaatgtcgagaatattgtagttttagatttgaccgatatgcccttagatggcaaagtaactttttggtgaagcaaggacaaaatagtcttttgcctttagttagcttttgtcttttagtgatttagaggattaatatttgtttaataaatttgattttatttagggctcgtttggtacgccgtataagggtcgtattgtattaaataaaaaataacactatgtttggattaagcaatgtattgtattaattattacaactaaattttttaatacaatgtatgttgtattatttaatacataataaatgtctgtattagcttgtattacaatatttacaaaggatttggggtcaccaatctcggacctggacccggacccacgcccggacccgaaccccaagcccggacccgggcccagactcggactccgaactgggacccggaccctgacctagaccccggacccggacctggaccccggacccagacctggacccca

SEQ ID NO: 334257 - DNA, 689 bp, Cannabis indica
ttgcctttcccacactaaaagtcctaaaaggtcacttaggggtatttttgtcaactctaaaatctcgactattcccgacatttccaatctctaactatactgcccctctatactaaaaataataagatgtgattctaatagccaaataccgcgttctaatattgtcgggcacaaaacatgcaaaattatgaaattgtgtatatgacatataaaatgcattctaaattcaaaggaatcatcgtaaattaataattcaaaatcaataaaaaaatttcataattaaatcctaattatctgttaatttctaaattaaagctaagcggtctttacacggcctggcctgaacccattagtttatcttctattccactcttaagaccaatgtttttatccaacgtcactgttgcttttgaaccaggtgaccttgaatttgaaatcatgtcacctaagccccacaaatgaaagacccctcaggaccccagttttaccttcgaggtagatcgagtccaaggttaggtctattagggcctacattggtggcatcctacagtcttgcgacattaagctgcggaaaaggtgcgttataaggtctgtagcacctggggaattcagttgttttgctcccaaaagaattatacgtaaggagtgtagtggtcccagcacgagtaactcttcgggtgttggagctt

SEQ ID NO: 334258 - DNA, 974 bp, Cannabis indica
tttagggcataaagcccaacaccaccttccactgcctcgggatgaggagacacccaaccgtaactacggagggtttggagcttggagccagacttatctgatgtctggggctatgctccctcttcagaattattttgttaatttcttagtttttgttggcctcgcgccgtatcaattgattccgcaagcatacagcctgctttcaggcttatttatcttgttcgttgcccggagctggggttcgcccagtccggctgagattttatacttttacgaacttgtttctgtccccaagaagggggacaaatttaaggatagtttttatggacttcggtcccatcctttgaatgagggcccggtcccttataactattagaagcatgtgaaggagtagcgtcaccacttcttcttttccttcggcttccaggccatggaccgcccagagcttcttacggagtgggttaggatccctccctatctgtggaccgcacctactcaagtgttcctccagcgggccaatactttctccacttatgacaagaaggccctcaacgttggggacttggtcacggcggagagctatcggaaggccaagctgatatccgagaatcagtcggtggatgactttaacctttccaaggtcatctgtccgaatgtaaggactccagccgccgaaagggcgttccgagtggacataatcacttcggcagaggagcggtaccagaagtacgtcttcaggagggaacaggacttggcttacatcaaggccctggctgcagccgggaggacccttcgtctggaagctggcacggatcggaggccctccaggcctaagcctttggtcccggtacccaacacttgtgctccaaatgccagtacttcaggttctggtaagtctcctttagtaattcaccatgtcccctctgtccgagagtacacccaatgtaggcccataggatttgatgagcgccttt

SEQ ID NO: 334259 - DNA, 649 bp, Cannabis indica
aggttcatattgcttgatttaagctgatttgataagttttgataggttttggctaaggtttgagtttatgaactcaagttgtgcctttaatggtggattgaatttctaaatttgatgttgagttttactgcttgaatatgcttcattatagtggatacaggtattctggaagttttggaaagatttggggttgaattgaattaaagggagtaattttcgggctcccagctcagaaccagaattttggtccctgggggcctgtagcaactggtcgaccagttggtgccaagaaccggacttccggttgagaaccggtctgccgattggggctttttctcgagccctaatttttcccatttttgtgttgtttagggttcgagcatcctatttatcgatagggttatccttagttttaatttttaaatccccgatatgagttttagcgtgttcctcattaaactttgaacgttatggtctagggccctgtaaagcgtcgagctgtgtttccactcaggctgaccgacacacttgagcacggagcgaggtaagatagcataagaatgtatatatgaatatatgcttgttttaactatttacaatactaacactaattgtttatgtgattttaagggtgttagtatagtgtagg

SEQ ID NO: 334260 - DNA, 1608 bp, Cannabis indica
attggctgacattaagggaatcagtccctcaatagttatgcatcgaattttaatggaggagggtgctaaactgactattgatgcacaacgaagacttaatctaccaatgaaagaagttgtcagaaaagaggtggtcaagtggttagatgctggagtggcttaccaaatttcaaatagcaagtgggttagcctagtagaagtagtaccaaagaaaggggggatgacaatcataaagaatgagaagaacgaattaatccctagaagaacggctactggttggaggatttgcattgactacaggaagctcaacaaggcaactaggaaggaccactttcccttgccctttattgatcagatgttagaccggttggctgggcaagagtattactatttcttagatggctattttgggtaccatcaaatagctataacacctgagtatcaagagaagacgatatttacatgtccatatggcacttttgctttcaggagaatgccctttggactatgtaatgctccagcaacatttcagagatgtatgatggcaatcttttcggacttgattgaaacatgtataaagatctttattgatgatttctcggtttttgattcttcattcgatcattgtttggagaatttggagaaagtgctaattagatgcaaggagtcaagcttggtacttaactgggaaaagtgccacttcatggtaacagaggggatagttctggggcataagatctcaaaggtaggcatcgaggtggataaagccaaggtttcaacaatagagaatttaccccctcctgtttttgtaaaaggagtacggagttttctgggccacgctggattctactagagatttattaaggacttctctaagatctcaaaactgctgtcaaatctgcttgttaacggggttccttttgagtttggggaagaatgtttgaaagctttcctagttcttaaggagaaatttatatcagcacctatactcacttcaccaaattgggagttgccattcgagttgatgtgtgatggaagtgactacgcaatcagagcagtcttgggacaacaggttgatagggtgtttcatacctctactatgctagtagaaccctgaatgatgcttagctgaactatgccacaacagagaaagagatgcttgcaattgtgtttgcatgtgataagtttcgaccttatctgattgggaataaggtgatagtttatacagaccactcaacaataaagtaccttatgaccaagaaggatgcaaaaccaaggttgattcggtgggtgctactgcttcaagaattggacattgaggtaaaggacaagagggggactgagaatctaggtgctgatcatctttcaagactcgaaatagtagaaagccagaatgcgaaagaggtgtagataaatgaagagtttctcgatgaacaactctttagtttgagggagagcttgatggtaacttggttttctaattatgtcaacttcttggctgccaatgttactcctccagagatgtgtcatcaacaactctaaaagttcttttcagaggtaaagcattacaattaggaagagccgattctctacaagcactgcgctgat

SEQ ID NO: 334261 - DNA, 790 bp, Cannabis indica
acttttccgtttaaaaagttgtgttgtttgtggtttgtaaacttttccgtttaaaaagttattttattttatgtgttagagtgctttcatccaggggagcattttctgtactcttttgtttttgtttctaacacttgatgtacgtttcctccaaataaaatgttttgccaaccaaagtgccaaaggaggagattgttcattccatttttggcatctctaattgacaaaaatattttatcatttattattaatttttgcagtggtgttaatattagtttccttattttgtgtatctaactttggaaggaaagttgtctagcttttttatttatggaaattaaggtaaaaagggtaagtttgattactcaatttattcctatctaacaaactttgtttttttgatctcgtgtgagtttcccattttgttagatcagatttcttgaggagaaaatcggagctaaacttttatcttctgtaaaaaaagaaagtcgcacttactgctcatgattctgtatttacataaatgaaaattcctgggctaattgaagttttattttaaggaattttctagtgggttgtggtcttgttcaggtcgtgtgtaagttgtcaataaggtgtatattgattataaatacaccttatagcagctaggtttagtatctcttttgtacctttgattttcactcatatctttagaaaagagagtctttgttttgtagagaagagcttgttcgactcttactctctttatttgtaatttgtattgtcttgagtctgtattcaagtctac

SEQ ID NO: 334262 - DNA, 605 bp, Cannabis indica
aaaaatattacaaaaatacaattttatcaccaaaaagtgaggaaactattaaaaacaaagagaaatcaactatacaacaattacatttgtcaataaattataaaacaactaaaaataactagaagattaaactcatgataaatataaataaattataaaacaacaaaaaaaaaatatcgacctgtttattaaagtctgtaattttgttgtgattataaaaatttaaattgtaaaattaaaaaaatttcgtattaactttttttttgtaattttttttaagattgtggtagtttatgtaaaaatttctgtatattttactaataatttataatatttcaaaaatatatatataaaaaaaaaaaaattaacgcgtcatatagtgagacatatgaatgcattattatttttttttttttttggttttgagagttttgatcaattttgaaattgaaagtataattttaggtaaaaaaaacaggtaaaaggagaattttaagtagcgaaaaggcagtatccacaatccaatagataaggagtcctaaattccagacggaaaatggggagagaaaaaaaagaagaagagagagtagagtactcacacagaa

SEQ ID NO: 334263 - DNA, 722 bp, Cannabis indica
ctattgttattcaagtttaaattccgcggcattcttattagtaatcccgtttaggggattagggtttaataagtgacttacgtagcgtgcctaattatttagggcgttacaaataacctgaaattaacttcaaaaaaaaaactcaaacaccatcaataagaacaacaactaaaataaagaaaaccatgaataacatacttaaactctaagaaactcaacgagaacaagcttagaacattaccttgagtttgaaatcacaaagacttgctggaattccttaattaaaatagaagagctcctaaccctagcaaggttctatggaattcgacagagagaaagagagaaatgaagagagagtgtatttgtgttttcttaaatttttaataaaatgataataaaaagaaatcaagtctttatctaattaaatctagcataaaatcagattactaacatcatataatcgcacaaaaggaaaaacaccaattagggcaaaagaccattttggtcaactgtaaaatctcgactaatctcgacattcccaatgtctaactatatttccctgctataataaaagtactaaaatgtgattctaacagccaaacgacgcgttccaatgttgttggggacgaaacatgcaaaaaatattaaatttcatatatggcatataaaatgcattctgaattcaaataaatctccataaaatgataattcataactaatat

SEQ ID NO: 334264 - DNA, 1406 bp, Cannabis indica
gtcccacaatactaacatactaagttggaattttactgagccaaacaccgagttccatgttaccagcaccagaaatgcaaaattatgaaattcattatatgacataaaatgcatttcagaattcaataataacagcataaataattatttaaatatctataaataattttccataattaatcataattaactgctaatttccaaattaaactaagcggtctttacattgttgctcctcccgcagaatcttctttaaggcctccacctcagcgtgcccccgactgtactcgtccagggcatagttgtgcttggcgactcagagattttgcctctcctcatccgcgggaactggtgtcagcacaatgacgtgcgggatagtgtattcctccgcttcggaaggaatcccggaatcgttgctcaccgccaaagtgtccccccgtctggtccgcttgggaggcttagtctcaaccatcttgcccttccgcttgcgctcaagggcagtcgcatcctctacctcgccttcctcaacttccccctcctcgtctatcaagacaatcgtgcctaaaggggcactggaggacctcccgggagtcaccaactgggatggagccggcggcagagaggcgtcggggttgtatgcctcgtcaagagtggctaggagatcttccataggcctagctgctgcaacaaagaaataagctaagtgttagaataatcatgagaaaggcatgcgtccaacaagaaagcaataaaactagtcctaccctgattccctaattcagccctagcgaagtcttggactacaatgctggcttcatcatccccaagaaagctgtctgaggggaggaaccagctggaaattaaatgggctgaatggtccaggggaataggcgccggaggtccagagcccatccgggaccgacccaagaaatgacccaagtgggaaaaataatattccttggcgtgattcccccaccgggtggaaggcattctaaacctataaaggcgctcatcgaaccctataggcctacattgggtatactctcggacaggaggaacatacttaattattaaaggagacttaccagaacctgaagtgctggcgtcgggagcgccagagttgggaactgggaccacaagtcctcccggcagccgcttgggccttgatataagccagctcctgttccctcttaaaaaggtacttctggtactggtcctccgccgaggcgataatgtctacccggagcagccctttccacagccggagtcctcacgtccgggcagatgaccttggaaagattgaagtcatccaccgactgattctcggaaatcagcttggccttccgacagttctccgtcgcaaccaactccccaacgttgagggccttcttgtcatacgtggagaa

SEQ ID NO: 334265 - DNA, 759 bp, Cannabis indica
ttagttagctgctgatggctttaatccatttggcaacatgagcctagcatatagtatgtggcctgtcgtgttagcaaactataatcttccaccttggatgtgcatgaaagacaataatttcatgttggccctactaattcctggaccaaaatcaccaggaaaagacatggatgtttttctaagaccattggtggatgagctgaaagagttgtgggttgatggagttgatacgagagattgtaggacaaacaccgtgttcaagttgcgtgcagcccttttatggactattaatgattttcctgctcgaagtagtttgtctggatggagtggtcaaggatacaaagcttgtccaacatgtaacgaagacacttcttcgatacgagtgattggtaagacatcatatgtaggtcacagaagattcttgcccagtaaccatcgatttagaagggacaccaactttgatggagaaattgaaagaagacatccaccaagacgttttacttgtgaggaaattctcgaacaagtaaacaaacttgtgccacaagttcctggaaaacatgaccaatttggtggtgtaaaacgcagacgagttgcagaagatcaaaattggaggaaaaaaagtatcttttatgagcttgagtattggtggacaaatactttgaaacacaatattgatgtgatgcatgttgagaagaatgtgtgtgacagtctgttgggcacaatcttggacaacgataaatcaaaggacacaactaacgc

SEQ ID NO: 334266 - DNA, 311 bp, Cannabis indica
ttcattggtccacctaatattaacaatttatatattaaaaacaataatttaaaatatttaaaaatcagaaaaaacaaattaaaataattaatattttttttcttcttcttcatcttccttcttcttcttcttcattcctagaaatcaaaccccccacctcacgaaccccaacccaaaaatcgaatcccaaccccaacccaaattttgaaccccaacaccactaccattgcgaccacaaacaccaccacccccaccgcccctcctcacctatcttttgaagcctctgtcgatgcctgttggaaattatttta

SEQ ID NO: 334267 - DNA, 656 bp, Cannabis indica
tattaatattatttattttagattaatataaatatatataaacattaatattatttgttttatgttaattgaacttataccaattttaaatcgatttaaatatatatattaatatgttatttgtaacattattattttttattgttatttttaatattgagagtatgctcaatcttttttcgatcaaattaagaaaaatgaactccattaatcactaagcaaataacacaacaaattacaactctcagccagaaccactcaaaacccccaacccgaacaaccttacatcacaagcctgttaagcaataggtaattacaagtattaagcttcctatttttaagactatacaatctactattatactcaatttttgaaatatcaaaaaagtcaaccttccgactatgaccaagacttataaataccaaatgagttaagacatcattcttgagggccacatggcacctctagggaactcaaaaatattaaccaactatttcgtgttggaactcacacatccaagtgtgcccaaactagggtccatgggcccgcacgagtattttcaccctggagacctcaatccaacgagaaaaccaataaggacttgacttattttagcatgacaatgttgagttttgtgccctaaataaaacccttt

SEQ ID NO: 334268 - DNA, 519 bp, Cannabis indica
acacatccaagtgtgcccaatctagggttcatgagctcgcgtgaactttttcactctggaaacctaaatccgtcaagaaaccaacaaagacttgactcatttgggcatgaaacgacttaaatttatgcataaagtcaacatgacattaaaccctcaaggaacaaggcatatgcgcccattgccatataaatggcagtactcttcaattttggagagcattgccacaagaaaatggcagtgctcttcaattttaaagagcactgccacaagggaatgacagtggttgctacatacaaatcataaagggaaaattgttcaaatgtgttccttcaacaacaaagagtgcaaaacaagtaagagaaaccatttctcaccaaggaccaaccctaaccgaccacagccatctatgtggcacaatgaatggcagtggtcggccatgaagagaggaagtgagattttttgccaacaatacatttttaccaattatatgtcaaaactaagtgaaagaagccaccaagt

SEQ ID NO: 334269 - DNA, 707 bp, Cannabis indica
caatcactgtaaagtgtaaattaacgttaaatggtgtaatatttgcatgcctatcaatccctctattatctcattcattgctccaactcaattggatcatccatagattgacgtgattatgaagataatctgcatcatattccatttaactaaaataatccacaaaacccaaatatgatgatgagaatgataaacatatcccttgcaatagacagacttgaagtcaatctcaataaccatcttcaactttgtttcaggctccatcataccccttttgatggcattatcagcccctatagacagcagaagcatcaacaaaaaatttagttgtggtgttactaaggtagtatataacattaaagcttccatagcacatgcattgctaactctttgttggatcatttcactcttcactcgcctgactccaaccgaaagaggttgccatctgtacccttgaaaaacataatagagtcgcctgttagaaagtataaatttatgaattaatatgttttgcacatgtcttcaggtgaggaagtgcatagtctgaatatgtagtagagtaatagttgtcgtagtctataagaattgtcctattctaatggagttagtgtactagtggtttatagtgtgaagtttgtagttagtgattctattttctaacaataatcgttggttaataactctatataaacagcaagtgcttgtac

SEQ ID NO: 334270 - DNA, 824 bp, Cannabis indica
gtcagatttctatctctggaaaactatgtactgttttatttgattcttgagctacacactcatttattgctttaaagatgatagataagttagaaatacagtatgtaaactctagttataagttcatgatggagttgctctcgggcgaggttataatatcatctagaggagtgcaggatgcgccaataaggattgcagacaaggaacttagtggagatctgatagagctagagatgagggattacgatcttatcttaggtatggattggctatcacgacatggagcaacaatagactgccaaaagaggacagtgactttcacccttgaatttggagaggcattcatatttgaaggaatcaaaggcaagtcaagtttaccggtagttacagccctgaaggcacaaaggatgatacgtgcgggctaccaagcatacttggccagcatagtagaagtcaagagaaacccccctcaagccaaagaatgtccacatagtatgtgaatttcaagaagtctttccgaaagacctaccagggctacccccagatagagagagaatttgtgattgagttagcgccatgtgtggcgtgctgccccatggcacacccacaatagggccattttgtaacatgagcatgccttggtacttgatcattagtcaagtctcgcaccaagcacctcattggggtattttgtaacatgagcatgccttggtgcttgatcattagtcaagtcttgcaccaagcacctcatgggggttgggaaccttttgttgtttagctttcttactttgtatttccttcacatatgtctacagagctaaaat

SEQ ID NO: 334271 - DNA, 596 bp, Cannabis indica
gaaacagagttttatttagggcataaaacccaccagctactccaccaatgagcggtatacagttctttgccactccagggtacaatcagaggcaggccttggctcccgcatcctcacactatgggaacccctcagggataagcagacaaatcccgtctcactccgctcctactgcaagcgtaattggaccttctcaaggctctcagagcaagagatcctctaaaggcagcaaccggacggaggacaagtgccaaaagtgggggtatactccccaatacactcaatacacggagctgacggatacacaacaacatgtgtacttcgccacgcggcagaatacacaccaccggaggccgcctcctctatatagagatagttcccgaaggggtcccaacaaaagatgcgagtaccacaacgacattggagacaacaccaatgaatgaaaaaatcttaaagatgagatcgaaaacttgatccgattgggtcacctctatgagtggatcaagagtcggctgccccatctcaacccagttccggcaggggtacctttgccctaagagatgtcagggggtgcgcccggagcgctgcgatcagct

SEQ ID NO: 334272 - DNA, 705 bp, Cannabis indica
tccttaagagtattccagaatttatgataaaaaagagccggcaatccatcagcccccggcgctttcgtcgggttcatttctttgacagcacgcacaatgtcctcctcctcaaattcggctaacaatagatcattcatctcattggtaactttcggctgtactgctgccaacacaagagaagtactatcatcattaaccggagcagcttgaaagagagtagaaaagtattcctccaccacttgcacaaccaaagtaatgtcactttgccacacccccatattatctaacaaaccctttatttcattctttttcttcctcctaaacgccttatgatgaaaatatttcgtgttggagtccccccattttaaccataaggctctactcctttgtcgccaatattgctcatccttttctaaagccccattcaattatttttccacggttttgacctcagcccatgtacccaactcctgccgagatgacaattcagcaagagtttttttaagcttcccaatcttctcattcagcaacatctttttcttcttattccattctttcaaagttctcccaagttgaagtgttttcctcttaaaacccctagaatggcctccaaaagtaccatcatgccattcattaaggactatgtctttacattcatcatcatcacaccatgcttcctcaaaatgaaatctagttttccttttg

SEQ ID NO: 334273 - DNA, 631 bp, Cannabis indica
aaaccaatcaaaaccccaaaaaattcaaatacaaaaagaaaaaaaaaaaggtaattagcctccatttttgtacaaaaaatacaaaaacaacctacaatcaaaaactcaccgcgttcagaggagaggaatcgaagataaggacatcgggaaatcattaaaactcacccataatcgaataagagaaagaattaaaggtaatacaatttcttcatgaacctcttcctatcttttattctacataattgagaatgtgctataaattgaagaaaacaggaaaaaattgaaatgataaggaaatttggtcaatctgaataaaaaatcaacaacagattgcatcaaaaaaaacattaatgcatataattagatgcaccaaagttttaatatgtaaacaattgtttataagttgttttccagtaaaataattgttgtttgggatctgcaaacaagaaatgttgaatttattcttattaactactgtatgcttcaaaataattgtttaatagttgatttgacaaataaaaatagtcgttcagattgaaatgttatttgcaaatgttgtcactgaaaagagttgtttattagtttttttgttagatttgaaatagttttttgcaacttctgaaactgaaac

SEQ ID NO: 334274 - DNA, 654 bp, Cannabis indica
ttggactcttcagcctatctatcttctagctagtttcgtccctcagacagctatcgtcggggatgatgcagccagtgttaagattcgggactttgctagggccgaattagagagtcagggtagggctagcttgattgctttttgttaagtgtacactatttttacagattctaacacttaacctttttctcttattgcagcagctgctcccacggatgagatcttggccactcttgctggagcccacagtcctgatgtttcccctcctcctacttcttcccagttggtcacccccgggaaggcttcttccagcgcccctccgggccctactgtcttagtggacgaggaggaggtacttcttgaggaagctgaagaaggtgaagaagagcaaggggtacttcttgaggaagctgaagaagagcaagaggttgctcttgtgcgcaagcgtaagggcaagatggtagaagaggagcattctaaacgcccccagagagtggacactacggccccgagtcatgactccgggatcccctctgaggcggaggaatatacggtgcctcatggcattgtgttgactccgatccccggagatgaggagaggcagaatcttcggatagccaaacacaactacgcccttgacgagtacacccgggg

SEQ ID NO: 334275 - DNA, 864 bp, Cannabis indica
ttaatagaaaattatatttatgttaaaaattaatttaattttagatcaacattaattaaaataatttttccaggtttattttattttattttgtaattcaaaaatgtatttttaaatacattagattttaaattatgattagagatacatatttatagaaaattagatttaagttgaaaaattaattttaattaattttggaccaacttaaattaagtaattttcataatatttatggaaaattaatactaaggatggaagataaatttttattttcagatctgtccatgtatatatataattttataaatattaaattgaaatttgtatttagagttatctaaattaataattttaattaaataaatatattaatattaaaattcatatcaaatgaaaatataatcctttaaaataatgagttttactataaggatattcgttctccattattagttctacatagttattgttttaatgagattcatccctaatagatattcattcattagtaatttaacgctatagaatctcgaaagataaatattattgtaagtcttttattcttggtaacgatcactccaatagtgactgctaagagtagggcttacaagtatgaaacaatagtggaagctcataagatagaatgaccttgactctcgcctaaacacgacaacgccaaattcttatcttgattgaataaaaggttgctagaatggtatccattttagaagagttgactactctattcaatgaataatatctttgactctagcctaaacgggacactgtatcagtttgttggataccttagaaattatttaagatatgattgttttgtatttttcacatgtctttcttact

SEQ ID NO: 334276 - DNA, 1020 bp, Cannabis indica
ggcaaggctaaagttgaggaaccgtgaggacgagcaaataaaaattgtacatgtcggggtggttaggcctggatcgtacgatcctcgggacatcagggcttttgttgttagtcgctgggcgacaaatattttgtaaaatgaatagcaaacttttgtaaagtgttttgtaaacgggatcccaaaatattttatatgtaatactataagtttttaattaaataagcaaattttaattaaacacgattttcattaacctcgttgattagcaacgagctgcacagtatgtttaaaatcacgtcaacatgcctatgctaattagggtgttacaccatcacatagattaaacatcctaagaccatagcatagggtgcatccttcatttcttctttctccttcaaattgtttagacattattcctttaacaaaacgaactatatccccttaatggaacaaatgtactctttgcatcttccatgttgatggtcccttccttcttcttctttgtaacttcaataccaagtatcttttgaactggtctaagctccttcatctcaaactcacttgtacggttgcggtacagagtgcattggtaaggtgtataatgtctgaaagtacatcgtggtgttaccaacacttgtacaggaaggtacaaggtgtctgtagtacaacacttaacaatactcaaggtgcggttcataccctacctacactagtacgaaggtatactgagtgcatgtggtacatggtacatggtcgtatcctagttagaacgttcttactcatatgttaagccttgtaaataggtgtatgtgcacctagatacaagtctgtattttatgatatgttatatgcttttcttattgtgtctgtcgactcacagttctgcttccatgtgtaggtaaaggaaaggcaaaagttgaacaggagtgagcctggctaggttgggattgtacatgtcgtggcagcgtgacctggagtgttcagtctcgggacatctgggatattattttgtagtcactg

SEQ ID NO: 334277 - DNA, 1018 bp, Cannabis indica
ggtcattaatggcatgttttgattttatgtaaatttttgggatttactgcttggaatatgttgtgggatgttgtattaggtgttctggaaagtttggtgaggtttgggcacgttttggacaggttttggattgcttggggaaacctggtgcaaacaggttaaccggtttgccaagtcctgtaaaaccgattaaccggttttgggacaggtttcccaagcaatccattttgtcgattcgtgttatttttagagccttggttggttaattccttgtttcttagggtattgtagttttaattatcaatagtagaaccttaagttggaggtttgagtttcccggattagggttttagcacgtcgtttacccatttatgttatgtgattagggcatccatccagcacaaagttttttgttcaagtctattagcttacttgaattcaaaaacgaggtaaaaatagcgtagaacatatgatatatatatgtgaatgtatgtatgatatatatatgcatgctttttatggctagtacactaccaacacttgtacgaaagtggtacagagtgcattggtatagcgtacaatgtttaaagagtacgttacgatgttaccaacacaagtacgggaaagtacagggtgtgtgtgtggtacaacacttagtggtactcagggtacgagataaaccctaccaacactcgcacagtattggtatgtagtgtatgtggtacagtggttgtaccctagtaaagaacgttcttactcatttgttaagccttgtaaacaaatgtatgggtgcctaggtacaagtcaatattatatgatttattttatgcttttctcacggagtctgttgactcacaggttctacttctatgtgtaggtaaaggaaaggcaaaggctgaacaagagtgagctttgagctaggatggtgcttgtacatgtcatggcggcgcgacctggagtgttcggtcttgtgacatctggggttttattttgtagtcattgtgcgaccagactaaat

SEQ ID NO: 334278 - DNA, 815 bp, Cannabis indica
gtagttaataatctactatgtacgtgagcaattatcgtctaccatgctttctattcgcgagcagtttatcagttttacttcgtgtaaacaattataatctgctttatgcaaacttcaagatacttgaaataaataattcatcttgtgaattactttgtacatttttgattgcttttatgaatagttaggccttctatttatatcttaggttaagtattatcttttcaaggcatcttggtggctcattcataatacatccctataaaatgcgagctgttagatattcagcttcgcatgtaacttagtattgcttttacgagttaaatctcatttacaactgctacttttgactttcctttctggtgaaaaaggttcaatttttgactttacattatttatagatgaaaactttaaaaattttttgaaatggagtgggtttgcaatatattatgtatttctagataaattccagttgatcatacacatatatgcccctcaagtaattttaaagaataatactttgtaattacttgaaaaatactacaactttattaataataattgaattttaaaaattacatcaattggagagattacaacatttttgtgagtttactggtagtagggtcgcaaatgcttaacattctagtggttctttattagcgagcaattaagccgagcgaatttgtaaaccctggttcctactattgcctcaattacgtaaggaccttcccagtttggattaaacactcctgcagttgcatctcttgtgtttgcaaatacttgtcttagcaccaagtcactaacgttaaaga

SEQ ID NO: 334279 - DNA, 959 bp, Cannabis indica
ttctcggggtattcttagattatcacaaaagagaaatatcgataaagcactcaaacagtttggcatgcaagattgtagaccaggtgatacccctatcgttaaaggagacaaattttgtcttaaacaatgccctaaaggaaaccttgaaattcaagaaatgcaaaagattccctacgcttcgactgttgggagtctaatgtatgctcaagtttgtacgcgtccggatatagcgtacattgttggagtgttaggcagatacttaagcaatccaggaattgatcactggaaagcagccaaaaaggttatgagatatttgaagagaacaagagagtacatgctcacatataggaggtcagatcactttgagtcattggatattctgactccgactttgcgggatgccaagatagtaggagatctactttgggctacatatatctgttaggtggtggagctatatcatggaggagtgcaaaacaaacactcatagcttcatccaccatggcagcagaatttgttgcgtgttatgaggcatccaaccatggtatatggctgaggaactttgtcactgggctgcgcattgtggatggaattgaaagaccacttaagttgtattgtgacaataagtcagctgtattgtattccaacaacaataggagctcgacgaagtcaaaacacattgacatcaagttccttgttgtaaaagaaagggtacaaagtggacagatttgtatagaacacttaggtacaaactccatgattgcagacccccttactaagggtttgccacccaaggtctttcatgagcacactgctcgtatgggtgttttagattatgaggatatctagattcagtgggagtttgtctttattatccttagtgtgttttatttgtttcatgaaacatgtgtatttggatatttttctgataagaaattatgttattcagtttatttcac

SEQ ID NO: 334280 - DNA, 773 bp, Cannabis indica
tttagtaatattcttgtgtagttattgtaatttattgttgcatatttttagggtatagttaagagttttattctgttattattatttgattttatttcccttttgagggattcttgtccatgttaaatacatgtatttttctgaaatataatattcaaaaattaccctctttgtcgacttagtatcagagccaaaacacaaccctaaaccctaatcctagcctgcctttctgtaatcccattccaccatgtttgaaagtagcgagttagtcaccacaaaaatcaatccctctgagaccactattgttccagccaaatctaccactgctgaatcccactctgtctaaatcaccactatttgcctgaatggtgacgaccttttgcgatggtatcaatcagttaatatgtatatgagaggtcgaggaaagatgtggtatttcaatggtgagaagaaggctccagcagaggtagatccaatttacgacacttgggatgctaaaaattctatggttatgactgttggaatttattttacgaggatcgagcccgaatgtccttctttgtgtgtgatctttcacagtcttccaatctatgattgagttaccacttgctgtgtatgggcacttactctatcactaaggttcgaaatttatgaagaagaaaagagagagagagagatttcggctatagagagaaagggaaggctcagtttttctgaagagagaattttctgtcagaagatgttgtgaaaagcatgtgatttgactgagccat

SEQ ID NO: 334281 - DNA, 491 bp, Cannabis indica
tgaagcacaagaggaggcatttgaactgcttaaacacaagcttactctcgccccagtactcactttacctaatttttctaacacatttgaaattgaatgtgatgcttctggcataggtattggcgttgttcttatgcaggaagggagaccccttgcatactttagtgaaaagctaggtggagctgcacttaattaccccacctatgataaagagttgtatgccctgctgcaagctttagaaacatggcaacactatttgtggcctaaggaatttgtgattcacacagatcatgaatcccttaaacatttgaaggggcaacacaagctcaacaggagacatgcacgatgggttgagtacattgaaacatttccatatgtcattcggtataaacaaggtaaggagaatgtggttgccgatgccctttctcgcaggtatgccttaatctctactcttgatgctaaattacttagttttgaactatattaaggaa

SEQ ID NO: 334282 - DNA, 1158 bp, Cannabis indica
taatcaaatcccataatttaagggaataattgctagaaagattacaatcaacttttgtaatttactgcgcactatgtaattataagtagtggcaggcaagatcaaaaagggggacaaaaaactcatacaagagaggccctaaaaaataatcagaaatcttaataagattgactcgtagactatgcagaattttaactgcaaaaccacgtaaaaaaaacctgtgtggaatcactactgtgaggctcaaatttggttaacaaaaatctgcgttaacagtttggtgctttctttgagagcctctgtgaaaaagctcagaaaagcctcctgacataaaagtaatggatgacgccgaagataataatcctcaagaaggactcagtcatcgccctggaaatgaatcattgagtcctcagggatctattgagtcatcgcatgaacagactgcaagccccgggaaaactcggtattggggtccctggcttgatggaccttgggtaaacaaccatcggtcacttcctaaccaagttgatgaggatggcgcctacgacccaaccaggtacataccaatcgtggaattagaaaatttccatcttaggcatcgattagaggaagcaaaccgacgtaatgctgagttagagcgtgaaatggccgcagtaaggacagcgcaggagaatggtacccaaaattaacctgactttaggagaagagattcacgaggaaaaccttgaagctcgtagactaaggggcaggagacaacccagagatatactcagaactcttaggagatgcaacctgaggaattaaggaaaatctggggacacagcctgggatttgtgaagcatcagactgaaatcgccaactctctctttaggttcatcagaagaaactcgcgcaaacccttatagggagaataaggtgaatcaaaccttaagaggaagagcaaggtccgaccgtagtcacgacaggagtgatttacgagagcatctgaacttgaagaagcctgaccttcgtcaacgactcggtccaaagcaaaatgattcactccatttgcgaatggacgagttggagaataagttcagaaggcatcaagtcataaaacctagaagacaactggtgttggaaattattttaccaggatcttggatctactcacaagta

SEQ ID NO: 334283 - DNA, 1274 bp, Cannabis indica
gtacaaatctgtcaagacttatgtctcacaatgtctcacatgccagaaaatcaagtcagatactttagccccaggtggactccttcaaccgttgccaattcctgtcaagtatgggatgatatatccttagacttcattgaaggtttcccctcttcatacggaaaagatagtattttggtggtagttgaaaggctaagtaagtatgcccactttattggtttgtctcatcctttctctgcaaagattgttgctgaaaagtttgttgaaaatattatcaaacttcatgggatgccgaaaactattattagtgaccgagatccaatttttatcagcaagttttggcaagaattttttactatgtcaggttctaagttgcatctcagttcggcttaccacccacagacagacggacaaacggaagttgtcaatcgatgtgtcgaacagtatttgcgatgttttgttcaccaatggcctcgtaaatggtatagttatttgtcgtgggcagagtattggtacaacaccacattccattgttctactggtatgactccatttcaagctttatatggacgtctcccaccttcacttcctctgtatacagaagggttctcacgagtaaatgaggtagaccaacatcttctttctcgagatgaagtgcttcaacagctcaaaacaaatctctccacagcagctgcacgcatgaaacaaaatgctgatcggcaccggcgcgaagtcgaatttcaggttggtgatttggttttcttgaaattgcatccataccgacagacttctgtgttcaaacgtgcacaccacaaacttgccactcggttttatggtccttatcgggtggagcaaaagctgggcaaggtggcttaccgcctctctcttcctcctgaagcaaaaatccaccctgtttttcatgtttccctcctcaagaaatttattggtacttcactacccactactgttgatgtgccaccagtttcggatgagggacttcttcaaatagaaccagaaaaagtgttggatgctcgttggattaaacaaggagacacatttatcgtggagtgtctagttcaatggaaacgtttacctgttgaggatgctacgtgggagaatttagagcttttgcagactcaattcccaacactaaaccttgaggacaaggttccacctagggagggaagtattgatagaccatctaggaggtctacacgtgtgcctaagcaaaatccaaaatatttgtattaagaataacagctatattagtttat

SEQ ID NO: 334284 - DNA, 587 bp, Cannabis indica
gtggagagttgaatcctactagagatactgattctaatttcagtcgttatcaatcagacaaagatagtcgaaagttgacatctgggtcagtatttactcttagtggatgagttgtagtctaaaaagcattaagtaaaccagtattgcaaattcaatcatggaagctgaatgtatatcagcttgcgaagcaactaaggaagtagtttgattgaagaaattctacacaactctagaagtagttccagaagtagaaaaaccattggtgttctgctatgacaacaatggagtggtggccaactctaaggaaccaatgagccaaaagagaaggaagcacattgagaggaagtaccatctactaagagctatagtagagataggtgatgtgacggtcttaaagatcgcatcggaacataagcttgcaagtccgttcacaaagaccttactagcgaaatcttttatgggtcatataactaatatgagattaagggaaatgcctagtttgcttttagggtaagtgagagattgttagggtttatgccctaaaagcctataaagatatttctaattattaataaagagttgaacat

SEQ ID NO: 334285 - DNA, 512 bp, Cannabis indica
atggcttcgtcttgtttttggggccatggacgaagtcatgaagatccttcaggatttgactgctgaaaggcggatataccaggaggatgctgagcgccgggaggcccttgccaaggccagtgaggaagaggccaggcggagggaggcacaagcggaggcgatgatccgagaggaggcccttcggagggataggctggaggccaagcaccaggaggagctgagggcagagggcgaggctactgccaaggccaagcgtgagcttcgggaggctagggaagccttggatgaaatggctgccaaggtgaagtccctagaggaagttcaccaagcagacttggagtctagggccaacttggccgtggagctaaaggagctcaaggacttcagagacaaagccttgaagaaggctaagaaagatgagctcctttttcccgtctcctgcagccggtgcgtcaagcgtttcgacaatggcgtctacatggcctggtctacaaatggccagaacatcaagc

SEQ ID NO: 334286 - DNA, 1147 bp, Cannabis indica
taagcccttcgtctaagattacggaggcacgccttcaaactcttgaccagggcagatacctgggcgagctggactactacattcccgcccacaataatcgtgccacaaaccctgacaaggggatgtgcgcctggtcgggtgcccatggccagcaaggagcgttgatgcccttgcataaatacttcaaggatgtggcagacttcttcggcctctgcccgacccagttcactcttaagggcatcaagtatctatctgccctcttcgtcctctatgcctcctagaaatggggtatgccctctccccacgaggttgcttggtactttgatttgaactccacccctaagcaaggtaggtcggggtacttctacttctcttaaccaggcttcaagtggttgacgggcacggacgataaggccatcagcaagatagggcattttgctaatgagtacttcatggtggatggcgcgggcattacacgaactcggttccagcagatttcgacatatcaccgtcctcccctcactcttgctcttagggatagagctcaaaaacttgcttggctaccgggggaagaccggaatattatccagttgacctccaaggataactttgtgaggtacgggctttatcccaaggactttactcctaagtccgtgacggggaagaagaggaaatcttgtgctggccggaccgaacgagcttatccagagaatgaactctttcaacttaagcgcgaagctaagttgaagggaggtgcacgggctgagcagtatgctcaggagcccttgactcctgaggatgatgctgaggaagagcaggtgactccactgaagaggaagaagaaactcctggcctcgcccaggcctgttgaacatgcgattcgcataagggagcccatttcacctgttcagccaccccctcccgtgttcggaaaagggaaagctgttatgtctaaaataagatcgatgtcaggtgatgatgaacttttgaatcttgtttgggcagtcaccttgcatattgctttgtcttgtttttgagcttcttgactatcatgccttatgtttctgatggctattttctaaccacgtgattttcgttctgtgcagacattgtctcgacagatgctcaacgctttgaggaagagaat

SEQ ID NO: 334287 - DNA, 839 bp, Cannabis indica
gtcaaaagtttgagtggtcagacgagtgcgaggaggcattcaaaaaactaaaagaacacatggccaagcctcctatcctgtcaaaacccgttctcggagaagacctgtttctatatttggctgtctccgaacacgcggtcagcgctgccctagtccgggaagaagagaaaactcagcatcccgtgtactatgtcagtaagcgcatgataggagccgaaacgaggtaccccatcattgaaaagttggtcttttgcctcctgatggcctcgaggaaattgaggccatacttccaagcacatccgatcaagatactaaccaaccacccgctccggcaagtcctccaaaaacctgaagcatccggaaggctcctcaagtgggcaatggagctaagtcaatttgacttgcactacattccccgaatttctataaaaggccaagccttggcggacttcattactgaatgcaacgaagccgaggcaaccgcgaatatgccggtaccgccaatccccacatggagagtatttgtggacggagcctccaatgaaaatgggtccggagccggagtggcgatgatatcaccaaccggactgcgactccaggcggccctacggttcgacttcgcagcttcgaacaatgaggccgaatatgaagccctaatagcagggctaaaattagcagaagctgtaggagccaaaagagtggaagtctatagtgattcccagctggtcgtaaaccagatatcgggagaataccaaacacgcggcgagcgaatagccgcgtatgtagcaatagtccgggagctgctccactagttcacggactacaaaatagaaagaatc

SEQ ID NO: 334288 - DNA, 787 bp, Cannabis indica
tgtcaatattttttttgtcactgctcgattattcgattattacttgtacccttatagtaatatgtggagaaataattgttagcaaaatattcatgtaactgtaatgcaattgttatgaaacattaaaaatcagaacattgttttcacgtacgtaactctatctacatgtctcttcgtgatttaatatgaacaaattcaccattagaaatttagaaaacaacaaaaatacaccacgataaatattttactataatattgatataatttttttggagtatacttgagttggattgtttgggaactcgagttcaactttttaagatatgcatatcatggatctcaaaattgaagtcagaatattagttttatgcaaattaaactggatttctagttgaattttagtttcgtagtagtttttttgcattttttttttcatgaattcgaaacaatccctattttgattgatttcggtcctcttctcaggtgaagtcgctagaattaatggtggttctctttctagttggatttcgttttggttgttttgggttgctaggtggttgcccaaaagttgcattagacgaagttttcaatcccaggaagcatggatagtgggttgaaggtgtgtgtaagaagtatttgtgtaattttttttttatttgagttgtatatttgtttatttggccggctggaaatatttttgtaatactgttacattttttggttaaaactgaagaaaaaaaaccgtttttttttttgtgacagtcagtagtcccgtgatccgtaacgg

SEQ ID NO: 334289 - DNA, 632 bp, Cannabis indica
ggaaggagtcatttaattccattgcaactaatgtaaggtttctcatactttatatgtgtttaatttttatcgttttagagattcatatttaggatgttaaaaacatacttgttagtaaatctaggtcctagtaatatatattctaatgtgaacgtcttgtgtgcatgcctaggttaggaacttgcatgcgagcccatgtgggggctcacatgtgagctattgcatggtgtgtgtgtgtgtgcggtgtgcgtgtattgcgaaggggggctcgcatgcaagctgggcatgtgtgtgttgtgttgcgggtgcgtgtgttatgagcctcgggggctcacatgggagcccatgtgggggctcacatgcgagccgtggtgttgtgtgcgtgagcatgtttagtgcatgcgtgtgtgcatgttgtgatcttcgggggctcacatgcgagcagtgatgtagagtgcatgcatgtgtgtgtgtgtgttgtgtaagtggggggctcacatgcgagccgtggtatgcacggatgtgagttgtgttacaacgagtgagtagtgttacgtgcagtctatgatggcacgttacaagctaagtgatgcccacaagttggccgagtggtggcgcatgttgtggtgcat

SEQ ID NO: 334290 - DNA, 412 bp, Cannabis indica
acacatttataaattattaaagttttataattttataattatgtttttatattttatttgactaaaaagtcctacatattacaggttttttaggatcatataaaggccaacaatacaatctttcacaatttcaacgaggtagcaaacccactaaagaggtactcaaccaggcacattcttctcttcgaagtgttattgaaaaaactttttgagtatggaagaaaagatagaaaaatattaagagatattcctagttatccataccagaagcaagtaaaaatagtgattgcatcaatgaccttgcataattacattcgaagacatgcaaaacgtgaacgatattatgagaaaattagagacaatccagattattgtgcaaataatcaaattaatattgaagatgaagatgaga

SEQ ID NO: 334291 - DNA, 539 bp, Cannabis indica
aacgctgccgaacaagaggaagaaggagaggtggccggtgaggcgtatgttccacaaccatacgctcgtgaggatgagggacaaccacaaacttatgctgaggagtttatttccctcaacgaccaaggtctcctgtacaatttcgatgaccatgcggcccttaatcagcaagtacatctatgctctgacaacatcgacaacattgtggcccgagcgtatttgtacgagcatgttggtaaaatcactgttcactgcacggactacgatgattcacatgcccggattctcgtttcagaaatgctgcaagaggacgctgaaatcccaatcccaattgaagggtgtagatatgttagggacgtatcacagatgttccttccttggcctaaacacttaattctaacaaccgaggtaacttctcttataaattaattattaatgattagtggagtttgaatatcttcaatattcaaccatagtgaagtaggttctgcaaatatatgtgttttggtgggatggatgaacaaactactgttatatat

SEQ ID NO: 334292 - DNA, 631 bp, Cannabis indica
tttgttgtttgattaatatatattttgttgtttagatcatatggttattatgatgtaagatttatacttttatgatagggctgcttgtatacaattaaaactttatacatattataataatatttattttttaaaaaattaaatattattaataattaaaataatttttattttgaattattatttttttttataaaattaattttaattatttttgtattggtatttgaaagtcctaattactaccagttcgaattgatgattcttagcagattaattctatgttatgaattagaaattaaaaacaatgaacacagaatttacaagcttcctctgcattggaaacgcattccaaccgagtagtgcttgggttcccttgaaccgggtacagtaactttcactaaacaatcaattcaattacaataaccagttctgattcttcaaatcaaacaatgtaatctaaattgacttttatacaaagttacctaatgcttgaacaacctcaagctttgagatctaaacacatttagatctcaaacacaagaaacacacagctgaactaccttcagcaaagaatctgaactcccttcagatcaagcagatttgaacttcatcttcaacctcaggaaga

SEQ ID NO: 334293 - DNA, 1182 bp, Cannabis indica
tcagatctgcaggggtgctcagcacctgtctcaccttctgtttgctgatgatagcatggttttctcccaagttcactctcgagccagtgattcccttaatgttattctcaatctttacaacaaagcaacaggtcaattggttaacagagataaatcctctatccttttctcccctaacacttctgctgattcccagcttcaatttcgtcaatctcttcaacttcatggggagggatttattagtaagtaccttggtgttcctcattgcgttggcagggttactaattccatgttccattatctcctttaaaaagtctcttccagattaaattcctggaatgaaaaattcttctctcgggctggcaaggaaactttaattaaagcggtggtccaagccattccttcttttgcgatgtcttgcttcaaagtgcccaaatcgatttgccagaaaattcaaagcttgatagcgaggttttggtggggatctcagggcactaaaaaagtccactggaaaaattgggatgttatctctgtctcaaagttctttgggggtctgggttttcgtatcttgtcctctaataatcaagcccttctagctaagcaagcttggcgtgtttggaatgacaggaactcccttctccattctattcttaaagctcggtatttcaaacattctgatttcttgaatgcccctgttggccacaattcttcttttacttggagaagtatcctttggggccgccaattgcttaaaaaaggcctggtttggaagattggtactggtaataatgtccccttatctgctcccaattggatacctaatattcaacgtcccattctcttacatcctttggaccagtcccaagcttttgtttctttctttactaatcatgattctacttggaatgtccataaacttcagcatttctttcctacttaccaagtagaaagtatcctcaaaatcccccttgacccaatatcctctgattcactcatttgggggtttcactcctctggcactataactgtcaaatctgcttaccaccttgcctgttcacttgcatctgtggatgttccctcctcttccaaccctaacccttatcttcattggtggaaaaacctctggtctctctctgtccctcccaaaattattaaacatttcatttggagagcttttcacca

SEQ ID NO: 334294 - DNA, 984 bp, Cannabis indica
tcatctcgaaccagaaactgtaattgtcagaattaaagtaaaatcaatatcaacctcgggaagttgtatgacgagcaccggctcgccatcaacgttaactctgaggcatccccatgagataaggcttactgcatatctttaatgtgcgctcatctctgccgaataaaagtgggacattcatagctgtgtgaattctaaataaaaaccgcatttacctagcatgatttgtaactcaaatcccgtgatttgagagaataattttgtaaagattacagttaactttgtaattaactgcttactatattattataaatagtgttaagtaagatgagatgggggacgaaaaaaaaaactcatacaagagaggtcctaaaaaataatcagaaatctgaataagattgactcgtggactatgcagactgcaaaatcacgtaaaaaaaaccctgtgttcacacttttatttttacagctttattttttctctgtgaaatcactactgtgagggtcaaatttggttaacaaaaatctgcgttaacagttggtactttcattgagagcctttgtgaaaaagctcagaaaaatcctcttatcataaaagtaatggatgacgccgaataaaataatcctcatgaaggtgttggaatatattttaccaggatctagatttactaacaagtatgattttaacatcctaaacatgaacttctaaaacgatatgaaataaatacataaaaggtatgagaaaccttacagtggttatagcggatttaaatggctcctttcgctcagatctctaacccttgtatcctttctatagcagagtatcaccaagatctgagccagattctccttctcttgaatttggattcttcacagccttattacacactatgattgagtaccacttgatgtgtgtgggcacttactctaatcactctagggtttggttttgaagagataaagagagagagggtttcgaaaata

SEQ ID NO: 334295 - DNA, 881 bp, Cannabis indica
gtggttggttatgatgcatgatcatatatatatttatataagataattgttgagagatggatcctcccaattcgggttgatcattcctgcagttgcatctctcgtatttgcaaatactcgccttaacaccaagtctccaacattgaattgtcttttcttgactcttttgttgaagtatcttttaactcgttgttgatatactgtgtttttgaattgcgactcacttcatttttcctcaaatagatccaaggacaattttagaagttcctggttttcttcttgattataaaactctcttctgtgagtcgatatgtccacttcaacaagcagcattgcctctgagccaaatgctagcgagaaaggagtgtgtcccattgatgtcttctcggtagttctttgggcccagagtacctgaggtagctcgtcgacccaccttcctttggtagcgtttaacttcttcttgatagtatcctttaaggttttattaacagcttccacttgcccattcgcttgaggcctagatactgacgagaagcttttcataattttgttcctctcgcaaaattcagtgaacaagtcgccatcaaattggtttccattattggatgctatcttcatgggaattccaaacctacagacaatgttcttgacgataaagttgaggactttcttgcaggttattgaaacaaggagctcggcctccgtcatttagtgaagaattcaactgctactaccacgtacttggctcctcctcgcccagtgggtaatgccctaattaagttaattccccatatagcaaaagggtagggtaaggtaatcattcttagttttgttggctgcacacgaggtatatgtgaaaacctctaacacttatcacattt

SEQ ID NO: 334296 - DNA, 949 bp, Cannabis indica
tcactgtcacgggtctcggtctggttatggttcaggtccaggtccaatatctgagtttgggtttaggatcgagactggggtgcagttctatgtcccgacctggttctgtgtcgctagtctagttccatttttgggtctgagttcatgttcgggttcgggtcccgagttcaggtttgggttgggatccgggtccgactcccaattcgggtctaggtgaaattttagttatgattccaagtccaagtcctagttccatgcccggtcaacttccggttttggttccaattttgggtcacaggttaagggttcgggtccagttttgggtttgggactgtgtttaggtctgggtgtgggttcgggtccttatcagtgtttcagtcctgggatgggtcccaaatccagacacttactatgggttttgtccaagccctgggtcaagattcggatcccaatatcgggtcccaatcttgttcaatttctggtgccgggtctcgagctgggtcctaggttcaattttaggtgtgggtcgggtactagctcccggtcctagttctgtttcccaggtccttatcctgattctgggtccacgtcccatttattgtgtgggtttgggtcccgatctagcttcaggttcgagtcctattctcggttcgggtttaggtctttgtttgggtttttatctgggttcaggttttggtttaggtcctgatcctagtgctatgcctagttcggttctagttccatttgcgaatctgagttcgagtatgggttcgagttcgtgtcggagttcgagaactggtctgagtttgggtcgggtctggatttttgttctaggtccaaatcaagcttcgggtgtgggttcgcctccctgggtcttggtctacgttcggtccgacgtcccaagttccaataccgatttgagtttggattgaattctgggtctaagtcc

SEQ ID NO: 334297 - DNA, 1340 bp, Cannabis indica
cttcaattattgtgtagcgaggtactgaacacaatagttttcacgcctcatttttgtcatttggaagttgcccatcgagtaagtaactgataataggagtcacccatgtaggagaactgtctattatcttgacgtcttccatttcacatatgcttggctcgcttagtatctccaccagaactcagttcaattcatccaagttgttctgcaaggccagttttgctaaggcatcggcgttggagttttattctcttggaatctattctattttaaagtaatcgaatctttccaagttcttctgaactttctctaaatactttgccattcttaagcctttggcctggtattccctaaggaccttgttcacaatcagctgcgaatcactatggcagatgaggttttcgactttcaacgcctcgactatctttaagtcgacgatcaaggcttcatactcagcctcgttatttgaaatctcagagcatagtgaaacttaaagccttctcgtgatattaatattacccctgcacccgaaccttgctcgttggatgcaccatccacgtaaattccaggtttctgcatctcattgaatagggggaatttcttctggagttataccttctatcaagaaataggccaaggcatgggccttgatggatgttcgaggatagtacgttatgtcaaatttcccagttcaattgaccattttatcaatcttgcagaagcatttggttttgataaaacttgtctcaagggctgatcggttaacacttttatggggtacgcctagaagtatggtcgtagtttacgagatgcatggattaggcacgaagcgagtttttctagagggggatatttttggattctgcccctagtaaccttttacttacatagtaaataggttgatggtgcttaccctcttctcgcactatggctgcgctaattgcatcttccgagatggccaaatagagaaacatcgtctctccagttattggtttcgccaaaactaggggcgtcgctagatgcctttttatgttttgaaaggcctcttcgcactctttcgtccactcgaactttttgttgcctcgcaatatattgaagaacggtacacacttttcagttaacttcgaaataaatctattaagttcaactattcttcctgtcaaggcctgtacttcctcaagctttgtcagagatggcatgtctattaatgccttaattttttcagaattttctttgatacccctcgcgttaactatgaatcccaaaaattttccagaggaaactccaaaggaacatttttttgggtttagcttcatgttatacttctttaatatcttgaa

SEQ ID NO: 334298 - DNA, 772 bp, Cannabis indica
cacttacaaactacttatcattcaagattaaatggtgcgaaattgctaatcgaacttgggttcttgtaccaccagcagcttatcaaaacttaattggtaacaagtggatattcagaataaagctgagagcagatggaaccattgaaaggttgaaagcaagactcgttgcaaaggggtttcatcaaagaccaggcatagattatggtgacacattcagcccagttattaaagcttccacagtaagaattgttctaaccatagctgtttcaaaaggttgggatataagacaattagacattaacaatccctttttaaatggcactttggaagaagaggtttatatggtccaacctcaaggatttgaggaaaaagggaaagaagattgggtttgcaaattgaacaaatcactctatggacttaaacaagcccctagatcctggtttgataagctcaaaagcacacttacagattggaaattccaaaactcaaaggcagacacctccttgttcttctacaaatccgagacagttgttatacttgttctcatctatgtcgatgacatagttgtgacaggaagcaactctgccttagttactgaattcatctacaaactcaacaagttatttgcattgaaagaccttggacctctgcaatactttctgggaatagaagtgttcagagacttgacaggcttatacctcacacaaactagatacattgaagatatactgaagaaaattaatctgagcaatttgaagccatgtcccacacc

SEQ ID NO: 334299 - DNA, 1115 bp, Cannabis indica
cctcctcgcctagtgggtaatgccccaattaagttgattccccatgtagcaaatgggtagggtgaggtcatcattcttggttccgttggcagcatgcaaggtatatgtgagaacctttgacatttatcacatttcttgacaaactcgtgggtgtccttattgatctttggccaataatatccttgtctaatgatcttttagacaggcgttcccaacccgcatgatccgcgcaaaagccttcataaatctctctaatgatttcattcgcttctgcatggagaacacaccaaagtaggggcatcgagtaccctcttctatatagtttgccttcaattattgtgtaatgaggcactgagtacaattttcgtgcctcatttttttcatttgttagatgtttgtcaagtaagtaactgataataggagtcatccaggtaggagagtcgtctatcatctcgacgtcttccgtttcacgtatacttggctcgctcagcatctctaccgaaactaagttcaattcatccaagtcattctgcgaggccagttttgctaaggagtcggtgttagagttatgttctctcaaaattttgttctattttaaagtaatcgaatctttccaagttcttccaaactttctctaaatacctcgccttttttaagcctttcgcttggtattccccgaggacttggttcacaatcagctatgcatcactacgacagatgaggtttttgactttcaacgccttagctatctttaagccggtgatcaaggctttgtactcagcctcgttgtttgatgcgtcaaattggaacctcagagcatagtgaaacttaaagccttttgccgatattaatattacccttccactcgaaccctgttcattggatgcaccatccacgtataatttccaggtttttgcgtctcgctgaacaggtggaatttcttctgaagttataccttctatcaagaagtcaactaaagcttggcccttgatggatgttcgaggatggtatgttatgtcgaactgcgctagttcaattgaccattttatcaatcttccagaagcatctgattttgataaaacttgtctcaaaggctgatcagctaacacttttat

SEQ ID NO: 334300 - DNA, 744 bp, Cannabis indica
agatgcctcagtttccctccttaaaagaaaatatgggaaatcaaaaataatcaagtgcagccgtcagccgtggtgagagaaaatcggattttgaaatattaattgttagagaatatattagccgaaaagtgaagggacgcccagtcagcctcacatcgagtctcggacagtggcgcttgacacgtgtccccatccaaaggcaaaaggagctcggatgaagtctacacgtaacttcggaagtgccgtacaaacttgggggccaaatgttatccaaatttttacactctgacgtggcatcgcataatggtgacacgtggaatacacttagatatctgctcagagggaatagtccgagcaggatgcctcggtgacatgcccaaagcaaagcaatcaacaatccgtgcagggcaaccaacacttagcgaatttagctttcgcattgtgcgtcatcaacgaaatccctataacttggggatcagcttgcagggatatggcatacacacgatcccacaaatcagtgtattctgcctcaatcccacgatctttgtactcaacattaatcccacgatctttctacttatatctattgtaacgagaggggaaagacttcctctccaagcttgtagccctataaataatgatgcatgttcactgggcaaaaggtcacaaacaatttagtcgagactatacaataaagaaattatctaagaatacatattcagagatactattgtaagagctata

SEQ ID NO: 334301 - DNA, 811 bp, Cannabis indica
gagtagggataaatttaccgttctacccctctatgtatttcatccttaaaacacttagcttcctataaatgatatttcaataaattaatataattactaaaataagagctcttctatttatctctataagccaagctcgaaggaaatcatcatatcacttctatgcaattatagaagttataaatttcatatctatgattagcggtcccactcaattgtattattatgtttccaagatgtatgtattgggaagatccatttggtcaactttaacgaacaagtcaaagaacacaaataatatagttaagctagaacctaacaatctcaagattaacatctattaacctaagatcaactaagtgatattgacttagtaagatataacggtaagctaatgatatcttctccaatatcaatatcagtccaatccgatgtatactctatacatttgatactagcatactttactaatgccctgaaaaagacataccacttatccaagtgtaagtaaaattcatcgttgattatcacgtcagtgtaaatccaatgcactgataaatcataggactaaaactttgatgcacataatcataattaatttccactgtgatgacatcactgcaattgtgaataactatatgttctggatttaacagaaattgtatattaaactataaacataaaaataacatgaaaacctaaatgacttctaatcttttattgatagcaaataatattatattgaaatgggttttctttaaggcataaaatcccaataaactctcacttgtactaacataaaactagaagt

SEQ ID NO: 334302 - DNA, 922 bp, Cannabis indica
taataatcttttttcttatttgcagttgacagtgtactccgttttatgtctgcgagctcatgaggctgagtttttgagcaacgtcactagaggtgaggcgcctctatttgtagatatggaggaattggttattggcagtgatggagggcctactaaggatagtttacgcagccaggcttcgaagcttacacaggcgctaaaacaacgagcggaggaagctggaatattcagagctgatataccaccacactgtccacgatcaaatgcccgttctgttccactgcctgcatcaatgccccattctgcatctatgcttgagtcagcatttatgcccagtacttcacagcctcaggaaccaatatcttctgccatattggcaagattaaagcgtgttgagaaggaacaacttgctttgaagtaagggtagactgatattctaaaagggcagataaagataatgagttacttgaagaccctattgccacttatgggagatccgagaaggcccaatgtaaaggcagagccacagccagaccccgtctctctaggagatgagttcattcttcccaatgactacagacctaatgatgtggaagatgtactccatacacctcagaacatgtcgatcacgtccattggagatacgcaagatgttggaattattttacctataaagtattagaaaccttactgtggttgcaacggaatataatgtctccttccactcagatctctaacccttgtatcctttttgtagcagagtatcaccaagatttgagtctgaatctccttctcttgaaacttgattcttcacatccttacacactatgattgagtactacttgatgtgtgtgggcactcactcttttcactatgtggctttagtttggaagagaggaagagagagagagagagagagaga

SEQ ID NO: 334303 - DNA, 806 bp, Cannabis indica
aatacccctagagtttaataaaatctctgaaattgagaaattataactctaatatttatttctaaatattggggtctacatttaaatttaattcacaaataacaataaaataataaaaattagtgctaattgcctttactaatccataaactagagcggtcattacacttttgcctctttagcttctacaattgattctggttttctctccggcgaagaaggggtcgccggaggcttattggggcttggccggaaccttgaaatctccggaaaatccattaaagatgctttctttgatgattcagagacttttgaaggagacccttttgcctctttagcttcaacacttggaatatcaactaaaattgattctccattgttgtctggttttttgccgtttgatgaagctttttccttcacttccatcaaaaccctattaaagcaaagaagaaaaaaagcttagtttggagtaatgataaaatggaaactgaaatgcccagaaccatattctgatttattcataattaaaaatcaaacctttacagagtaaatctttgggaacaaaacaaagttctgaactttggcgcgaaaaaaatagtattttttttatttaagcgtataacttgggattcgaacttccaacaaagactagctcaagttttcaagcaaaaaaaaatagtatagatatgataaattatacactcaactaataaagcttctttacaagttttaatgatgaagaagaagaaaggtacctttttttgcaaaattatttattaaattttttgttttatcaaataataata

SEQ ID NO: 334304 - DNA, 754 bp, Cannabis indica
tttgaagctggtttggcatcgtgtaccgcagctgagactcttgaggctggtatgatttgttggtcagtttggactcatcgtaatgatttggtttggaactccaagcaccctgatgcgagtgaggtagtgacaatagaaaaattaaattatgttgaatggtttaatgctcaaaagcataatgtcatggatgcaaggttaaactgtctgaatgcactacccgtagagcaatggacaacacctgatttctctttcgtcaaagttaatgtcgatggtgcactattctctatccaagggcggtatggtctaggtttgattgcaaggtctgctgccagaatggtcttggaggatagaattttatctcgagaaggctctttgcaacctcatattgttgaagccattggtatcaaggaagctctttcttggagtaaagcgaatggatggtcacatgttgtagttgagtcggattgtttaagggtcattaatgatttgcaaaagttcaaaagtatggcttctccttatggccatattctttatgattgtatgactctagttgctgattttgatgttgtttcttttaatttttctaagcggtctgctaatagggttgcgcatgccttggcgcgatcttctctttctgaggctgaccgtatctttagtagggagtccttaccttttgtattttcatccttggttttggatgatttagtttaatgaaatttaatcattattcaaaaaaaatgagagaaaattatat

SEQ ID NO: 334305 - DNA, 856 bp, Cannabis indica
aaaaacctttgtgttcatattatttcctttactgttttattttttctgtgcaagtttatcattcaggctcaaatttagttagcgaaaatctacgttaatactattaatgtatgattattgaataatcatatttcaattccaaagtttgatgaaagtctgaactttcccattaatttctttctcattaggatttgaaattccaaatgtcaaaacaatcactgttatcccaaatgttatccacctaacatggcatgtccacgtaagtaaagactgaggacacgtggaatacaaccttgtcaatagcaggacaaagtctttttgcaagacatggtaaaactgtcaagcaacaagcgaaaggagttaagcaagccgtcaagaagctgtacaaccatgtctggccaaccaagggaagtacataggtcggccaggagaagcttgcttggtcgaccaaggtttgagcacaagctggccgaccaaagggtgactgtcaaacacaaaagggcctatttgaccaaggaagcctgaccctttcaaggaaagttgtacaaaggctagcccacagttgccaaagttggcaggcacttgttgtgcaacctacatgctagcaaacacttgttctgcagcatacatcctagccggcacttattgtgcagcctacatcctggcaagcacttgttgtgcagcctacatcctggcaggcactgttgtgcagcctacatgttgggaggcacttgttgtgcagcttacatcctggaaggagtacaagtcctgaattgagcttcaacaacccacgaaaataggggataaagatcagttatttacctatttttgggggttaattaacatataatttagt

SEQ ID NO: 334306 - DNA, 1124 bp, Cannabis indica
tccgggcagcatagaaaataaaaaggcctgaaagtaggcggtaagcttggggaatgagtttgtatggcgcatggccgacaaatacaaggcaattaataaagtagtcttggagagggagcatagccccgaccatcagatgcatctggctccaggctccgaagcccccatagttatggttgggcgtttcctcgtcccgtggcagccgatgataggtcctggaggtcgagggcttaatgcttgccaccaccacgatcttctccagttggtgggcgcaggtcaaagtagaatggagctcagctgtttcccaccctttggcacgggacttgtacccttcctagggcacaggacccttcatgacctcctccaaggtagccaaacgtacttctcccttctttgaagacttggaaccggatgcggaagtggacatcttttggctctgaaaaagaatcaaaaaaatccagcagttaggccccaaaccaaaccctaattcaaaaggggaatgggggtcccttaaccgctggaaagaggccccctccggacacttgccaaataagaaaagcccaaaaaggttttccttagcaaggatcgggtgcaagaatcccacaggtagtgacgttgcgaagaagtaaagagaaaagaaaaaaaaggaaaaaaaaaagggtaaaaccaaaaaggcaaggtttactcgaagccctaaaatggtggttacatggaataagggtggttcctcaacaaaaacgcagtaagaagaagtgatctaagtgcaaaaagggggaatttaatgcatcgtacagaaactcgcacaaaaccattcccaaaagttcaacatccaacccagaaaaaataaataaacagtaaagcatgctatgtgaacaaacagtgaactagtatacgacatatgaagaacttacgtgaaatttgaagactggaggctggtgttgatcgccagtaaaatgtagattgacagcgccgaaggaataagagcaggaaatcaacggtgtttgaagtttcttttctctacggaaaactctgagaaattttggtgaaatgcttaaagtaaccaaatgaagtaagatggatggctttataggccagaacagacgtgggacagctgtaatcaacca

SEQ ID NO: 334307 - DNA, 1007 bp, Cannabis indica
aaaacaaaagtgttaccaaatgctaccttaattaactagaattttcaagtttattttggttttcggcttatgcccaatagctagaaaagtctccacacatctacatatttctaattaattcttttaatgctcaagcctagaaaattatagaaatgttaatatgtaattatgtacagtcggtggtgattttaacgctctccctcaacaacgagtcttcatgctagttgttctctgagtttctaaaatctataagtgttgagtcctttagtgaatatgtctggtatacttgatcttcgctttttacttagtgcatctctaactcctcttgtgaaactttctctctaagaaagtaataatgtacttccacatgctttattcgagcatgaaatattagattttttattaagctaatagcaggctggttattacaatgaagtggcaatgcataatatataaactatttagattctttatcagctatatcaaccatgaactctcttgagcggccattgatgatgctttgtattttacttctgtagttgataaggacactattagttacctttttttacactaagataagactccagatctaagcattaataaaagttgatcatcgtgtatcatgatctgtagccagtgacgaagccaaaaatttggctaagtgagggcttgaataaatattaagtcaaaactaataaaaataactcataaatgtatcttttcaaattttcatcttcaacaaaataaaataaaacattttcataaaaaaataaaataaaaattacaatctgcctcgacgacttttcatgttttgaaatcgctgcatgataacttcattgtcaagactattgaagatgtctttctcaatgtacacaagtaaacaatcattcataaattgatctcccattcgattgcgcaatctacttttcaaaatattcatagaaaaaaatactctctccactgtagcagtaacaacaggtagaatcaatgctaatgtaattagt

SEQ ID NO: 334308 - DNA, 664 bp, Cannabis indica
ggtcttccaatcaaattttcaaatgtctaaaggttgtttaccaactcgtgaaagtcaagttccaacttgttcatgacataatttgaagtataaggtagaaaggcaggagtcaaactgttcaagatcagactcacttgagttttctgatccataacagctccatgattctgagcttcttagaagtagctcgccatttggagaaggtgatcacgcatgttctgatgaggtttcatccgtgcattgatgaaattctttgtcgcttcaaagcgagcttgaattgatgcctgcctgaatagttgagtcaactggttcaagatttctgcagccgtgggagtgttagcaaacctttttttcaaggtgtcaaccatgctagacaacatgaagtatcgagctttgttgttgacattctaccaacgctcgaacttctcctttactgctttggttgcattctcgcccgcctgctaaggagccgctttagttaacacaaatagggcattttcaccaatgagagcaatgttaatgttctctttccatttgggaatgttagatccattcagcttattatcagtcaacggtgacaccatggggttagtcattgtcatgtttgatactacaaataacaataaatagaaaccaagtaaggttcaacacaaaatctcattca

SEQ ID NO: 334309 - DNA, 1023 bp, Cannabis indica
tacgccattgcaaatggtgtctgaccggttgctattttttctgttgtacggtatgaccatagaactttggggagttcttttggccagtttcctttggcatcttcaagtttcttctttagtgtatccttcaaggttttgttgactacttcaacttgaccgtttgcttgatgatgtcccactgctgagaaacttttgatgataccatggttcgcacagaaatcagtgaaagattggctgtcgaactgtttgccattgtctgagactattttgtacggtagtccgaaccgtcatatgatgttcttcactataaagtcttgaactttctttgatgtaatagtcgcaagtggttcggtttcagtccacttagtaaagtagttgactgctaccactgcatactgcactctgcccttacctttaggtaattgccctattaggtcaattccccaaatggcaaagggccacagactttgcatctgtgtcagctcgttgggcggagctcttggtatcttcaaaaatctctggcatttctcgcacttcttaacataggctctcgaatcttcaatcatcgttggccagaagtagccttaccttagaattttctttgataagctctgtccagctacgtgatttccacagaatttgtcgtgaacttcagataggagccgtgcagcttcatcttatgtaacacatcagagtaatggcattgagaatcctcttctgtacatgaccccttctactatgatgtaccatgttgccttttttctcattttccgagcttcatttcggttatctgggagttccccagagttgagataggctgctattgacgtcatccagtttggggatctgtcgatcatttcaatttcttccgtgccattgatgctaggctcttcaaggaactgaatagggaccaagtttgccttgtgacttacattgttgcttgctaatagagccaaggcgtctgcagttgtattttcttctcttggaatttttctaagaccgtagcttttgaattgtgcgagc

SEQ ID NO: 334310 - DNA, 656 bp, Cannabis indica
gaaattataaattacaatctttttaaaaattactaagctcggggatcccatttttataaacctttacaaaagtactattgtaccattttgttacaaaatattgtaaaaaccatgatcctgttcacaagtacgccagacggggaggctaatatgtacattcatcagaaaatctctgactcatggttgatctacttttctttttccttacatgcaccacaaagtaggggtggacatccgatctaatccaactttttttttttcatccgatctaatccaatcagtaattgtatttagaaaatcattattcgatccaatccaattagacctcaaaatccaatctaatctaatccaattactaattggtttggatcggttttttaattggatatccaattacacacctaaatttcaatattaacttaaaaatataaagaaaaatacgtaaaacactaagtatcaccttttatttaagtttaatacttcataaacatactatcgtgacaagtttaatgtagccaaaagttttaaataattaaaacaacaacatttttaagtaataaaatagaacaaaacatcatgaaaataaatatacaaaacaaccgattgttacaaattcaacaccaaaaaaaaatactaataaatatatattatatttt

SEQ ID NO: 334311 - DNA, 645 bp, Cannabis indica
actagcttaggtactaatgagatgccagctaggattaagggtcataaaactaacataaaaagaattcaatttaaatccttcctaagaaaataaaataaaattatacaactccacaggtgtgcaccttcttttccagctccaaccagcttgctttccgtttcaagatgagtcgtagaatacaaggcatcaagaaaaaactggcttccatttccaatgataaaagcttctttttagagcaaggacgtcaagaaactaccctaactgctagaagagtgagagatgctgacttctacgtacgtaaggaagatgttattgggagggacaacgatagatcgttcatcatggataatcttttattggagaattctgatcaagagagtgtctcggtgattgccattgtaggaataggtggtataggtaaaaccactcttgccaaaagtatttataatgatgagcaagtcaaaaaacaatttaagttaaggatttgggtgtgtgtatctgatcaatttgacttcagagcaattattaaaagtattattgatcagcctccaaatggtgaggctatttcaagagacataagaatggaactgttagtaaagaagcttcgagaagtacttggtgaaaagcggtattttcttgtactag

SEQ ID NO: 334312 - DNA, 526 bp, Cannabis indica
attattgagaaatttttcaacattaatcataaaatttacctcaaagccaacaattcaaaatttttaaacaacaccaatccttccgagatatttgaagcgaatccccaaaactaataaaatcatacacaagtataaaaaccagttcaaatagtagaaagtcatgaaatatataatatataaatcaaataacaaaatgaaattgtgctaaggtagtattgtggtgatgtgagcttagagttcaagaattttttttagctgcagccgacatatatcaaaattcaaaatttaaaatcaaaaagatgtgaacggggtttaccttactaatttactctatatctccttcaatcgacctttgccttcgccaatcacacactgccaatgccgtcaacgataagaaatggccacgagggagataaaaagcgtaggcgttttggattttaggggttagggagctccatcgaaggtgagtagaaataatagagggaacacgaaatgggaatgaacactgaaatgggttttggatttt

SEQ ID NO: 334313 - DNA, 526 bp, Cannabis indica
ctagtagatgagagacaccttttatacaattttcgaaccctccttcgttgttctgcaaccaattcgcccttagtgatagagtgtcatgccgacacatagcaagtaaaatactcaaccatagtgcaaaagacggtggtagccaaacctgaaagagagaaagagatacaggctcagatcttgataatactctgcgacataaagaaagaagggttagagatctgagcagaagaagtcatattattccgctgcaatcaatgtaaagttttttaaactcttatgtgtttaatttcatcattttagagatattcatatttaggatgttaatgaaacatacttattagtaaatctagatcctggtaaaatattcccaacaactggcctcagaaccatggtaatgatttactttcatgatatatgaatttcaacgatgaatatgttaaatttgttgatttggatatgttcatgttggtttacgtgtgatttgatgaatgtatgtgatttacaatttttccatgaaaataattta

SEQ ID NO: 334314 - DNA, 739 bp, Cannabis indica
tatatatatacgcttttttaactctacaaactcttttagacttcccataataaatatattgtggcattcataatttcatataatactggaaagttggcaccaaagtttttgtgaggagaaaatgaagtcgaatatatattcttatatagaaaaaataaaaaatttgtatcttaacaaatattatccaacatatccttataccctgaacaaaatagaaagaatagtattaataacattaaaacaaactaatcattaataaaagtaaaaaaattatctgaaaatatggattatatatgtatacatgtattaaaattttaaaaataataagagaatataaagacatgagtgtcataatatggtaaagaatacaaatttcatttctcaaaattgtaaattaacatcaatcctgaaatgaaaaccaaacccacattcaagcaaataaaattcaaagataaagagaaaaagtggagcaacagtgtagaattaggcagaaaatagccttacatgcaattggaacagccagatcgagaagtagagaagtagccttacatgtgatttgcaatgggattgaatgagatggatagatggagagacaaagagagactgatgggtgatcacgttactcaattggactatatataattaacaatgtgtgtatagtcagttttttttttttggatcattattataatgaatattttgtagtttttaaatggtggagagggaaaagaaaggttaa

SEQ ID NO: 334315 - DNA, 1398 bp, Cannabis indica
aaatggaaagagaatattaatattactctcataggtgataatgccctctttgtgttaactgaagaggctcctaagcagccaggtgagaatgcgaccaagacagtcaaagaaaagttcaagcgttggcagaatgctaacaataaagctcgatactttatgctgtctagcatggtcgacacgttgaaaacaaggtttgctaatactctcacgactgcagatatcatgaaccaattgactgaactattcgggatggcatcagatcaagctcggtttgaggcaaccaaaaattttagcaaagcacggatgaaacctcatcagaacgtgcgtgattacctcctctagatggaaagttacttccaggaagctgagaatcatggagctattatagattaggaaactcaatttagtttgatcttaaatagcttgagtccagcttttccgcccttcacctcaaactatttaatgaacaaggttacttttgacttttacgagttaatcaacaaccttcagacatttgagaatttgattggaggtccacagaaaggaggaaacaaagttcgcggttctggcactactaatggtacgaccaaggcagaggaaaacattgcctttacttcaaaacgcaacaaaaagaagaattggaacaatagcaagaagcctcttaaagctcttaacacagctaataagaatacaaaggctgctaattcaatggcgaagcataaaggagagtgcttctattgcaatgaaaagggccactggaaaccttagtgtcctaagtttttggcaaagaaacaaggtatttctatctatgatataaactcatgtattttagagaattattatcctctttggttattaattctggaactactaactatgtttattttcttcttatttcagctccagctgcataaacttggattgctatcccaacaaattgagttggatggtttgacagaagggtggagattgtccaagcaaaggtgaagctcgaaatcttctttaatttttgatttaattgttttagtctatgaataatttagtttcgattattagtttgagattttattcactatttcatattattgcagacaattcattatgatatttttgagattattaataaaattttctctttaataaatttttattatgaattgagccttatgtttactttatcttgagtatgccaatactaatcatatttatatgtttatcatgttttgtatgtgtttgtattttattattgatgaaaaatctatggtatattattctctgcaaagagataataccacataaagacatagaatttaaattcaatgtttatgaataattgttaattattaaacaattattaaggttttatataataaaagatcttttgatctgataggggtg

SEQ ID NO: 334316 - DNA, 1166 bp, Cannabis indica
cctgttccccccggttcttcctatggttacgcctacttggacacctccaccggaggactggatcaaaatcaactgtaatgttaaagttggtggaaactccatgtgcattgcggccctggccagggatcactcaaaagcagttgtgtgggctgctacatcctgtcttaacttcagtgaccctctgattggtgaggcggcggcgcgtcatcttgcgttggacacggcgaggctcaggaggcatgactatgtcttagtggagagtgattcagatgtggttatcaaagcgttgaagggaatgcactacatttggaatgttgataattatgtatctttgtgtaatcaactctctaattattttctttcttgtaacttttcttttatgtcccgtatttgtaattttgctgtccataatgtgactagatgtgctttcgcccagaactttacaggtgttatgaagtcatcctccatacttgtttctatccattgtaatgacgaggtctaattttctttatctattgaacgtcttaatttttttaaaaaaaaaaacacaaaaaataatataaataataaataataatataaaatagtcatttgtctacatattttaaacgactatatttattggtgaacattgaaataaaaccaaaattacgccatgttcacaatgaatggattctttagcgaaattaatttatttttgttccgaatgaaaatactttttgaagaacataatagagatggcgtatattgtgcaattcttttgtaaaaaatatagtatggaccatggtgtgagtggtgataagctttcgtataattttctctaacctttaatgcatatacgtgcagctgcaatgcaatgtgttaaagccattcattcgtacatacaagtaaataatatataactactaagacttgaatggagtactactaattcagacatgattaatgaatgccggcaaaagtagcagcaaaaggatttgatgcccttcaaatattaaagcaatacgttataaatatatagttatttattatttttgagttttttcattttacattttaaaacagttttgttttgtatttttacagaattttacatagaaatttttattacaactaacgctgtaatctaaattgtaacaaaaaatcgtacagaaacccctattgca

SEQ ID NO: 334317 - DNA, 1108 bp, Cannabis indica
tccaacattgctgcttgggtccccaagtcgaggatccacatcttcatccccgccttgggaagttccctacttggaaatgttttttccgttgtctgtgctctggctggaaaatacttccttcttagccttggctactgcaaggttataacattcccgagcagtctgctggtttcttcttagacaccctaccccattctttgttggtaacttcaggcacgagtggaaaatcaatgtgacagcctttaagtcatacaaggtcgtccggcctagcgttacgttaaaagctgaaggaatatctaatactatgaactatgccatgatagtcatgcttgtcggagcttgtccaacagtgaggggtagagaaatttgtcctagacgtgcgactccttgactggagaaaccatagacaggcaggagacatggggttaggtccttgagctggagtcccatcttttcaaaagcagttttgaacaagatattggaagaggctccattatcaatcatggttctggacaccattttattggctatctggacttccacgaccagcgggttgttatgcagaaatctaattttgacagcatcttcatcgttgaaggttatggtaggccctcttgctcgtggaattttgggcttcctttcttctacagcgaggataagttcctcttactcgtgctgcactatttgggcatacctctcccgagctttgcccgaatctgtagcaatatgcgggcctccaacgatgacttgcagatgtccatctaccggtggaggtagtaaatcttggttattgtcatttctctgaccctgatcggtcttgacatacttcagcaggtgtgggttgtttttccttatcagaaattcaatttcccgcttcatgttgttcaatttgttactgtcgtggctgtagtctcagtggaatcgacaaaactttgtcatgtctctcttgctaacatctttcttcatgggcccaggcttcttatatggggccagggactgagttgccatgtaaacactttctatgtcttcagtaaagatggtgaatcgacaaaactttcccttcttcccattcccttgcatgttgttgttgttggaacgtttaccactt

SEQ ID NO: 334318 - DNA, 582 bp, Cannabis indica
tctagattgtattgaacaattaaggcaaattaaagtagagaatttttacgtgattggaaaattaatgaaccttagtccacgagtcatttctatttcttagcattttcttatagatttccccctcttcataaattatttgaggtatttataggctcataatggaggttaaaataccaccattattgtgcttgtatgaaccatgctttgcacaatttcccaaacttgattatagggcatgatggcctattcatcatgatgtgactgggcttgtataggtgtctggtgagactagacttgtctcttaccgatgacgtgatagctcataatgtagccgccaaatgatgtacaaatgatagataaagtatcgtgaaatcaggaaattatgagtttaaacccttaagaacttctttttcagattaaggagtaggatgttcttccccatgccacattgaatccgtgcatagtaatttagcctcgagcggtgcgccatactccgtacatccctttgttggaattattttactaggatcttagatctactcacagtatgttgatttaacaacataaatatgaacttctaaa

SEQ ID NO: 334319 - DNA, 687 bp, Cannabis indica
tgaaacattaaatgaaataaaacggtatagaaaaaaaataaaaacaattattactttccacttttcaagtattgttctaaatcccacatttaatagtaatctataacttatcaaactttttttattctattcattttttttaaaatgcatagtctattcattctaaggatattgtttttttatgtaacgcccgtgcttttataaaaatattaattttgtttacaagcgttaaacgcggaaaatcataatgtcgcatttttatttaatattttaaaatgttcacaactagccagttttcgtacaaaagacataataaataataactaaaataattgtgacataaatttaatagcgtaaataaataaacagagcgccctagaccgctcgcagttatatggtcctcagtgagttcacacacacaagcgtccaaagttccactcgccaccggcattctagactttcagttaccttggtctacacatggtaatttgataagggtgagctactaaactaaaaataaaacacaactaaaacgtacatgcacatatttagacaagtagcaatacataaacttaattttatcgctagtaactaataactagattctaagctaaatcacataataatgattatgcccaagtccgactttggcaaataaacccgagctattggactaaatggcggagg

SEQ ID NO: 334320 - DNA, 1015 bp, Cannabis indica
attaacacatttctccaaagcttatttcttccttgttaatgcagattttcgttaactaaatttgagccacacagtagtaatttcacacagaaaaataaaagctacaaaaattatgaacacagggttttttacgtggttttgcagttaaaattctgcatagtccacgagtcaatcttattcaaatttctgattgtttttttaggaactctcttgtatgagttttttcgtctcttttttttatcttgtttgtcaatatttataattacatagtggacacttaattacaaggttgaccggaatatgttcacaacaatcatccctaaaatcgcgggatttgattacatatcacgtagtgtaaatgtagtttaagatttgaaaaatcatatagctatgatttttccgcttttactgggtcaaaataatcgtgtattaaacacgtctttagctgttgtatctggagacatctcgacacaaactttgtttcagtgatctcaatagcgagctgggaccattcttccttcagaggtcgacgatgtatgtctggtatcatcgcggttcctatcctcaaagaattctttgaggctcatttgaatgttatcttttggcttgccaagattgtaatcctcgctgacgctattgggatgaagttatatgaagtcttcccataacgagacggtcacctggctttcttgttcttgagccgatttgacttttgcacttagtttgttcattctacactaaggacattcacgattgatacgtgtcagtttctttggtgcctcactattcgcatttagcgacatatagtttctcgctaatatactaagtgctagtttgttcattgattcctcgcctaagaccttacagttagcgggttacaaatgtattctgatacttacgtaattaatgagttattccataagaagcaattgcatcgattcacattctctttatcttgacttgtgtcctccagccaaatttcaggtataacaattgccccttaaaaggttctttt

SEQ ID NO: 334321 - DNA, 1516 bp, Cannabis indica
ttataatgaaatgggttttatttagggcataaaacctatcaaactcccacttgcactaatataaaactaaaagtgtatttcaattaatctgaacaccttgatatccagatcaagtatagtacgtagtattgtcttattaataggatctgacaagttgtattcaatacaaacttttcctccaccattacatccccttaatcacaaaatctttgatattgtgaaatttcttcctatatatctactcctcttgggatactgctttctttactttttggaaactatatctgtgctagtcaggaagtaacactagtagttaagtcattattggtacaacaccaaaaattgtatagaactttccataggctaaataagtatccttcctgcaactttaacattcagtctcactagtagagttggagactacatataggtttttacacttctccaaaaatcactgctccacctcggagtaatcaccatttcataagtagactttctagcaataacgcaagactagaaaactgatttggtgcagtctaagagtattaaaataccacttttatcgactaacatacagttcccctttcgatcttaaaatttgattaattatcttctaatgttcctttcctgaattaaaaggtacctactcataaacctcactcagcaacaggtgtctggtctgatgcatacatgagacctctcgcggttgattcttaaggaattatttttaatgacttttatcttttctggaatagtagaaactgttccttaaataaataaactctatgtctaggagtcaaaagacttcctttataattagccattcgaaaaatgctctagcatcttactaaagtaagttgcttgcactagagtaagtaaattaccaagtataccacaagccacatgtttagataatctcaaacctataatacgaggatctggaagttttattaaatccattgaatagacttattataaaaatttctcttcttgtccttgtaatagaaaccttttagttacttcatatgaatggtttttaaccatagttctcttggctttgcttcttagtttcttattctgagtatccattacttgtttaaactaacagtggatttttatcataggtgtctttcaagtcataacaaggcgagttccttgaaacttttccactacaacaaggtaccgtgactatctgtctacgaacattaatgatattaacctcatcggttgtgtcaagacaacagaggcagtggaagcatcttatatacaataagatgatagaatacgtttggaattgaaaatatctcctctactttgcaactttgtttacagatttagtcatattcctataaatgtagtatttgttgaaacaaacactttcttatcttaatgaccatagaatggtctcgaagcccactctcggcagtggcatgtggggcgcgtgcggcagttctagtcgtcatttttcaacgattcttttttccagcattattagaatttaattttttatttttct

SEQ ID NO: 334322 - DNA, 729 bp, Cannabis indica
ttcttaagtcaatacaaatcaagaggagtaggctattgccgaactgctcaggaacgaacctctataaaaactgtgtctttatttatttcattatattacatctatattatatcacttgttgcttacaattacgactcattgtcgttggccaaaagcgaggtcaacaacatacattcatcaaataacacataaaccaacatgaatacattcaaataaacaaaatgaacatattcatcattttaaaaccatatttcatgaaagtaaatcataacctggctctgagaccagttattagaatattttaccaagatctagatttagttacaagtatgttgaattaatatcataaatatgaatatctctaaaaaaatgaaattaaacacataagagtttaagaaaaccttacattaattgcagcggaatataattactccttctgtcagatatctaacccttgttccttcatgtcccagggtattatcaagatcaaagctttgatatctttctctctttcgggtttggctaccaccatacgtcttactatctataattgagtacttgactttctatgtgtgggcatggcactctatcactatagtccgaaataggaagaacaatgaagaaggatgaaatcactatggaaggaactctctcatatactagttgtctgacatagaaaactaggtttgatttggttgaaggcattaagtggatgagtgagagcatcat

SEQ ID NO: 334323 - DNA, 1642 bp, Cannabis indica
gctatcaaggtcattggaaccgaattcttgtcgaggcctcccagaacgttatgatttaagacgtgtttaaacacacgatcgttttgacccagtaaaagaggataaatcacaactgtgtgatattcaaataattaccgcatttatactacgtgatatgtaatcaaactccacgatttcaggagataaacgttgtaaagatcacggtcaactctgtaattaactgcctactatgggattataaatagtggcaagttagatcaaaaaagggacaaaaaaatcatagagaaaaggccctgaaaagctatcaaaagtctaataagattaactcgtagaatatgcagaattttaactgcaaaactacgtaaaaaatcctttgtgttcatactttttcctttactgttttttttttgtgtgtgagattatcactattaggcttaaattttggttaacaaaaatctgcgttaacagtttggtgctttcattgagagccttcgtgaaaaaagctcagtaaaaaccctcctttcttttgaagaaaaaccatctccttcatggctaaaaacctagaaaaggttaatacaccacacaaggaaactcatcaccgttatgggaaagagcccatgagctccagaaggtcttccaacccacagtccagacagaccatccgctccaggaggactcaacctgagggtggtcccagcattcagaccacacgttcccggaggacccaacctgacgttggtcccagtacgcggacaacacgctcgaggaaaactcagcgtgggaatggccagaatcctggaatgagggatgagaagcccaatcgtggaagtactcagcccataggagagggcacttatgaagcagaaaaccgccgccttagatgtcgtctagaggaggcacaggggggaacgctgaactagagcgtgatgcagccgtagctagggcgacacaggggactaacactcaaaatcaacctgaacttggagtgagaagaccatgaggcaggccccatggctcacgaaccaggagacaggaaaatatccaggaagaacaacctaaggaaaatgagattccccctgaaaatcagaatgatcagctagaaccctctcatagaaatgggaacaggaggcaaccagaaactgatgaacaagaaattcctcatgaaaatgaagaagatcttgggactcaatcaggagaacgtaggtcacctgcgagaaatcactagcgttcttcctgaacccatagagagagggctcgtacaaaccctaataggggaaatacgacaaaccacacttagggggaaagaacatagcgtgaagaagtaagtgtgacctcagggcgttcaaggacccacagtcgatcaactcaaagaggagaaagtactcgacgagctaatgatcgataaagcatggggaccagtaaatctgcgagtcactcgaggacgaagtccatgaacaagacgaggtccgcaagtaggacgctatctgtgagtaaaacaaggtctgccggtaattattcccaattggatctgcgagagcacttgaatcagaaaaaacctgatcgttgccaacaactcggtccaaagaaagaggatcttatccaattacgaatagacgagctagagggtaagttcaggagatat

SEQ ID NO: 334324 - DNA, 677 bp, Cannabis indica
gtaatataactttcaacctattacagagaagctcggtaacaattttataaaggacattacaacaagctataggcctaaagtcacttacaacattcgggcatttggtctttggaactagattgagcaccgttgaattcagctctttgaggaggtgacccgtttgcaatatttctttgacagctagatacacatcttcttccactaattcccaattttcttgtaagaaagagctactatatccatcaggaccaggggctttgttttttgggatgttgaatacaatctgcttgatttccgcctttgtgcaatctgaattaaggatgtctttatgagtcttagtaattacagctccttgtttcaacacttttttgttaactggtagtcttccttgcattttcgttccaagaagtccttggtaatacttcaagaaggcttccgtaatagcagctgggtcctcaatccgttgtccatctccatcttctattgacagaatcttgttttgccttcttctttctcttaggcaactatggaagaatgctgagttttgatctccctcttttatccaagaaactttggatttctgttgtaagaaggaaatatatgctttatgagtcatagcataatgttctcttgcctctttctctcttgctgaaatacaacatttagtgggtcggtct

SEQ ID NO: 334325 - DNA, 602 bp, Cannabis indica
caagaaccaccacccagccgctaaaaagagaaataatctcctcaacaataggcttaaacataagaatattattcggacaattaatccaagcacccgtctccacccgcaccaaagtgaaccccagcctgttagcccaaggaagactcgctcggagagccataagctcggccaccaccacttggaagtcccccacggcgcccaaagcccaagccgcccacaccaccccctcaccaccacgaatcacaccgccaaatcccacaaaccccctccccggagtgaccgccgcatccaccgacaacacaaactccccttgcgccggcggacaccaatgaagccgcctctccacaccacacccgacccccctcaaagtcccacccatagaagaggctcccaacaaaccgccaacccccaaacccaccccctgaaaatcctccaaagcttcctgagctaattcatcaagcacatccaaacgagattgctttttcccaaacaacactgagttcctatcaaaccataaccaccaccaaaccatcgacaacaaagcaaaagttttcagatcaagtacctcaaatagaaacaccagcaattccgctaaaaaccca

SEQ ID NO: 334326 - DNA, 185 bp, Cannabis indica
tatagccgtcagattagcatatcagggcaacagtgaggtgtacatagagttgcaccgagatgccaacagatatatgctaggctatcagttagtatggattatctgctaccacatcggtacgactagagtgctatgtttatgtgtaggtaagggcaaggccaaagctgaggaaccgtgaggacgag

SEQ ID NO: 334327 - DNA, 778 bp, Cannabis indica
agagaaagaccgacgtacacatagacttgagaaagaccggctacatgtagagagcctttgtctctgcacaaacctcattctcctcatcatcagaaaatcccatttcctgaagccaagatctctttcccagcctcaagaaactccttgatacgagaaagaggttggcgcaaaggtcttttggcacaagtttgggttttgggttggctggattctttgatagaaaccacgccaactttcctttggaattctttatcagcctgaggaggacctttaagatcgctcacaagatctatgccctcaaggatcacttgtgaggatcgcccatggtgtgctacggggttcccctggtttgaattggttggaagctcctcagccttggaatccatcgttttcggctccaattgaggcttaaagtccttaggaacgaatggaaaattgttggtgcatcctggtattatgaatttgggagggtaaacttctaaactcagaagagacattctagtagaaaagagatgatccattctgaaaatgaatctcactaaaaagtcagaggtttgtgaaaaaagacaagcttgagccgcccttttatacacaaagtccagtgacaagaaagctaaagattgggaaatctaacagttgggagtcgggcaaaatatgaagagacgatacataatgaccctcaaaactgtacaaccgcaagaatcaaaggacgcattttttctaagaagggaccttgatgaaaatgacctctgtaattattaaaaagctcttttttttt

SEQ ID NO: 334328 - DNA, 651 bp, Cannabis indica
atatgggtgccaggctattgcacgggcttgcctgattaagcgatacaatacaaaatcatcagattaaagcatcgacttgcctgattaggcaacatgatgtataatggttttgtattaccaaatttttgtatactaatgtttattcgtggcagatgccagtagtgatttgaatttcatcttatgaacaaagtgtgatggtttgattcttattgtgtataaatgataatatttgaataaaaaactatatgattgttattattacttttcttactgagtccttgtgactcgtgagtgctatgtgtgcaggtaaaggtaaagaaaagctagaacaaccatgaggtgacagtcttctccaacaatgtacatattgacctcactggcctgcgtgccgagttgccaggagttgttttggacttgttgtatctactgtgtattttgattttatgtttaaatggttgtcgtatatatttctttagcaaaactttttataacagggattcccggaacacacttttatgctgttataatgtccgtttttagtgttttattttagtcaagtttttaatattatcacagtttttaataattaattattctattagtattaaactagtttataaaatcactcacgtggcgtccctatagattagg

SEQ ID NO: 334329 - DNA, 568 bp, Cannabis indica
gtcaatcttattcagatttctaactgttttcgcttttgctttagggactcacccgtatctgttaccccccccccccccttttgatcttgtctgccactctttataattacatagtgggcagtaaattacagaagttgattgtaatcgttacagcaattattccctcaaatcataggatttgatcacaaatcatgctaagtaaatgaggtttttaattataatttacacagctataagtatcccgcttttattggcccaagatgaatgcatatttaaggatatatggtaagcgtcatctcgtgcggatgcctcgctagaaattcagccagattaactttgatgacgagcagttgctagtcatcagacttcccaagattaatattgttttcattctgacaactatattttctagtgtcgagataatcttcctcgaatgcatgccatcttacagtgagagagatacctcgctatctgtcatcttgattcaacatactctttatactaattagtttgtataccatgtaatatatgctaagtgtttttatcgttatcgtttctctttcacgca

SEQ ID NO: 334330 - DNA, 1226 bp, Cannabis indica
ttcaaacaccatctcaaaaagttaaattcaaacttccatctcaaaaaaattaaaattaaacatgagatcacacactctaaattcaatcaaagcttcccaacaaccatagcattaactagaattcccaactagtaagaaaaacttagcttaaacacctcaaattcaacctatctcacatacatgcattcaaaaacacaaacaataacaacacatgcttttcaacttcaaataacagaaatgaaactctgaaaaagcaaacttagaggcttaccaaaaattcccaagctcctaacaccaagaatcacatataaattcacctccaacttaaagcagaattcttaaaataaagaaaatttcaaagagatgagaaagggagaaaatggggggtcagctaagggatgaaaaaaccaaaaaattagttttctattttacaaaaattccttttgttgaaaataaagtcaaatggtccaatgaccaaaatgcccctagggccaatacaccacatatgcatacaacaagggcaaaattatcattacatcacacaccaaacgtaaataaattttagatgattaaattatttataaaattccaaaataaaatcccgaaaatgtatttcgggccccgaaccctgttcggcccaaaataccccattatgactataccgtgccgacatgtcagaaaacacctacagaaggacagaacaaatatataccatataataatatagtccataagcacgctgtaacattaaaattatagttttacccttcttgggataaaattaccaaaatgcccctagctcaccacggggtcttaacatgttatgtatcagtataattcatatatattaaattatataataatataattccacattaatataaatttaactagttagggtttgctaatctgactccttaatcttagggtattgcaattattccctttatagaaattttgccacaaaatttacctgaacaactttggatatttctgttgcatatccgtcttgagttcccaggttgctttttctactatgatgttcttccacaacacattgataaatgcaattgtcttgtttctcaagactttttctctcctatcaagtacttgcaccagttgttcctcgtatgaaagatctggctaaagttccaatgattcataactcagaatatgggatgggtctgggacatacttctgaagcatcgaaacaaggaacacatcat

SEQ ID NO: 334331 - DNA, 892 bp, Cannabis indica
tgcctagcggggaattggttatctccaataggcgtattaggtctatgccagttagaatcgaagatagggagttgagtgctgaccttatagagctggaattaacagagtttgacatcatacttgggatggattttctgtccaagtattcagccagcattgattgtaagtagaaaatggtaacttttcagccagagggtgaggatccattcgtttatgttggatcagttcaggggttttggatcccaactatttcagtgttaagggctagagatttactacagagtggatgtgtaggatttttagcagttgtgattgactccagcagaccagaaacatttgggcctaaagtagtcagggttgttagagacgttctcgacgtatttcccaaggagttgccaggattaccgccgtaacgagaaatagattttgtgatcgatttggcacctagacttgaccctatttcaaaggcaccttataggatggctacagcgaaactcaaggagcttaaaatatagcttcaggggatgcttgatttagggtttatccgacccagtgtatcgccctgggagcaccggttttgtttgtgaaaaagaaagatggttccctcagaatgtgtattgactatcgagaactgaacaagctgacgattaaaaacaagtatcagttgcccagaattgatgatttgttcgatcagcgggagagactgtgttttcaaaaattgacctgcgattcgattaacatcagctcaaaattcgggaagaagatatatcgaagactgcattttgaaccagatatgggcactatgagcttttggtaaagtcattcagattaattaatgctccatcggcctttatggatctcatgaatagagtattctgttgggttttatgcc

SEQ ID NO: 334332 - DNA, 840 bp, Cannabis indica
aaaagttagaaaattggaaattcaaaggctctctttctttctctccttttcggttttgagcagctgggtttgggggggatttctcttggatttcaagctgattttagcatagattttgacctcaagttgttggtaagatccttgtagctctcccttttggtttcttgatgaattttgatgaaatgttgatgtttgcatgcttagtttaagttgatgttgttgctgtgattttgtagttgtttgcagaggtttaagcatgactaattgatgttattaagctgcttgtgatgcttgattgttaggttgttagagttgtggagtttttagtgtaaaagcttaggttttcaaagagaaaattggaattttagtggctgtagttgttgcatgagttagggtttgatttctgcagtttttaaatgcttgaatatgtgattttaatcaaggtttaatgcatgatatgttgtttagtcaagttttgagttttagaactcaatctttgacctttaatggtgaaatgagtttctgtgtgtgaagctcggttttgttgctttagaaatgttctaggggttatttagaacaggtctggaaggtcttatgtgatttggattggatttgaatgagttatgaatttttgaattgttcctgcgaggaaccggaattccggttgtgcatccggaattccggatgagggttcagaaattcccagaaccggaattccggttgcagaaccggtctaccggttggggaattttcaggaaccctagatttcctcgtttttatgttatttggggtattgccatgctttttatcgatagggaaacttttagttcctagtttaag

SEQ ID NO: 334333 - DNA, 561 bp, Cannabis indica
aattgactttttttttttcattaaattttttatgtcatttttaaattttattttattttattcttattctcattcttattttatgttttcattacttctactcaaacgtcactctatttttttttttttttgtggtaaaagccttttatattttttcttttttgtaaatttgaagtgtcaactcgatattaccgttaaatactaattggattattattatattagcttctaaattttactttcacgtatacacaggtgtaaaaagtagtcatccaattgatatttaacgatgatatttaatttacgtctcaaatttgtaaagaaaaataaatttaaagggattaagtcacaaaaaaaaataaaaaagttaagtgtataaaaataaaacataaaacaggttaattactcttattattattaataagaggttaataccattttagattctaatgttttgtaaaaattacttatggaatcttttattttactaaatggtaaaatgaactttatattttgtaaaataatacaaataaaatcttaagcttaatttttaataatttt

SEQ ID NO: 334334 - DNA, 749 bp, Cannabis indica
cacgtgtcttcctctgatgtgctcgccgagttttgagtataatagtaggcacgctagggtagccacttgacatctagaagctaaatctatataatgtaagcttgtagattcaacttatctaagttgcacagcaacaatgaccaattaatgaataaataacaatgtttatattctattattcatgtttaaaacacttgctcacagactaacttattaaagttactctcttagttccacatgcgtactatggtaccctcacaagacagaacctaggcaaagtctgtgaaactttgtgaatagaaagtgattaagagacttgtctatacatggtcacttggggggcacccatattgtacaacgcaacgaactagcacaaagaacttatgtagataaattttaacgcttaatataagctactaaacctacctctaagtcttgtaggcatacttcgactaggcaaagtaaattcggacccttacttgtcaaggacataagaagatacccaagattaaagaccgcttggttggtcacacaatccatgataaaaaagcaacagggccaaacaacagtagtgttaaaaaactgagggcttatggccaaagatagaaacatgaaggccctaaggctgaaaataaagtagtgttctaaaaggccgcaggccgcatagaacataaaagtaagtactgctctaaacaggctatgcagaacatgaaaatattgtctatgttattgttgacttcgcttttagc

SEQ ID NO: 334335 - DNA, 754 bp, Cannabis indica
cgggcataaaacccaacatcccctcctttgcaatgtcttcttttaaactccctaaatccacctgtgcttccattcaaagtttgacttttaaattttggtggggctctacttttgataagaagaaaattcactggagaaattggtctgcccattctgtctctaaattctttggaggcttgggatttcgttccctaacttctcataaccaagctcttctggctaagcaggcttgacggatctggtctactcctgattccttgcttcattctcttcttaaagctcgttactttaagcatactgatttccttcatgccccaaatggcaacaatccttcctttacctggagaagcctcctttggggttcccaactcctcaaaaaagggcttatctggaaaatctgttcaggctgtgatatccctatttctgctcctaattggatcccctaaatctcccatccaaccattcttcacccccattgaacattctctctctacagtttctgtttttgttaaccctgacaggacctggaatactgaaaaactgcagcattttcttcctacctatcaagccaaagctgttctcaatattcctttggatcttggacccactgattctctcatttggggttttcatcactccggcactctcacagtcaattctgcttatcaccttgcccagtccactgccctcactacttctccctcctcttccgatcctaacccttttaaggattggtggaaaaccctctggactt

SEQ ID NO: 334336 - DNA, 680 bp, Cannabis indica
aactaagcaaaaagatagatttttacctattttcaagcttcaaatttcactaatatcttaaattaatttttaaaaaaagtaattaatttaattatgataattagatttgaaatataaaaaataaaatcaaaatacaaaactacacaaaaaactcataattaattctatgaaaaaacatgaaaaattgaaaaaattgaaaaaaaaaatggatttggtgcggataatgcataccatccgcgcgcgcacaaggaggatctgcccgagaaaactcagcgctggaggctgtacgcagcctttccgcgcgcgaaatggggggatcagacaaccccgtgcgtgttccttcggacatgcagtgtccgaacacgcacctgaccgagtgaaactcggtgtccgtgcgcgtgagatgtgcaccctatttcagattttttttttcaaattttcaaaaaatcataactaatttaaataaaatcaaaattgggttctgtaaaaaaataaatttcttaattttttccatactatccaataaaaataattccagaataaaaatctaattatgtttcataaaaatttcgcaaacatcaatcaatcatcaataaacacatagatcaacatgaatcacatccaaatcacacatacatcattttaaatccatattacttgaaagtaaatcaattacaatg

SEQ ID NO: 334337 - DNA, 582 bp, Cannabis indica
aactcttggttatgtgttttgaagtttttctttagttgagcatgtgatttttgagaataggggctgttaaggtttaaagcttgtgtaatctgatatctaagttagtttttgagttgttgtaagctctggttattagttttgaaaggtggaaatggaattgggtaagcttgagctttgaaactcaagtttaggtcattaatggcaagttggaatttattggtttgttctgcgaatttctggttgatttaggttgtaaatgcactgtacaggtatactgaagagtttggtagagtttggttggattttgagttaagggggttggtttttgggttcccagcacagaaccggtcgaccggttctggggaacttgtaccaaccggtcgaccggttggtgtcccagttttgaacttccggatgggacccgtctgccggttgggggaatttttggaaccctagtttttcccaattttgagatatttagggtattgccatgttgtttatcgataggaaaacttttagttttaagtttaaatccccagaaagtgatttagcgagtcactcatctgtgttacaattaatgtg

SEQ ID NO: 334338 - DNA, 1020 bp, Cannabis indica
gacatgtctgtacagagcagaaacacaacatggtcagaaaacaagcatcagaaacataaggcatgaaagtcaagaagctcacaaacaagacaaagtaatatgcaaggttactgcctaaacaagatttgagagaacatcatcacatgacctcgatcttacttcagacataacatctttcccttttccaaacacgggaggggatggccgaacaggtgaaatgggctcccttatgcgaatcgcatgttcaacaggcctgaacgagaccggtgtttcttcttcctcttcactagagtcacctactcttcctcagcttcatcttcaggattcaaaggctcctaagcatactgcttggcccttgcacctctcttcaacctagctttgcgcttaagttgaatgagttcattctcttgatgagctcgttcggtctggccagcaccacaattcctcttcttccctgtcacggacttaggcataaagtcctcgagatagagcccgcacctcacaaaggtatcctcggaggtcaactggataatattttggtcttcccccggaggccgggcatgtttttgagctctatccttaagagcaagagtgaggggagggcagtgatatgtcggaatctactggaaccgagtacgggtaatgcccgcgtccttaacaatgaagtactaatcaacaaaatgccctatcttccttatggccttgtcgttcgtgctttgtcacccacttgaagcctggttgtgagaaatagaagtaccccgacctgccttgcttcggggtggacttcaaatcaaagaaccaggcaacttcgtgaggagaaggagtaccccactcctaggaagcgtagaggacgaagagggcagataaatacttaatgcccttaggagtgaagtgggccgggcagagatcgaagaagtcagccacatccttaaattatttatgcaagggcatcaacgctccttgctgaccatgagcaccgaacaaggcgcacatccccttgtcagggtttgtgacacgatt

SEQ ID NO: 334339 - DNA, 746 bp, Cannabis indica
acagagccgcgttcttggaagcatcagatttagcctggaagtatgtgtaagccaacttcagaccggcctgcacagaggaaaaactttaacatttgagccaagtaaagaggattaaaggaaagtgtcaagaaagacttacccttgtgaattccttcaagactccacgtatcagcagctccagagaagagtcattgtcagcaccggccagttgctcactaaccttaggaaccaaccagttcatatagtgggcaagcatgtccttgccgtttttggcctttggaagcaccggcaaaggtggagtaggggcccgcatctgctcgggttcactcttgatcagctcagacccacctttcagttgttcgggtctgtctgaacttcctcctcgcgactccttggatttagcaacttttggagtagaggggtttccaaccgttagctcttcagaaagatcaatgacctccccggcaggcatcttctccttagaagaggacccctcatcgcctctagacttcttggctggaggagatgcgctagagcttccaccaattctcttcttcagagcgtcaagcatcttctgagacatatctgcgcggaataaaaacaacatggttagaaaaacagacatcaaaaacataaaatataatagtcaagaagcttaaaggcaagacagagtaatatgcaagatgattgcccgagcaagactcgaaactccatcatcacctgacatgcctcttatttcagacata

SEQ ID NO: 334340 - DNA, 981 bp, Cannabis indica
gcacaaaacccaacaaatacttcctctccaagctcatagccctataaatagtgacacatgctcactgggcaaaaggtcgagagattttaccctagagatattatctatgaattcatattcagagatattattgtaagagctctgagaagaggaatctttctccttgttcttaagtcaatacaaataacaaggattaggctattatcgaacggctcggggctgaacctctataaaattcttgtgtctttacattgctttactatatatcaattgctataaattacttagcacttactaaataagactcactgccgttggctaaaagcaaggtcaacaaatctcaataccttgatgtccagatcaagtgtagtatgtagtattatctttgtaattggatctgacaggttgtattcaatacacccgttttcaccattacatctccttcgtcacaaaatcattgatattgtgaaaatcctttctatatatttactcctcttagggtattagattatttacagtttggtaattatacatgtgttatcagaaataacactagtagttaatccgtgactggaataacgctaaaaaattgtataatagtttccataggttgaataattatctagtagccttctgggctacttaaaaattcagtctcactggtagagttagagactttagatagctttttacacttctccaaaaatcactgctccaccgctagagtaatcaccatctcataagtagatttttttggcattaatgcaagtctagaaacataattttgggtagtctaagagtattaaaataccacccttatcgactaacatatagttcctctttcgatcttaagatttttctaattgtcttccaatgttcctttcttcgattaaactaatacttactcataactcccactcaatagtaggtgtttggtcagcatacgtgagacctctcactattgatgcttaaggaattctt

SEQ ID NO: 334341 - DNA, 854 bp, Cannabis indica
ttctccgtctcttcaattttctcgttctcgattttcctctcgcccaacttctaaccagcccagggctttcccaggccactgacaaccctaacggaggccacttccattttttattcttttgatatatatatatatatatactaggagaaagttacgtgcaaggcacgtatacttagttttagttttatgttaggtactatataatttaattagaaattatacaaaaaataatcatatatatattttaatttattaatatggtctaaatgactcttttaatataaagtaattaatttatcataaaactcatattactacccgatctataaatgagcactactattaaattggtttttcggtttataactatcttttatattatttcttatcggttcctcaaattgttggataaaaatgcagaactttaaatgacgatttataactattgagaaaagtcactttaaataacggtttacaactattggaaaaagtcactttaagtgactgtttataactattgggaaagacttccatcgaatagtaacagacagaaaaagttactttaaatgacggtttataactgtaaaaaaaaagtcactctatttatattgcattaataatatatcattcatattcatgacaaaaccttcttacttcttagcatttgaaccaaattggtattcatccattaacaaaactgactataaaatgttaaactaagttggcttatgagtacatcatacctaaagaataaaaatcataatctatcaatacaacatgtattggtattggatatatttttaccagtatgtattaagcaatttttgccaagttcaagcttaaacatatcatca

SEQ ID NO: 334342 - DNA, 809 bp, Cannabis indica
cttgaagaattgtgcttaaattggtattcttaaaattaattgggcataggaatatgttaattaattagagaatcaaaccataaatactttggaaaacggattacattttagattcctagttgacatcatcaatttgcaacaatactcatttgcaccattatatcaactttgtatttttttaggtcaatttaataattctagcttgttttcttcatagtttgtgtttgttaattttttacatattctcatcactttatgttatttttgttgaaaccaatttgtgagtaattagttttataaattaatttccaattttcaatccctgtggagacgatactcgatttatcactttattacttgttacgattgcgtacacttgcgtatacaatttttcacaacagtggtactcttatggtggtttgtccaaataattcataacctatcttcgtttcaatgtttatttaaatgattatcctaaattgatctatccattccgagtgcttacttttatctttccaactccatgagtgaaatccttagccataaataaatattttcaaaaaaaacatgtgaggataatagagttgagactttcacttggtaaatttttcgaaagcatctatgtgttgtggtttacggtaagaaatgttcaagttttgtacacatactcacaactctagatttattcaaggtaattcggtatagttcttattggcttattactaacattttgcttgaatatttttgtcattttttttaaaaaaaaaattaacctgaaaatatcatgttgacattctttttgttcgctt

SEQ ID NO: 334343 - DNA, 681 bp, Cannabis indica
acccctaaataacattattcgcaaaactggtgagtggacatgctaaataactttctggggatttaaaatgtaaactaaaaatttccctatcgatggataacatgtcaataccctaaatatcataaaaattgaaaaaactaggattccctaaatgccccaactggtagatcggttcccctatcagaattctagttctatggggtttcttggggaccaatcggtcagcaggttcctacaggtcccccttaactggtcgaccggttcagtgcagataacaccaaaaacaacccaaacaactcaattcaaccccaaacttcacaagaacctccaaaacacctatttatacaaaaatagacaaaatccatgtaataaaacaggaataaatccataggagcaaaatctaccatgtgagagaaaagcttgagctctaagttcaaacttggctcaaacacaacaacaaccccccaaatagaacaaaactagctcaaaccataattaatagcctctaaaaacctaacataacaaacttaacatcacaaactcaaagaaagtcatgcaaaacatagcttgaaacttaaggaatcaataagggaagggctaaggagtgataccttggattagaatcactaaaagctttgtagaaagtccttgaattgtattgaagaatttgttgggttttat

SEQ ID NO: 334344 - DNA, 541 bp, Cannabis indica
gtagatgaaccaggtcctattcttggacgggcaccatccctaatcagcgtttgtgactcaaaaacactacgccatataaagctcggattgccacctaactcggcctccaagaatgaacatttaggaaagtatcgagccttatatatctgacccataagagaatttgggtacagaagtaaccgccaaccttgcttacccaacaaagaaagattatactcccgcaaactctgaaaacccatcccaccagatttcttatgtttgcaaagtttccgccaactaaaccagctgacacctttcctactactcgaaggccaccaatacttagccataaggctttccaactgtgaaaaagttttcagaggcaataagaacacagacatagcaaaacttggcaatgcttgcgctacagtttttattagaatctcacgcccagcaatagacaagaaatgaccctcccagctttgaaggtgcttctgcattttgtctttcaaaaaccccaagatggcatccttatttcgtcccatgacacaagggaggccaa

SEQ ID NO: 334345 - DNA, 509 bp, Cannabis indica
acataagagatcaagattggtggggttacaacgcttctatacactctagttggtattggaagaagttggttaacctcaagaactgcctcagttctgtcactgatgttgttgagtttcagagatgcaagtataccatagctactaggtataaaatgttcagcaacccacaaacaaagaaaacttggtgtaaagaggtatgggctcgattgaatattccaaaacatagtgttattttctggcttactatgcttaacagatcaaaaacaaaagatagactggggaagatgggcattaaggttctcgaaacctactgcctttgtgatgaatacaaggagaatgctcagcacttgttctttgagtgcaagacaaccagctcttggcttgttgaaattaaaagctggctgggttggaaagcaagaacaacaaacactcagcagctggttagatggattgagaaggcaaagatgtcaaaatttaaaaacaagttttttgtgcagcagttgctgcac

SEQ ID NO: 334346 - DNA, 502 bp, Cannabis indica
cacatgaatgcgggtgtttacttgtccttgcattcatggtttatattcatagctaacttcttcggtgtatgtccttaccataaacccaaatggctataggattctagccaccttcttcatattttaccgccttaggaactagcctatcccaactcctcatgagataaactttctctgtgacttgaaatggagtccaacccatagagatcaaggcttttaccacttccatcaatttagtccattcatagaacacataaccaagagtaattgtagcctttactatcaagagtatttttatactcctgttcctccgtcaagacacattactttccaaaaagttgaccctttcaaaagacttgctcctcttattaacatgaagaggagagccgatgccatgttgtttgagattaaggcatgggagagagattgtcgaaccctctttagcactaaaaatcttcagaaggttgggttgatcatgtcatgccagagagtgtatgctgat

SEQ ID NO: 334347 - DNA, 651 bp, Cannabis indica
ttactcatccaaactaaatgaaaatactaattagttcgattggatattggatgtattagatttttagatgccccatccaccatccgatacgatccaattggatatttaaaaataacatccaatccgatccgatcacaattggatatccaatgtttggcgatcggttgtaattagatcagtcggttctcattggattggatcgatttatgcacacccctacttgcaacccttagaaaaaaccaaaaaatcttatatatctctctccctttctcactggtctctctcgattttctgagtggagccactctcgttcgtcgaaggcctaaacggaggccatagctgacctccacgagccacaaaatcccaagaactcgtgttccccgatccctctctcgctctcagacactttctctctgtcgcgtcaagctcggccttaaccccgtgtgtgcccctggggttttttggatctgaggacgatgattcgtggtcctgtcgaggcgtgggtgatcggagcacggtggtcccgtcgttccagtggctgccacacaaatgtagagagagaagatgggtgtcgagtgaggaagaaagagaaagaaaattagggtttctaattagggttttatcattttcaatttataccctcaaactaaa

SEQ ID NO: 334348 - DNA, 559 bp, Cannabis indica
tatttatgattttttgtgttttttttttctctatatggttgattgatgaaactagattcaattattttcagtgtataccatttttgttttgttttcataatcattattattgttgtgtaaagaaactagttccttgatgaagaaaccactttcttggtcaagaaatcactttcttggtgatttttctagtgattttgctagtgacaatgccaattctgacgacttttttgacgggcaataactccagcaatttttttgacaccgataactactccggcgactttgtcggcaccgacatcaaactccataatagtcgtcgaaattggcattgtcactggtaaaattatcagaaaaattaccaagaaaccggattcttcatcaagaaaccagtttcttggtatttttcctacgatttttccagtgacaatgctaattctgacgaacttttcgacgccgacagcaacactggcgacttttccggcaccagcagctactccgacgaattttccggtgccgacagcaaactccggtgacttttccggcacgagtaacaactccg

SEQ ID NO: 334349 - DNA, 2183 bp, Cannabis indica
gatctacgtccggtttcggttccgaattttgggtcatagggtcgggttaggttccaagtttgggtcagagactaggttcggtcctggtctaggttcgggtcagggtcctggtctaggttcaggtctggggctgggtctcaaatccagacaccgagtgcgcgttcggtccaagcctcgggttcaaattcagatcctgatcttgggtcccgttcttgttccattttgggtgccgagtcacgagctggtacctaggttcacgtccgagtcttgtatcgggtcttgggtcccggtcctagtttcgttgccgatgtcccttatcatattctgggtccagctccaagttctggtcttggattgggtcccagtctaggtttcggtttgggtcctcgttgcggttcaagtttgggtctctgtctgggttttcatttgggtttgggttcaggtttgggtccttgtcgtggtcgttgtcctattcttcgtccggttccagttccaattgcgatttcgagttcgagtttgggttcgatgttaggtcggggttggagtcttggttcgagtttgggttcgggtctgaatctcgatctaggtccggatcaagctctgggtgtgggttagggggctgggtctgggtccaggtttgggtccgagtcccaggtttttatcaagatttgagttcgggtttagtttcgggtctaagtcctgattctgatcccggtctgtgttcgagtttgggtcttggtgcaagactaggtttgggtcttattctgggtctgggtcttagtttgggtcccgcgttttggtctgggttctggtttggtcttggtatgggttcgtgtctaggttcttgtcctggtctgggtcctgtgcaagtttcgggtacggggttgggtccgacttcagatttcgggtctaggttaggtcctggttatggttcgagtcccggatttagatctaggtctgggttctagggcctaggtccctggtctaggtcccccatcaaggtcgggttcgtaggtcctagtctgggcctaggttcgggttcggttattgagtcttggttttagtccaaatcccagtctgggttccggtccatgtctcggtcctagtctttgttcaggttcaggtcagggtctggatcctagtctgggtcgcgggtctaaggtctcagtgcgggtttaggaccatgtcaggtcaaggtcacggttcgggtgctagtctaggttcgtatcccaagtctcaagtcccagtcgtagtcaaggtctcggccaaggttctggtatgagtttgggttatggtttgggttcggttttggtctcaagtatgggtcctagtcacagttccagttctaagttccgggtttttttttattctgggtccgggtctgggtccaggttgcggttggggtccgagtcttagtctgagtctgggtatgggtttttcgaatcctgatctgggtccaggttcgggtcttgggtctgtgtcccaggttcgggtctgggtcctaggtttgggtctggatctgcggctaggacagggtcaaggtcccgtgtttcgatcccggtctagatctgggtctgggtcggtattcgggtccaagtctaggttcgtgtccatgtcatggtctgaatcaaaatttaggttaggggattggtttgggtctgggatcaagtctggagttcgggttcgggttcaagttcgagtcgcaatcctagtctgggttcgggaccgggtctaggtgttggtctgagtctttgtccgtgcccgagtttcgaggctgggttcttgtctagtttcaggtccctgtctaggtctaggtcctggccacgaccccagtcctattagggtcttggcaacgttctagtacaagtttcggtttcgtgtcctaggtttgggtctgggtccaggtcctagtccagcttcgggtccttctctgggtcctagatcaagacaccaactatgggtcttgtccaagccccaatttccagatcccgagacaagatctgcatcccaatcacaggtcccaatctggtttcggttcatgttccaggtcctggtctaggtctcgatctagttccgggactgagacttgggtgcagttccggggtctcaatcccaattctgggtccgtagtcttgttccatgttcgggtctgagttcaagtcttggttcgtgtctcgagtcct

SEQ ID NO: 334350 - DNA, 625 bp, Cannabis indica
attatttattttttttttaaatttacataggttgctccagtaatttctatgtgcgttgttatacggattttagttacaatttaattaggtatatactcataataaatgaggtgatgggtggtgaatttattttgtctattttatctaaacaagacaataatatttattataaaaagatcatcttatcttatcatatcttatatctattgtgttatcgttagtgttagagaaatgtgaaaaggtattagtgtctaatactattacgtgtaaatatcgttatcgaaatcccattccgaccctggcttggcaagccccggcatcatgtcactcacagtctcgtcgctcacttgccctttttgagaatgggaatagcttcaaccttaacacctcttcactcactccttggatcttgaaagaatcactcacctccaagaatgaacggagatggaggtgaggatcttcagttggcatcccgctgaattgccccacggtttggagcatttgaaacatcactggcttgagctcaaactgcggtgcttgtatttcaggcctcacaatgcctggattgagctcattaaacatgggagctgcatactttcatatagcccttgctcgatcatctgcc

SEQ ID NO: 334351 - DNA, 813 bp, Cannabis indica
actactacaaaaaagggtattttcgtcggttacaaggtgacatataaagaatttgcgtcggtctctaaaaccgacgtataaactgtagacgcaaatagtgtattatttgcgtcggttataaaatgacggaaataacttatgcgtcattttgaaaccgactcaaaatagaaaatgttttttataatattctgcgtcagtttggaaatgacgcgaaaagaattgttccatttcaaaaccgacacaaaaaactaatactgtcagttcttaaatgacgcataacctactgcaaatactttttttttttcacatgttgcgtcagttataaaatgaaacataagtgtaggtaaaggaaaattacaaatttccatgtaattttctatactgcatgttcatattttaaaatgactttatataatatacaaaaaaagttaaaataaaaattataaaacacataaaaatttcatatttagtaatcaattctataatcgataacgataaaactaactataaataattacataataccaaaattgttaatagaaacaatcctaaaacttatattccacgtatcattaaaactaactatagattaattaaataatacataagagttaataacaataatcataaaatttatatcccatgtatcataataataagtgataaccttgtactcaatcaataatcaaaagcttcactgcattaatctcttcgttactgtagggagcgtcgagtcgaggtatgcaacactttgagtatcgacatggatcaaaactgttatcaagtgtttactacacataataaaaaatatta

SEQ ID NO: 334352 - DNA, 546 bp, Cannabis indica
aaaaaagtccaaatgtgatagcagtagtcttcactgtatacatattcaattgcaatagaaattcacgcaagaaatatttataattaggattatttgcggtaaaaccttcttaagtagtcaggtttttacaactaaccccaaattttaaaatttttgcggtaaaactccctaaactcaagttctgttagcacttagccctttccgtccatttttatctgttcaataccatggtagaatgtccacgtgtacacagtgtacacgtggcacaattttattggtccatgtaaataaatatttaaaaaaaaaaaattaattatttaaaaaaattctttttctttaaatattaaaaaaattaaaattaaaatttttattttacatttttttttctttttcttttctatctctttgcattcaaaaaaccctaatccaccataaccctagaatccccaaatcccccaaacccagatcacccgaatcccccaaacccagatccccgaatcccccaaacccagatcgccaaaaccctcttgatctcgatcaaaatga

SEQ ID NO: 334353 - DNA, 475 bp, Cannabis indica
actttttatgtcatatttatcataaccttaataatataattgttaataatataattatcattaattattttcactacttcctttaatcatcaagaaaccactaaaaatttattatatttatatataataatttatcgtaggtgggtaaaaagaatataattttttatgagaataatcatataataataaaagagtaatttgataaaccatgctaaaaaattagctataatttttaattaaatccaaatattaaaaattatgttatttaacaccccaaatatgaactttctaaaaatcactaaggctcgaaatttatgaagaggaaaagagagagagtgatttcggccaaagaagagaaaagggaaggctcagttttctgaagagaaattttctgacagaaaagcttatgaaaacttatctttgaaaacttgttatttgactaagcaatcactttctatttataggcaactactag

SEQ ID NO: 334354 - DNA, 579 bp, Cannabis indica
atgcctatcgcctccaccacagcggtttgctacaagaaaaagcttcgacaagatggccatgacagttgcgagccaccataccagccttccgaatcgaaaatagctccgtccacattgaccttaatttaggtcccacaaagttaaatctcatatttaagtaaaaagattttaaaattacatattaagcataattttctctttatttaatacaaaagttacacacaattatatttagagtaaattgcggtcaaattgcctaatgttttccacgcttgcaactaacctcctaaaaatcaatttttggaggttaaactttccaaactcgtattctgttagtaatttacagttttgaaaaaattatattctatacccactttttattttttttattttaatttttatttttattttaattttattattttttaatttacacccaattttataggttatattcccattatgtgcattacaaattctaattttgataagttatgtgaggttaaatttagtactttaattattaaagagagtatttatcaattaaaattatttttgagttatatttggttgatgtgt

SEQ ID NO: 334355 - DNA, 517 bp, Cannabis indica
ataatcttttagtcataatataacttttttgtgaaaatatgtaacttttagtcacaacaaaatgttacttgtaactaaaacatagcatttagttacaacttgtcactaatttagttttagtcacaataagtattgtgactatacatttagttacaacaaattgtaatttttgtgactaatacttttagccacggaccttttagtcacaacataagaatgatattttataattagttacaattttttttacttttagtcacaaattttgttgtcactaaaagtaagattttttgtagtggtaggctggtaggagtgaaggagagtagggtggatggaaaggattttttatctctttgtattgtttggtattaggtgtgttagagaagaatgaagaaaaaactgattagtaaaattataaaattgtccctttgaatataaaaaatttaagaaaattattttatatactatttttcaattttgtttttcaaatttatggtttgagttgttctggtagttt

SEQ ID NO: 334356 - DNA, 632 bp, Cannabis indica
attatatcatagattagttatttaggttaataatgtaaataatataaaatgtgagatctcttttaagtaaagtatatttatttgatgtgatatttagtatgatatttggtgtaaatcattagagttgttgcaccaaaaataaaatattctacactagtttagtgtagcttctacatcaaattagagcacctccaatcactacaagaaatgttacttttgctagcacatttttgtgctggcaaaaggttgtattgtgctggtaaaatagaatttacttgtaatgtgttcccaaaaggggatcggcaaatcaacgttggtattagaacttatgccagcataaaatgaaaagcgctggctaaaatgacttttcccagggcgtaaatgtgctggtaaaagttagattttagccactgcacatgtacgatggtaaaactttgacctctttgctagcgcagtttgtgaaatgcgctgttaaaagtaatgcgctggtaaaagtgacatttcttgtagtgaatggtgcactattttactaaattggtgtgaaattttcacaccttattatttcaatgaccactactacaaaaatagtttttctcgacattttttaaacagtcgtttaaagtattcccgtc

SEQ ID NO: 334357 - DNA, 522 bp, Cannabis indica
caaattggatcaagtccatccctcgcatccagtagagccctcgtaccgaatgacgaaaattgacctccaatattgttaacttcagagttttgcacaagagtaagttcaccttcagaattgccatacatcaatcttttccaatgacgtcgaatccttcgaagtcgctctttaggcttagctctcttcttattagctttaacaaaagaacccttcaccatctcaatcttgcaacaggtaggaatgtcagttgggtaaaaaacattaaaattgacctcatcatcttgcactcgcaattttaactcccccttttgaacatctattaatgctcgtcccgtggctaagaatcttcccaaaataatatgaatagttgaatctttctcaatatcaagaattaggaaatcaccaggggagataaacttaccaaccttctgttgggttttacgccctaaataaaactcatttcaatataatacgatttacttattaatatagattagaaataacatttaatgttgcatggtt

SEQ ID NO: 334358 - DNA, 603 bp, Cannabis indica
ggtgtatggaattttttctccctgtaaaggctatgagaaaaatttggctaactagcgaaagtaaccaaatgaaatgagaaggctggattttataggccagaacgggtgtgaagcagctgtgatcaagcatcatcgtacggtgagaatagcaatcaattcgcattctacagatctaacggttgggacaaacgttaatcaaggtggttggaaacgcttgagtacttgactgacaccgattaaacgcgctggatcattaatggataggaaacgagtcgttgcctgcaaaaattaaaaactgcaatgatgatggtcataaatacaccccaccctcccaaagcacaagccacgtagtcaataagacaactggaggcacctaaacaagtctcatttacttcccaccaaacaaggcttgggggtaaatgttgcccttaatttttcccaaaatacgtgggccaatgcgaccgcgacacgtggatttgaggaatatggtttcaagataatttaactaagtcattttagatcaagagtatcaacaaagaaaatacctcccgaagaagagatgaggggtccacgtaatcccggagagcagagctatagcaaagc

SEQ ID NO: 334359 - DNA, 482 bp, Cannabis indica
acaacacttcacataaaattattaatttagtcttaaatatttgaccacattacatgtatggaaagactactccaatgaacaactctcattggagatactcaagtagaagttatacatatcatatgagaagaataacagggcaaaagatgaagaagacaatttttattacccaaaatactgtgtatgctggatacaatagacagaggaatttatataggcagtaggtgaagtgaagttagttaggggaagaacctaactaacttaattaattaactaattgacttaaactcctaacaactaattaaccaatataactaactaattctaataggccccctcaagatggagtgtaaatgttaacgacacccatcttggatacaatattgttaaactgagagggaagaagagccttggtgaatatgttgttggattatttattttaccaggatcttagatctactcacaagtatgttgtttaaaca

SEQ ID NO: 334360 - DNA, 587 bp, Cannabis indica
atatatatatatatatggataattttaaatttaaatttggcatactagaaataaaattttaaatttttctttcattctaaatgagttggtagaaataaaatgttgccaaagcaacctgtcttgcgtagatttctcatgagcaatgttagaggtttgtgtgtgtttttcatataagtattgatcgacccaaaggaaggttatacttattttgagtgcacatatacctgtggtgataaatgtgtgacaattgtatggtttccatgtaaacgatatatacagtccaaagattgacaaattgtttgacatgacttatttttaatatttgattgctacaacaagagtaccgctcacagtttatattactgtccaaagacttgatattaatgtgagtttggtatcttgagatgagatttgccattatttgaactttttgtgttatatgaattcttttgtcaaccttatttattttgttctctttcaaattcatatttcaattatgtctaccaacataaatttgattctcatgctaaatatgataaattttaaggaaatattaaaaattagcatgcttctttagctaccttgtt

SEQ ID NO: 334361 - DNA, 663 bp, Cannabis indica
taccaacataaagttaattctcatgccaatgagataaatttttaagtaaaggaaagatgcaaatatgcttctttagctaccttgtttaaagaaaggataaggacaaagataaaattcagtatgttgcatatggaacactgttaaagaaagtgcaaaagattttagatatggaattatctatgacttttacaaaaggaattaaaataaggttaaagtgttccaagtatgtcattagacatatctaatgaaaataagtttctcactatggtttgttttgtaaatgatttaatttattgtacctaactatacttaataagtaattttttatgaaatttcttatgtaagtatactatggaaggttatctatgaaactaaaagccaagtgatgatgaaagattcatctttaggggcaaaagtgaaacatctacatatgaggctataaggatattcaaactatggttaaagactagttattttttggatttggaaaagacttatacagtatcatcacctagatgagttttggttttgaattctattttgaataagttaggacattcttgttcatttagaatttaaaagtcttttccaatattggttctactagctctttaatttatgaatttattgaaatttgcctcatataaagaaaccttataattt

SEQ ID NO: 334362 - DNA, 641 bp, Cannabis indica
aaggtgattaagcttgatatttgagcagccaatatgaaatttaaaatcagccttctccccaattttcttcatcaatctagacaaatattccatacctagaacaaacaaaagaggtgacataggatccccttgtctaagtcctctcttagattcaaagaatccatggaaagatccattgaacataagagagaatttaggagttctaacacaattcataatgagctgagcaaatgacatgggaaaatcaagtccaacaagcatctcttcaagaaaatcccattcaacagtatcataagccttttggaggtctaattttatcatacaacttggtttatttaccttccttccataatgtctaaccaagtcttgacaaatcatgatattatgcccaatatatattcctttaataaaacccccttgagaaggagagattatttgaggtaagatattccgaattctagaactcgagagcttagttgcaattttataaataacattacaacaagctattggtctaaaatctttaactgtatttgggcattttatcttgggaatcaaggtaatatgtaacgtccccgcttcaagcctccattgggttcttacacccacggaatgaatggctcttatacacgagtacgtca

SEQ ID NO: 334363 - DNA, 858 bp, Cannabis indica
tttgagttagtttaatcgagcaccgagggacctgattggtctcgtggcttgaggaggatgtcgactagaccactaggtcctgaagtcgacgacgtgaagggagaaagcggatagagaggtcctagagctgtatggccccattgacgatggtaacgaatcttaaagactcgactggcccatcaagttttttggcttcctttgccggtcggtcttggtggcttttcaatcgcccaccaactgtacctcccctcaccaccacaagctcgctggagctccaccatcacctacgaccaattttggctagcccgcctatctatacatatatactgcatatatattatattatttttattaattaatcttattattaatttagaaaacaagatttgaaatattttagatacctcaaattttgaaatgtgtatttatctttttactttaataagttaaaataattttcaaaaataagttattattttgatatataaatattttagaaaaatttatacgaaaagtacaaaaaataactttattacaattttacctctacaagggtgggacaacttttatacctctttagttattttatttaccaaaataccacttacacatacattttgcatgctgatgatgtcactctacctattttctctctctttttcttgccatgtttttttctccagttttcaaattcattttttcaatacacagatgtgattttttagttgtttatcctacaatcaaaatccaaaattgtattttcttttaaaaaataatgatctcctcctccatctgcactgtgacagtcagtagtcccgtgatccgtaaggagaaacaccgggtaagctgtgcaatccc

SEQ ID NO: 334364 - DNA, 839 bp, Cannabis indica
tcttcaccaacaccaccataaccccctttcacctccatccattaccaacccatagccaccacttccagtcaaccttcaccagaaatcaccaacccatgcagaacccaaacgcaccaactcgagccgaaccatcttcacccgttcactcaaacaccaacccgtaacctcaactcgcacacagccggcatccatctccattcagttcaccactgtagccactcagtcgacccaaatctgccagcatcaccattacatcctattcttgctagcgagaagcaaaagaagtcaagctgccacagagcgttgacaaaagtgagttggtaaaatttttaattgtttgttttttttggttaattggacaacttcttggctgtcgagtagtaaatggaggtgtgcgggtgtgttaaatttgataactttgctaagtggagttttgaattggttttgaaattattagtgacaaatttatcatggctgccaagtagtggtggatctaattttagtactattgatattgtgaggatatttggtgtgatattgggagttaattgccgtggctgattttattgaaattcttggtgtgaaattggaagtttggtgtgggggatactttgatgtggataaaattgatagttggaagtgttgaagtggttctgaaaattatttgtgtagttcataattggtggtgtggctttgcaattgttggtgtgatattggaattttgatgtgcttttgaacaatgaactgcttggtggtaactatttgatttgaattggaatttggtgtagtattggaagtgttgtggctcttggacatattattgttagaagctttgttgt

SEQ ID NO: 334365 - DNA, 504 bp, Cannabis indica
gtgatgcatgatagttatgttgtttaaagttgtggaattttagctaaaaaccttagtattcaaagaaaaaatgaagaatatgttgctgttgtttttgttgatgcttgttgttgttttctgaggttattatatgcatatttaggtagatttgagctggtttggatgcatgttagtaatgtttaaccaagtttgagttctgaacacaaagcttggagctttaatggtgatttttgattctgtgttttctgggctgtgttgatgctttagaattgttctttggagtatttagaacaggtctggaaggtttggtatgattttggttggatttgattgagatatggaattttgggtgtttcctgcgaggaaccggaattccggttgtgcaagcggaattccggatggggttcaggaattccgagaaccgaaattctggttgcagaactggtctactggttggtggatttgcaggaagcctagtttttctcgtttttatgttatttgggg

SEQ ID NO: 334366 - DNA, 796 bp, Cannabis indica
gaatgtcgggaatagtcaagattttagagttaacaaatatacccctaagtgaccttttatgacttttagtgtgggaagggcaaaatggtcatttttcctcattagttattttgtcctttagtggagtataattgatttaatatgctgattattagatttatatcaggctaagtttatttaacaaaacctttttaatcttttcattttataaatactagaaatttaaaaaaacaaagcattttctttctcaaactctctctctctttcaaacccgcctagaacgagatagggttgggttgttcttcagcatttcaagcagattataacaggttttaagtgaatccaagctaaggtaagcctttaagaaactccctctttagtgtcttgagttttaagaaagtggatttatgcatgttttgtgatttcggctaatttagttgctattgttgtttagtttgtgtttctgaagttagaatatgtttagatattttgaattacgcatgttttgaaggctaatttgttgattgagcaagctttgagttttagaactcaagcttgcctctttaatggtgattttcgattttgagattaggtagttattttattgcttggattatgtctattggggtataatatgcaggtctggaaggtttggaatcgatttttttaggtttttgaatgttttaggttttctagtgtaaaccggctaactggttttataggacttgtaaaactggttatccagattggctgcagggttcccctaaaaattcgtgttgtcgattcgtgctagttt

SEQ ID NO: 334367 - DNA, 555 bp, Cannabis indica
ccctcctgggaggcagtctctttagaagctcgtccggcatcacctctttgaattcatctaacaccttctcaattataggtggagtggactcctctactttttcatcgtgcacggcgcgagcaatgacaaatgttggcctcttcttctttaggcccctcttcagttgcaaggctgatagtagcttgacttctgggggctgtctcactctagcgggcaccattgaaggattctcacccatgattaggagattccctgttgctggaatgggaatggcccccttctctactagaaactcctttcccaataccacatcgaagtcatctatgcaaacagctacaaggtcaagttgtccctcccatctgtcaatcttgacaatcattctggccactccaattgtggccatagccttcgaattgactactttcatgcgacccgcatctttctccagttttaggcccaccctcttagcttcaatttcggaaatgaagttgtgtgttgcgccagtgtcaatcaaaacgctcttggccttcttaccatttaaagtggcctccacaa

SEQ ID NO: 334368 - DNA, 913 bp, Cannabis indica
tcactgtaatgtactcttaaacaacattcactataccaatgcactctgtatcataactgtacaaatgttggtagtgcaactaacacaaaagcatgcatgtaacttagcacatatatacactcaagtattcatattacatattatacacagttcttaccttctttccagagtcaagtgtgctggccgacctgaacaaaaagtcacgtgctggatggatgccctaatcacatattaaaactgggtaaatcacatgattgaaaccctaattcgggaaacccgaacccacaaccctaagttctattataccctctagggattactctaactgaagaaataaggaaacacccaactaaggcactaaaatggacaagaattgaggaaatggaacattcgggataccctgccaaaaccggcttacacgtaaaactgtcaaaccgactagccggtttacacgagttcaccccaaaatttcaatttcttgttcaatcctccaccaaatgtaacaaaaccttccagagtacctaattagggtataaacagcatattccagccagtatttcacagagaaacatactaaagtaatttatgccattaatgaccaaagctttgagttcaaagctcaaacttactcaaatctatctccatagctcaaagccagctacaagaagctatactcaactcaaatgaacattataactcaaactacacaaacactaaaccctaacagcccctaattttcaaaatcacttcatgaaaccaatctaaagctttaaatacataaaatcaaaggatctagggtttacctttgcttcaaactcacaagaatcttgctaaatctccagaaagtacgatgaatttgatgagcctcctctggtttttgggttggccgaacgaatagagagagagagagaga

SEQ ID NO: 334369 - DNA, 567 bp, Cannabis indica
aatttatataaatatattatattacctggtaaattaactttttctgcagaaatgaatcaaggcttggcccaagataaaaaaaaataataaaactttaaacaaggacggcaacaaaacaatctagccagtcgaagatcaattattaatttactataaaaaaaactcttacttttagttacagcataatttttttgtgattaaacgtgacttttagtcacggcaaaaacttacttgtgactaaaacatattacagtagaacctctatccaagaatacactggtatgaggtgttcaaaataatttgattatagggaatattatgaaggagaatatgattataaggaaatgtgtaaactgtgtttggttgtgtagggtaatatgtaatcatattactgttaattaaattacactgtttggttgagtacaggaatcttatatatattattttgaaaaattaaaataaaaatatttttttattatatctatttaatgttagttacatatataaaaataaaataattatttatttaaagaaatatatttattaattagtaaacattaaatttta

SEQ ID NO: 334370 - DNA, 794 bp, Cannabis indica
cccgaaaaatgacacgactataacacgtataagcatatataagtattttaaaaaattgtattatgtaaaatgaaatataactctttaaaaaaaactcataaaaatactttttttttaatttctttattaaaaaataataataaattaaaactacaaattttatgagtaatatttgtctttatatacataattatgctaatcgtgtcacattcgtgtcatgtcagaacatgtttaattgtgtgttaaatgtgttaccgtgtcgtgtcgtgtgacttgctaaataatcatgtattgttcgtgtttgaggtctagacacgattaataattgtgtcgtgtttgtattcaccataaacgtgtcgatacgaacacgacatgataacatgattttctaaccctatgttttagtgagctaaaaaatttgagaaaaattgtggataaattttaaatatttatatgtttgactgttcatttttagaaccaaactcttagtatatttaaagttgtgatttttgcaagaaaaccataaaatatggaatcttttattttgatagttttaagtatagttttgaaaaatttataacaaggaatttttgtatgagatttgttggaagttaaagttaaaaccatctagttttatttcccactggtttggaaaatttggcccaaaattacagattggatcgactctaaggcggaactttaatctttggataatcttatcgtgaaatttctaaattatcttatgtgtttttcctaaatgtgctcatgcatcatatttagattacaaacttgat

SEQ ID NO: 334371 - DNA, 672 bp, Cannabis indica
tttgacttgattttgagctctggctattagatttgagctgtggtgagggtattgagcaagcttgagctttgaagctcaacgtttgggctttaatggcatcctttgatttatcggtttgtattgtgattttctgcttgaattatgttgtaaatacattgtacaggtatactggaaagttttgtagagtttggttggattttgaggtcaaggggagaatttttcgggttcccagcacagaaccgaaattccagttctgggggacctgtggcaaccggtcgaccagttggtgacccagaacatgaattccggttgggaaacggtctgccggttgggggagtttttggaaccctagtttttcccatttttgagagatttagggtattgccatgttatttatcgataggggaacttttagttttaagtttaaatccccacaatgtgatttagcgagtcactcatttgtgttacaattaatgtgattagggcatccatctagcgcgagaatttccgttcaggtcggccagcacacttgagttcgaaaatcaagtaagaactgtatatagcgtgtgatatgagatatatgcatgttgtatgtatgattgtatatgttttgggtgatatcatagcggcaaaactattgtgtcggttcggcagtacaggcatcgtactggt

SEQ ID NO: 334372 - DNA, 929 bp, Cannabis indica
ggcagctcgatctctcccgaggtatttttctgttcaccactaaatccaattaggacagttgtcttcctcacaattttggattcgtcaattcccatttccctgagagcactcaaaaaaaggatgttagctgaactgccattatcgacaagtatacgtttagtcaaacagttagctatataaagtgaaataacaagagcatcatgatgagggttaagaagcctagttgattctgatgtcgtgaagctgatggtttgctccggtaaggaagatgttctgctggtctcccctttggtccagttagcctgacgtgcatgtttctttgcagctgactgggtgactccacttacttctgagccacctgttattacgttgaccgttctctcatgaacaggtggcctgggcggtgttatgtccctctggttgtctatcgtgtccctctgaccctggtaagtcttctttcctttgtcggtgaggtggtcgactaagtggccccgttttagcaagttgattacttctaatcttaaggcaatgcactcttcagtccggtggccatggtcgttgtggaagtcacaccacttgcttctgtccctctgctcagctggagtcctcatcttctcaggccactttactttgcttccaagccccttaagtacttgaacagcctcagcaggtgagatggacaagttgtactcgggcatcttcggtccacttcgaggatatgtgtcagtgggccggttgtaatcccttcttcggttctctgacttgttagaagtcgggtatggctcagaccgtttgtcgttgtgccgtctgtctactctagaatctctgcgagtctcttttcttggagaggatctgtagtagttgacttcatcttcttcccacttgatttgggcccatgccttggcgaggacgtcttccatagtcttaca

SEQ ID NO: 334373 - DNA, 654 bp, Cannabis indica
aaagtttgtaatggggtcgttgcctgaccagactgacgtactaattggcaggtttgtcctatagtatggacacctggtgcaatatggggagtcaggatagtgtggtcagggctagtaacggttggagagaatggagtctaagttctccccgtaaccaaggtgaaagcctttggagggcttcggatgggagtgatcctcgttcgtcacaggttccgtgggagttggagcaaaggttcgcagaaatggaagctatgattcaacgacgcgatgaggagattcagaggttgaaacagcaaaggtttcctgcactacctttacctcatatgccagtcattctcaattcgagattaccagcagagcatagtatggctgataaccaagtgggatcattgcatgagaaaatttggatacatgaacctacagttcttcagggggattaagatacgaagaatgcccactggactagaagccataaagaatttattataggacctcaagaggttatgacacgaaatcgggataccgcttgccatatttctagttatggcagaggtggtaggggctccatggttgagcagaagaataaacttacgtcgtcagtggtggtttaaaacggaacaagcggttccgaggaaatcaaggcaagggtgtacg

SEQ ID NO: 334374 - DNA, 609 bp, Cannabis indica
cttctatgacacctctaggaattctcacagaatgatcagcaaactgaagtgtcatagatgttggtttcagttcccctagacccagttgcttataaacagaataaggcaataaattcacactagctcctaaatcaagtaaagctttgttaatcacatgatcatcaataatacatggaattgtgggacacctaggatctttgtgtttaataagacttttatattgaaatatggggttgacttgttctgttaaaaattcctttttcgaaactttggtgtttctttttgcagtacacaaattgttcaagcattttgagtaggcaggtagttgcttaatggcatctaagaaagggatatttatacttacttgcttgtatacctctaagatttcaccatactgactacctcttttgattgggatcgctctctgtgggaatggagctttcggaatgaacgacaaagtttgactcgattcttcaactgagtctttggaatgtaaattttcaggctaactcttttcattctctttcaaagattctttgtttatttcaacatcaggttaaggtatgtaatcaggtttttaaataatttttccagacctaaggatagaaa

SEQ ID NO: 334375 - DNA, 829 bp, Cannabis indica
taaacatatataacatttgcaaaagaattggtttatgacaaagaataattgttagaaaatacaattgtagatcttgatgcaaccaaaaaatttaaatatgtgatatgtaaatctcaaacaagaaatagatatataggatcaacgaatagttgaatgggctatcactgatcaaaacagaagaatctcacaagcttattcattccaataaaactgcaaggattattgttgttgagaaatatatatatgattgaaaggaaaaactactaatctatacaacagtttttatcaaaaaaaaaaaaaaaaacagaaaagaattgttgcagtaactgttgagtaaactgctagcaaaataaaagaggaacgatattaccgaatgaagaattctgggttgagtcgcggactaagtcgctctctttaagacgttcgcggcactgcccaggagtgtgcaagcagtcggaaattgccggtcgtccccaggataaaacagcccagtcgttgcactgtatcggaaccccactgcactgtagagcaccgtcgaatacacccaaaaaatttgatatcgcagatggaattttaattttatgaaaaactgtatttttctgatacgaaaaagagatgttttcttcccatcagttcaatcgcattatataggcgaatggattgaataaacataacgggaagaataacgttttctgaagtggggtgagttggtttttgaacgtgtcccgttaactgatacgactaagtaatcagtttaattaaacacgtttcttaattaaattaataaataaaaataattattttattaaataatttttctgtaaaaaat

SEQ ID NO: 334376 - DNA, 1424 bp, Cannabis indica
atattttagataaaataaattacgggtattgagcggggttatggaatttgaccattttacccctagcttttgaaaaaccttagttttgggttaaagggcaatttagtcctttggtttaaatgagggttaggtggctggttattttagcgacacctagaaaaggaaaagtcaaaatagagagtttcctctctttctctctttcggctaaagcaaaccagaggagatcacccctttttaccattgtttttctggaattcttctaaggattcaagtgttcttgaagctaaggtaaccctagttcttttctagttgtgttttctcaagttttcatgggtttcaagttgtgtttttgctagggaggggctgttagtgttatgtttgcttagggtttgaattctaagtttattttgacttgattttgagttctggatattagttttgttgtatggagatggaattaagtatgcttgagctttgaagctcaagtttagggctttaatggcatcctttgatttagtgactttttcagggaatttcttgttggattatgttgtatatgcattgtacaggtatactgaaaagtttggtagagtttggattgattttgaggtcaggggggcatttttcaggttcccggcaaagaactgaaattctggttttgggggactgagcaaccggtcgaccggttggtgtcccagaatcggacttccggttgggagccggtctgcgggttggggcagtttttggaaccctaattttttcccatttttgagatatttagagtattgccatcgatagggaaacttttaggttcaaagttaagtccccggaaagtgatttagcgagtcactcatctatgttataattaatgtgattagggcatccatctagcacgagactttccgttcaggtcggccagcacacttgaattcggaaagaaggtaagaactgtatttaatgtgtgatatgaatatctgagtgtatgtatatgttatgtgtatatgcatgcttaaattgttaattgcactaccaacacttgtacggttatggtacagagtgcattggtatagtgaatattgtttgtgagtactgtacagtgataccaacacaagtacgagaaagtgctgaggtgtgtggtatatcactcagtggtactaagggtacgaaacaaaccctaccaacactcgtacagtgaggtacgtagtgtatgtggtatagtggttgtaccctagtattgaacgttcttactcatctgctgagccttgtaaataggtgtatgggcgcctaggtacaagtcagaattatatgatatgttatatgcttttcttactgagtctgtcgactcacagttctacttccatgtgtaggtaaaggaaaggcgaaagctgaacaggagtgaacctgagctaggatgggattgtaca

SEQ ID NO: 334377 - DNA, 568 bp, Cannabis indica
gaaattttttggatgtaatagttaccaatggctcagcttccgtccacttagtaaagtaatcaacttcaaccattgcatactacactccacctttgcctttgaataattgtccgatcaggtcaattccccaaatggcaaaaggccacagactttgcatatgagtcaactcgttgggcggagctcgcggtatctttgaaaatctctggcatttgtcacattttttaacacggaccttggaattttcaatcattgtcggccagaaataaccttgcctttgaattttcttaggtaaactctgcccggcggcgtggtttccacaaaatccatcgtgcacttcagacaaaagtcgtgcagcttcttcttgggtaacacatctgagcaattgtatggacaaccctcgtctgtacataattccctctactatgatgcaccgtgcagccttccttctcatctttcgagcttcattttgattatctaggagttctctagtgttgaggtaggttgctattggcgtcatctgttgggttttatgccctaaataaaactcattacaatctgattagttatc

SEQ ID NO: 334378 - DNA, 820 bp, Cannabis indica
tatatcatataatgttgttcaatgatcctacgggtgatattatacttttttccatcaacataagatcctacatatttatatatccaattcttataaaattttatcgataattttatttgtgagggtgactacttgtcacctcatcaccaatatacgagaagtagtggtagcaccaattcttatttcaccactacaatattcacaagacaaaataagataatacaatcaaaatacttaaaatataaataaaagtattacaatacatcaagattacaaaaaagctagaagaaaaaaagaataatacacaactagcttgaccaaagcttaagaagaaatgagtataccctcataatattcttgttagagatattattgcaatagaagaaaattataactctattgcaatataatacaaggaccaacaaagagattaaagaaatgttacaacacataatatacaatatatatacactatatattatatataaaaaaggtagaagaacatatacaacacatgtaatataatatatgtatatatatataacaagagaataatatatatataaacacttactcacaaccttgagtgtagattagtggggatcaccatgacttgaacaaagtattattacatctttgtccaaaagcttaagctttgggaactcctatctctaagcactaagggaactctctaagaaatagctttgggaattatcaagtcttagggttttctaacaagtgctttcttgataaaaaaacttcttctctctcaaatgagcaccaaaaacttctttttataatgtataggtgatcacttaga

SEQ ID NO: 334379 - DNA, 669 bp, Cannabis indica
tatatcatataatgttgttcaatattcctacaggtgatattatactcttttctatcaacataagatcctacatatttatatttccaattcttataaaattttatcgacagttttatttgtgagggtgactacttgtcaccttatcaccaatatacgagaagtagtggtagcaccaattcttgtttcaccactacaatattcacaagacaaaataagagaatacaatcaaaatacttaaataaaagtattacaatacatcaagattacatgaaagctagaagaaaaaaaggataatacacaactagcttgaccaaagcttaagaatctttgccttaaaagttattttctccatcatatacacttaggaaactctaaaaatgttcttaacgatttatcaagcctcatattctcagtctaacacctaagaatgagtatatcctcataatatttttgttagagatattattgcaatggaagaaaattacaactctattgcaatataatacaaggaccaacaaagagattaaagaaatgttacaacacataatatacaatatatacactatatattatatataagaaaggtagaagaagatatacaacacatgtaatataatatatatataacaagagactaatatatgtataaacactcactcacaaccttga

SEQ ID NO: 334380 - DNA, 530 bp, Cannabis indica
acgtgggaatgatcacgtttcattttaacacgtacgtgtggataataattgataaccacataactgcttatcattcttatcttcaaggcagttgacactgacgtgggtagtggtatctcgctttgcatatagatgaccaataatgacttggtttaatcatatgccttccagcaatggcatgagctccagtgtactgagcaaatttaagaactgctctttgaccaaaaggcatcgcagtctggacaatcatgtcctacttgtttcctagttgttacacttagttcttataatgtggaatatatgctaagtgtttaacaaccgattcttctcatcaatatttccttatgtgtagcgaggtggatgtctcgctatacattgctcgtagttaattcgaataattttacttaaaaaagaatcttgttctcgggactgtgtcttccgaggtaagatggtctctcatcaatacaagaattaatagtttgtgtatccttgtctcgcctaagactatacagtcagcgagttatgaatat

SEQ ID NO: 334381 - DNA, 598 bp, Cannabis indica
tctagtgaatccaagtcttcaacgtataatgtttttgcgcacaactttcgaaaaaataatgagagctcggaaatggcaagtatcacatcctttttcacatatggtcgcaacccaactggtaataatctttgcagcaaaacatggcaatcgtgactttttaagccaataattttaccttcacttatattgacattccttgaaatgtttgcggcatacccatctggaaatttgaccgaccctaaccacgtacaaaattttctccggtcaactaatggcaatgtgtaacatgcttgtggtttaaaccatttatctccttgtttcttcaagtgtaattctttgcgtaggttcatcctttgtaagtcaagtctggccttttcagtatcctttgacttcttatctatgcataacattgtaccgtagatactttcacaaatattcttttcaatatgcatcacatctaaattgtgtctcaactttaattttgaccagtattctaactcccaaaaaatacattttcgactccaaataggtttattcttttgggtttttccaccattcacatcaacctttaatctttttctcctttgcacgacttctt

SEQ ID NO: 334382 - DNA, 563 bp, Cannabis indica
aataatttccaacaaatacaaagactagaaactaagaaaattaatacaagaactgttataatagacaacagaattacttatataattttaactgaatccaaacaattttctttcaactcagaagctgtattgaaaaaaaagatgggtgtttcaaatagaagggatatttttaaaataaagtgataatgggcattaatttttagggtatccaaatttagtttatgtttatattttgggctaagatgcaaaatagttctaaatttagaaactaaattagtaaatgtacaaaaaatatatatttatgatttttattagctaatttattatatttgaccattttactaatattaaactaatttagtttaaaaatatatataataattaaattaggttatataatttttttagtatatcataataatatattataacaaaaatgaataaatgtattaaatcattaaatatatataataatatttgatattagggctgaacatttctagcgggttcgacccgaacccgagcaacccgcccgaacccgaaccggtgaacctgcaaatttt

SEQ ID NO: 334383 - DNA, 829 bp, Cannabis indica
tatttttatgttttgaaattttgtatttataaatgttattgtgagtgttttattttgtttgattagaattgtttctttttattgttattaatagttttaatttttatttagaaatgttcaattatagtcgttatgatgtcgaaattttagtagaattaggaaatgttatttgatttaagtttcttttaaacttggttgttatggatataataatttagaataataatttagaataagattagttactaattagttacaaattatatagtatattatagttagttactaattagtaatttagtaattttattcttcttttgaaaataatatttaatttaactaattttactctaattaagaatttaaagttattatgttctaaatataaaggaaatacatgtataaatacaagttaaggtaagaatggaatgaacaaatgacacttgacaaatctagagacataattaggaggttaatagtaacatagagagagactataaataaaaattatattggtcttttgttcttgttatgatgcaaaagttatcatactaaaaataaaaatataggttttgagagatatcaagcaagaaaaagaaaccataatcatgtctactgctggtcacttgattaatacaaaaatatctaagtgttctatagaagacattaggtctcaaaagttcttcattggtaaaagagagtcaaacccaataacccaaaatctctatcatgctattacaactaagcttatccaaaaaggttttttttttttttatttgggcccctaaaatgagtgggtcttagaggcgggcttagcccgcctatgctt

SEQ ID NO: 334384 - DNA, 804 bp, Cannabis indica
aagttttcaatttttcaaacaatttgtaaatcataaaaatttagaatatgtctaatgttataccacacatataaaaatcaagtctaataatcaagttgagtctctacctctcccaagtcgttaaactttgtccaaaagacgatcttaagctgtcaagtctcgagctccaattgtttagtccaatcttagatattactctcacatataccatcaagtggttaaataattatcatcatggcattgtacattcaaaatcaagtccaacaacatataatgtatgactatatttaaaatttggggttccgaagcctcacctaagcggtgcacattaactatcgttggcggtaaaaattggtgtatcggaaatgtcaccgaaaataggggtagtatatatcaaagtgaccacctcgacgagtagatcacacccatgccaaccgtttgtcaaaacggtacacgttatccccgaaaagttgccagaaaggggcagagctttgaaaatgtcaccaaaaaaagtagcgaactgggcgaaatggtttagtgtaggttgttctcctcgacgagctgagtttagcggtgaagacggctcgtcaaacggacaccggagatgaccgaaaaatccgttcaaagtttgaatcactaaactttgacttgtgatcccaagctaacagcggggggtgagttcgccggcacctggggtttcattttgtctagcgcgtaaggctgggcagtggccagagatgggtcgccggattctgccggtgatggggtttgtatgtttctttttttttttttgttttgtaaaga

SEQ ID NO: 334385 - DNA, 1274 bp, Cannabis indica
aggtaaattttttatttaggcccctaaaatgaggggaccctaggcacaggcctagcccgcctatgcctagggttggccctgggttcaacatgaaagatgcaaagccagtttctattgggattttatgttgtaaataaaactcttttcaatataatattatttgccatcaatagaagattagaagtcatttatgtttacatcttattttcatgtttatagttttaatatacaaattttgttaaatccaaaacatatagttattaataattatagtgatgtcttcaaatgtggaaaataattgtgattatatgcttcaaagttttagtcccatgatttatcagtacactagatttaactggtgtgataatcaatgataaagtttacttacacattgatatgtggtatgtcctttctagggcattgataaagtatactagtatcgaatgtatggagtatatatcaggctcgaccgataatgaacttggataagatatcgtaaacttacagttatatctttgtaagtcaatatcacttagttgatcttagatcaatagatcttaatcctgagatggttaggttctagcttaactgtattatatgtgctctttgacttgttcgttcgagttgaccaaatagatcgacccaatacttaaatcttggaaatatggtaatacaattgagtgagagcgctaatcatagatattttattttgatattatatttttgattgattaaataaatgttacaaaagttacaagtttattactaatgagataatatttaatctagtggggcattgttatattatttataaataatataatgtatagattaaatatgtgtaacaaactaatatgtaacatatgacattatatattaggtgtcatcattttgtaatattttggggagttacttgttactatgagtaccctccactattatcagtaatattaagagtgtaaaaaggggttacacatcttaatttaaaattcttaatgctataggagttatggtgtgtgtatgaattacatttgaatccataacattcatgtgggttatgagtttgaatttcaaatggtgatatcctaaatactatataaagagatctaaggtgcttatattgagatgacaagttttctatcaaaaagcacattgctagaaaaccttaagacttgataattcccaaagctatttcctagagagtttctttagtgcttagagttagggaaataaacttttggacaaaagtgtaataccttgttcaagtcatggtg

SEQ ID NO: 334386 - DNA, 496 bp, Cannabis indica
aagtttacttgtaactaactctcctatctgctctcctctaccacagtatatataaagccagaattttttatcaattaaaaagaataacagatcacaaattcagatcaacaaaatacaaagggaaaaataaaactcagatctgaatagttttctccagatcagtactgagaatcagaacaagagcagtgtgagtttgtggaagaggcttacaatggagtaagctttggaacccagggtgtggttcggagatccagaactcaggagagactgttcatgcacaaggaagaaagaacacaacatcagtacaaatttagagagaaaacagagagaaaagtgaggagaaaaacactgtaattaactcaaattaccaaaacaatacctgtgtattttggaatcccacctattgtaatcatctgatcatttgaagatccatagtgaaacaaggcgagctcgaagaggacgtacccgcacaattttgggaaacctctataaaatc

SEQ ID NO: 334387 - DNA, 635 bp, Cannabis indica
gtagtgatgttcttttgttaatttgagtgagtgttgcttggatttttggtgtattggttgtttgatctctagagcaaattctagggtttttatcttgccttgaattcaagttatttgttaatggtacgttgctgatgggaatttattgggatgcatggttttgaagctctagttcaagagcttgaactttgctaagttaaagcatgattttgggttatttgtgcaatcttaatttttagagttgtagttgatgttgttagctctctattgtgatgatttttatctgtaagaagttaatgttggatatgatttgattaaggttcaaatatatggaaaagtgagcatttttagaccttaaaatctggttttcagggtttttcgaacccagtggctgcggccaaaaacctagcagagagccatcccttttcccgattttgttttggccattacttttgactcgggactccgttttggacgttctttatatcattggaaagatcgttccgagctctatatgattatttatattttgaatgccaaccttatattatgtgaaagtggaattagggattaatcctatttgtgaaatctcagattgtgtgactaggattaccggcacctgatcaggagcaccc

SEQ ID NO: 334388 - DNA, 1393 bp, Cannabis indica
atacctcgtgcaccgcccaatgagctaacttagatgcaaagtccttggcctttgctatttggggaattgatttgatcgaacaattgcctaaaggtaaaggggaagtacagtatgcggtggttgcagtggattgcggtggttgcagtggattatttcactaaatggacagaagtcaaaccattagcaacaatcacatctaaaaaagtgctagacttcgtggtgaaaaacataatatgtcagtttggactcccctacaagatagtctcggacaacggcacatagtttgacagccaattattcactgatttctgtgtgaaccatggaatcataaaaagtttatctacagtggcacaccctcaggcaaatggtcaagtcgaagcagtcaataaaacacttaaaagataccttgaaaaaacaacttgaagattctaaggggaactggccggaagaactttcaaaagtactatggtcataccgcacaactgagaaaacagtaactggacaaactccattcgctatggcctatggttatgaagctatgctgcccgtagaattagaacctccgtcccacagaagattgacctatgatgaagaggataaccatgctctcttagtagaatcacttgacgaaatcgaagaaaaatgagctgcagcaaacctaaagtttgtggcccatcaacaaaaggtatctcggtactttaacaagaaagtgaaggcacaaaactttttcggtgggagatatggtcctcagaagagtatttctaaacacaaaaaacagcacgactggtgtgctcggaccaaactggaaagggccatatcaggtggttgaagttatagaatcgagagtgtacaaactggggcagtatgacgaaaatatcaaactcgttgtagcaccaaggtattgtaatggggaacaattaagaaagtactaccaataaaagtaccaggtcggatgaccaccctaagtacaaaattaaagaacatttactctcaagtaaatagccttctaagcgaaccccacccaaaggttcgaatacaatgactaagtactcatgtcggatgaccacctctgaaagtataattttttttaaatgcaatttgttttatttaaatttagctaaagacagattagatcaatataatagcttttatgtaagttactacggtaacaaaaatattccgaccaatgaatgaataaagatgtctatttaaattcaaattgtgtcaattctattagcaagttataaatttaccattaaatgcgtacaaaggtctgctcgaatccaaagaaccgaatacacaaaatgttgggaatattttaccaggatctacacttcaatgtattttatccttaaaacacttagcaacctataaatgatacttcagtaaacta

SEQ ID NO: 334389 - DNA, 854 bp, Cannabis indica
gatactatcaagaagaagctagaagctaccaaatgcagatgggttgacgagctacctcaggtactctaggcccacagaactaccgaaaagacagccacgggacacactcctttctcgctagcatttggctcggaagcaatgctgcctgttgaagtgaacatatcgactcataaaagagagttttataatcaagaagaaaactaggaacttttaaaattgtccttggatctacttgaggaaaaacgaactgagtcgcaaatcaccaacgcaacataccagcaccgagttacaagatacttcaacaaaaaagtcaagaaaagactatgcagtgttagagacttggtgctaagacgagtctttgcaaatacgagagatgcatctgcaggagtcatctgcaggagtgttcaacccgaattgggagggtcgatatgtcatcgaagtagtagttggagtcagagtttataaattggctcgctaataaagaactaatggaacatagaatatttgtgaccctattaccaataaataaatgatataactcgcattactgatgtaaacttcaaacttcagttatgattaaagagtattatttacaataagtaattacaaagtttgttctttagaaattacttaaggggcatttatgtacgattaaccgaaaattatctggaaatacattgtataatgcaaacctatcaattcaatttttttttatattcaaaggttctcgactaaacctctttgacgaaagtggagtcgaaccgttataaatccttgaccaaacctttttgacgagagaggggtcgaattgttataacaccttgatcaaaccctttttgacgaagaagggatca

SEQ ID NO: 334390 - DNA, 582 bp, Cannabis indica
agtgttttttctgcaaatactcaatttgtgaaaattgttataactgttttactatggtttgtggtaagattgacaggatagcttagaacttgcatgtttattcttttgaggcgaaatccttgatagtgttcaattggaatatgacttaggcatttgttggatagtttgagcctttcaagcctaccataatgtgtatccctagttacccttttgagccttaacctgttgtgttttcacccactgatttgaaattttgcaaccacactattaatttttattctcaccatgattatccatgatatcataagctatatgattagtttgggggaaaagaaacatttagtgtgacgaaatagtgagagggagaaaaatttgtgtaagattgagaagaaagaaaagaaaaattgtgtaattcaatgtcactgaaaaaaaaaaaagaaaaaagcatggaaaaaaagtaaagaatatgatttcagtgatgttggaaaataataaatatatcttctctcaatcttggtaaacttgggaacagtatggggttttagaaaaagaaaagtaaaaagcttgggggttctgtttgtg

SEQ ID NO: 334391 - DNA, 1074 bp, Cannabis indica
agaagctgaaacagatgcgacttccaaggataaagagctcgaggaactttgcaaggccaagggccaggttgagctcgaagccaagagtgctcagatgaaggtcgaggagatgtctcgcgacttggaggtcgagaaggagaatgggaagagggagtatgaccaggcggtctcagactacatttacaccaccctctccaaaattctggattttgacttctcaatcctcggagcagaagccgcttaaatggctgaggctttctgcgccatgtcgcctacgcagactcaaggcggttgagggaatctatttcccgaggaggctgaggctgcaaatgtcgaggaagtcgagaacgaagctatcagcaaagtcgcggatggatctgcccctgctgctcccaatgcttgactttttctttaatatttacttgtgttaaactctatccttttttttatctatgcggtacaagggtactcgcgccttgtacttgaacaaatttatatttatgtttcttttggccgactttatatcctctcggggatatctatttataatatttttgcagtacacgggtactcgcgttttttgtcatttataatatctcgattgcgactttaattacagcttggtgtaataagtattagagtagaaaattttagaaacttgaaaaaatttcatagctttcacaactaatcaatagtacatagtggtatataccccctatacttggaatttttttataaaaaatgagtaagtataaatacatagcgagtacaaactataaaatgcgagtactattaataatagaattttaagctctcgccattccacgcccttcgaattgcagtaccatcgagttctgcgagtcggtacgtggcgtcaccaaccttttctgtgatgagatacggtccttcccaattatccccgaagaccccatgcgctgggttgttcgtgtttggcattactcttcgaaggactaagggcccatttgtttggtcttaatagacctcttgatctgattcggtcagatctagtattattaagttggtttgtttttttatttttttaatcactttttg

SEQ ID NO: 334392 - DNA, 696 bp, Cannabis indica
acgaccaagacctgatcattgactggggctaggacccacactgggactcagattgggacccaggaccgagactgggatacgggacccaatactcggaattgagacctaagaactgaattgtgacccagacctagacaacgctaagacccgagacaaggacaagtaccgaacaaggactaggacctccacttgaactaagatgataaccaagaatgggacctaggaccctgaccttaatcggggaccttgacccatgactcaggacccaagacccaaacctggacttgagacccgaactaggaccctgactaaggacctagaccttgacttagacccgggacccaggacccaagacacgaggcttggacccgacctatagtcggtgtctaaatctaggaatcggaccttgacttggacctagaccgagactagaacccgaacccgaacaaaaactcgaactagattaaggcagccaagtaaaggcatttctgaccaggtaaaggcatttctgtatttaatagaatagggacaactaactagaaaacctgaacaagcttcccgggagaatcttgccaagcatactgcatttaccgtcctgacggaagacatggaaagtgtttatatggctactcagtcattagccccgtacaagaagcctgcacccatgaaaaaagatgtcagcaagagagacattac

SEQ ID NO: 334393 - DNA, 2409 bp, Cannabis indica
tgagactttactaattgatttcattctctaggcgtagccctatggactaggagtgtttgaaagaacactaataccacatataattctcttgtgtcaagttattttaaattatgcatttatttatttttggttctggtttgattttgaaaatctgtgttctgcagtgacaaaattgtaatttattactacagactgttttagttgtgtttttattgtaatagtaatattattggcatttacaaaaatatattttttcaattggtatcagagcgagatactaaactcttattgtggtcttttaatattttcgtgtgttttttgtagtatgtcattttttgcagaagaaagttctatttctcgcccactgctgctcaacgattctaattatccttatttgaaggttagaatgaggacttttatcaagtctcaagataaaaaagcatggagaatgattctttcatgatggtctcctcctgttgtggtagattccaaaggtaattcaaaattaaaactttaacttgaatgatctactgaagatgataagttatctgcttgcaatagtaaaactttacatgctatatttaatggagtagataaatgttttattaatcttatatcttcttatgaatctgctaaggatgcttggcaaatccttcatatttagtttgaaggaacttctgatgttaagcattctaggtttattatgcttcacacccaatttgatgatcttaggatgtctgaaaatgaaaccctatctaagttttatgaaagactatatgatatagctaatgaatattttgctcttggtgaaaaatttgatgaataaattcttgtcaaaaaaattattagagttcttccagacaggttcgacactaaacttttagccatggaggatgctaaagattttagcacgatgaaggtggaggagttaatgagttctttacgtacttttgaattgaatcaacaaatcaaagaaaaggacaaacccaagtccatttgtgataaaggtaaaagtatcgcattaaaagttactgaaaagaaagtttttacaatgaatgtgatgatgaaattgttttattaaccaagaacttttagaaatatatgaaaagttggataagaaaatgaattctccaatattttcaaaaggaaatacatcttttaaaccttctatgactaataaaaaagggatccagtgcaaggaaggtgaaagttttagacatattcaatctgagtgtgcaaatactttgaaaaagagtaagaaaagttttaatgtcacatggagtgatgaagaaaattctgataatgttgcactaacttcaatttcttctagtttgttatgtgattcacaagtgaaagaaagattgattatttgaataataccattgaaaagagtctctcgctaaatcttacaagattatgtataaaatacaagttacttttaaaaatagatctttatcaaaaattaataaacaattgtcttatcaaattgaatctcttgaattaaaaattaaagattatgagattgatttttgtcttaaagatgaaaaaaattattctattaaagaaggaacttgaaaatttcaagaaaatgttcaaatgcttaaccttggatcttttagttttgaggaagtacagaatgcatgtcaaagaggctttgttggcttagatgaaatggcactaaaattctggaaacataaaatttgtaaaatctagtgttccagtgaattttcctgctactgcaaatttaaagtttgctgctacaaattcaaagcctattgctgcaaaggtagtgtatgcagaagcaaagtctctagtaatttcaaaaagagtaagatctcaggtaaggaggtttgtcccaatttgtcatttttgtgatatgaaggggcatattaggcctaaatatttcaccaagcagaatatgtacaaaataaattattttggtaatttgaaattttttcaaaagaaacatagtgttttgaaataaaaatgaattgaaaaagaaaaatgtctagctggtttttttgacaaagtcttgtctcacaaatatggtattttgacagtagttactctagacatatgagaggtgacaaggactttttggtaaacatcaggtcaatgtagtgtggcgaagtcacctttggcaataacttagtaggaaatattattagaatgggaactctcaattttgaagggttgccaagatttaaaaatgtgatgttagttgagggactaagggttaatttactttagcattagtcaaatttgtaaccatggttatattgtctgttttgacagtgatcattgttatgtacttaatgatgacaatcaatgtattttgcaagtatttcaatctaatgataattgttatacccaactcctatgttcacttgtcattcagctatcaacaac

SEQ ID NO: 334394 - DNA, 600 bp, Cannabis indica
atctgagaggactattcaaatcttagaagacatgctacaggcatgtgtgcttgactttgaaggatcatgggtaaagtaccttcccctgatcgagttttcgtacaataacagctatcaggaaacaatcgggatgtccccttatgagcttttatatggaaggaaatgtagatcacctattcatatggatgaagtgggtgaaagaaagttcttgggtcccgaggctgttcagagaaccagtgaatcagttgataaatttaaagcgcgaatgctcgcgtctcaaagcagacaaaagagttatgctgatccaaagcgacgggacattgatttttagatcggagacatggtatttctccgagtatcgcctatgaaaggcatcaagcgctttggtaagaaaggaaaacttagcccgaggttcattggaccttttgaaatccttgaggaacaaccggatatgaagcattgggactgcaaccagatttatcctatgaggaacaaccggtgcaaatacttgatagtagggagaaagaaacaaaacgattgcactggtgaaagtgttatggagaaatagtaaagtagaagaggcaacctgggaactcgaga

SEQ ID NO: 334395 - DNA, 2172 bp, Cannabis indica
ggtcccccacaggaggcaaagtgctttaggggctagatgggtgtgccctccgtccaaaataagcgaggggcgcatgaggggcctagataaagctgggtaccttggcggacttgagtgttacgtcccttcttcgaatcaccgggcaactaaccaaaagaaagggttctgtggttggtcgggtgcccacactaagcaaggggcgatactgcctttgcacccgtacttcaaaaaggttgttgattatttttgcctttggcttacccggttcactcccaaggcattaagtacttgtttgccctgtccgtcctttacgccattcaaggatggggtgtgccgtcccacacaaggtcaactggctttttgacttgaagtatacccctaagaagagcaggtcggggttcttctacttctctcagccggactgcaagtggctgacggacaccgtggacaaggatgttagcaagatcagggattttgttgacgagtactacttcatagagggcatggataccacatatactcggtttcaacagatcccagtgtactgccatccacccttcacattggcacttagggacagggcttagaagattctccaactgtcagatgatgctcaaaatatcactttgttgaccttggaggaaaactttgcgaagtacaagctttatccggcagattttgtaccccagcctatgaaggggaggaagaagtccagggatggccgggctcagggacctgagcaagagaaggagctcattcaacttaagcgtgaggctaagttgaagggtgatgctggagccaagcagtatgctcaggaatattctgagcaggagaaggaggctcaaaaatatttagagcaggagaggccgctcaagaagaagaaaaccctcccgaccgatcagaggctcatagaatatactatctggatcagggagtgtagtgtacctgctcggccatcaacccctatagagggaaaggggaaagccgttttggaggagcaggaagactcttcggatgatgacgccccatctgtgcttgttcgggcagatgctcatgccagcgtgtagagtacttcatcttgcatttatttttcttgattttcatgccttcatatattttataccttcttctgaatgtattgtttttatttcctgcagaattatctcagaagatgattgaggccttgaagaaaagagtagggggaagctcgggcttatcccctccgaccaagaagtccaaaggcagtgagactccgtccaaagagaaagcaccaattgaagaggtcattgatctctctgaggaacaaactactgtggaccctcctgccttgaaattcactaagtcaaaaagttcatgaggagggagttcagatggacctgagcaggcaaaggctagattcgagttggttagaagtggacttgaataaattaaggctcccgctccacctttggtactgtgcacggagaccaagagaggcagagacatgctcaaccactatgtgggccggtcgatcccagaggtgaacgaacaactgactggtgcggaaaatgacttatccttggagttggtcttgggaggagtcttgaaggagctttcgcgggtaagtcctttctaacatttcctttcattcttctttaactagttcagattttaatgtcttttttcgtacagactggtttgaagatggcctacgcctattcccgagctaagtcggctgctgtcaagaatcttaccacttccaacacactcaaagggatgcgcacttggacaaaaaggaggctgaagatgcgcggactcaacttgagaatgtgcgggtagaactgggagaagtcaacaagaaacttctagctgctgtgactaaagttttcgagctaactagggacttgcaggagatgccgtcaaccgagcagctcgaggcagacaatgcttctttgtctcaggatattgccagtcttaggacgaaagagagggtcttcggactcttcttcgcaggttggaggatgagaagaaggctaaggaggaggaacttgaggctaaggttaagaaccagaagtccgaggtggtgaggctcggggaaaaggtgaatgccttagagacagctggtctcgagattttttatgacttttggaaggccaatcccaatgcaaaatttgaatatcttggcgcttccaa

SEQ ID NO: 334396 - DNA, 651 bp, Cannabis indica
gaacccaatagcagttaaggctaatgctctgattggggtattagcaggactacaagcacaagtaagacgatatgttaaagggcttttacaagcttaatgtaatagattgctagaactagtagtgtaacttgaagcacgtaatgaaatgtaccaatagccaatatcgatgcatagaattcttcttgtccacgaatagttaaagatgcagtgtccacacctagttatgaaaggaagtccaacctataggaagtagggaatggcttaggatagtgaataatatactagactggatagggtattttatgaaactcacttattaagaaggatgaatgaatagacctataaggagcatgtactatcttgatggatattctatggatgcacactcctaagttagatggtaagaagtggaatatgtatgtgaagactttagagaaaagtctattatacaaattagtccagggaggactatgccatcatgtagaaaggactgtagcgtactgaatagaatctagaataagaagttagaaagagacttgatataatttctagaaatatgacttatgaaggtatcctgaacaccaagagataagcaaagcatcaacaaatcatagattaccaaaggagaagttgaaagcttcaaactcaagg

SEQ ID NO: 334397 - DNA, 749 bp, Cannabis indica
tattaagttagtttattaatacaactcaatatatgtaatacattaagggttcgtttggtatgttgtattagattgtattgtgttgtattgtattatattgaattaaattatatattatatttttatataaaactatattaaattttaatttatactaaaatattatatatgtaaatgtccataaaagtcattaccacatataattttacataaaaatattgcatgaaatataatttaatataatactatacaatacaatacgttctaatacgacataccaaacgagccctaagattgctactatttaaatgtcgtacctgtaatgacattatcacatttacagcatcatacatgtgctctgcttccattggctcacccacaaggttcgatggcatcatttctaacaaaaggcaacactgaaatatttgcaacaagtttatgttaataataaattattttgtttatttatcgggtatgatataatcattacataaatttaaatatttatatataatgcaggcgtggcacaaacaaggtctgttctgaggttctttctcaaaatttaaataaatgccttatttttcttccccgcccaaattttcccaaatatttaaaatatatatataaatagttaaaatataacatatttttggttagattctctcacaactcaggattagtcttgtataattgataagtagcataataacaataatacctttaaagcttcagcagtacaatcagaaact

SEQ ID NO: 334398 - DNA, 940 bp, Cannabis indica
tgatgcaggaggggtaggagccccgccactcactggagtcctaaccgactccgacatacatccaactgcgccctcagctcgcagtgctttctccaccatctcagcataggtggtcttgtcgtctgtggtgatcataagatcatgcttgatctttacattaagtgcatcaagatatttttccttcttactaaaatcggttggcacgattcccgaggccaatctcgccaactgatcaaactaggtagtgtattccgtcacactaatattctctctctgggttaggtgtgcgaattcttttatcttagcacttctaacgacctcattatagtatttagcattgaagagctcctggaacctttcccaggtcatggttgtaacatcgtgaatctgggacaccatatctcagtagactaaggcgtcctcttaaaactgaaaggtggcacacaccaccctgtcattcccggtgatacccataaagttcaaaattcttgtaatcaccattagccactgttcgactttcatgacgtccggacctcccagaaaaactggaggtgccttcttccggaacctttcatacaagggttccattctgttcgccgctaccactatctcggcctgagcaacaggggcaggtgccactggaacttctggcatcgataatgcaggagcaccctgttgcctcaatctctgaatctcatgatcttgttcctcaattctaacttgcatttcagcaaacctagtttcccaattctgggcttcctgattggcttgggcaacctgtggcgggttatcatcaccccgaccacgagccctacccctgggacctctaccacgacccttaacatgcgagggaaactgagctccttgaccctgatttgactctactgaattgccctgactcctggtgttccgcctggcgtccatctagtctgaacagcct

SEQ ID NO: 334399 - DNA, 588 bp, Cannabis indica
gggaaaataggtttgcagcaatgcaagccaaatgaggaacaagataatgaaattcaacgattaagatagcagggttctcctgcaatgcctgctctaaaaattccagtggcacctgcccctgctgtccagaccgaaccagtggtcgcagtgaatcgaatagaacctctgtatgaaaagtttcgcaaacaagcacctccattttttctgagaggtccggatgttatgaaagccgagcaatggctaacagtgattactagaattttgaattttatgggcgtcactggtaatgatagggtggtctgtgccaccttccaatttcaagaagacacactagtcttgtgggacatggtgtccatgattcacgatgtcacgacgatgacctgggaaagttccaagaacttttcaatgctaagtattacaatgaagcagttagaagtgctaggagaaaagaattccctcatttgacttagaaagaaaatatgagtgttactgagtacacaacacaatttgaccgtttggcgagattggcctcggggattatgccaactgactttagcaagaagaaaaatacatggatgggttaaatgc

SEQ ID NO: 334400 - DNA, 959 bp, Cannabis indica
aagtacacttcatcgctgattatcacatcagtataaatccaatgcactgatgaaacagggactttatcttttgaagcatataatcacaatcacattccactgtgttgacatcactgtaattgtaaatgactatatgttctggacttaatagattttgtatatatcaaaccacaaacatgaaaaatacatgtaaacataaatgacttctaatcttttattgataacaaatcaaattagattgaaatgggttttatttagggcataaaatcccaacatgttcaggtgggagtaaaatacgaatggaaacctgtagtctgtagtcattgctcgggtttaggccatgtagcagaggagtgtaggaaggataccaagggaaggcaggaatgggttgttaaggaagagaagaggcagaaacagaagattatagatgaagatggctttatggaggtgataaagaaatgcaaagctgcagagaaaactgctaatacagaagctttgaaagttggtaatgcgtttcagattctggatcaccatgatgggcagcaagataatgaatctgggatgttaggggacaagcaaaaggagagaatacaagaggggggggggaagaaacctcgtatttctaatggataagctactatgttggaacgtccgaggagcaaacaatcaataaaaacagggactaattaagcaatttttgttggagattaatttacctaggattactagatttactaccatagtatgttgtttaacatcctaatatgaatttctaaaacaatgaaataaacacataaaagttataagaaatcttacagtgggtgcagcagaattaaataactccttccgttcagatctctagcccttgattcctttctgtagcagagcattatcaagatcttaacttggatctctttctctccttccttgatttggattcttcacagtcttacatacta

SEQ ID NO: 334401 - DNA, 665 bp, Cannabis indica
atctaacgaaaccattatcatgggaaaaaaataaaaaaatggaaccacatttgcaccatttcagaaagtttgagaaaaacccttaaacttctccgtcaaggatcaccattaaatttgtctgaagacttgcatgccatccttgtccttgaccattttcctgcaagtttcctccgacttcatcttctcaaagtgatccttgcttcattcgaaggtttgcagacgaaattaccaggcattgccccaagccctaacttcaaacggtaagttgctttcttctttctcatgtttgttacatagtgtggatcagttacttgatttgtttgtatcgttaccatctcatctggtttttgtagtttttttagggttaaaactgttcatactaggattcaggcaatatgtaggttgttttaagatctccaactcattaccttctggtttgataaaattctctccagggattgggactgctttttgctggcagcaatgtcccacactagttcaggaatttatcgtccagaagttttagagtttgagtttcctacagaatcggccatcccatataaacccaacccctcaaaacccacctccaaattagagctaaatgatgctagggttagggaatacatagtgagaacccgaacaggaagatatttctagtcgctaca

SEQ ID NO: 334402 - DNA, 687 bp, Cannabis indica
aaataaagctttgtgagttgaatatagtttagaatttcttaatgtttcttcgctcaccgattctatttgtatgttaaaaaatattgaacatctacattaattatatttatcctgtttattagttttctctaatatgacgtttttctatttctttataggctttaaaatattgcaagctgttcaagatatctgcgacttctatcagtttcaaatacaatcaaggtaagttgctattagaattatttgtattattaggctatttactcaatatttgatatttttttaattcattgaattatacaaagattacttgtatgattattatattttcagtttgtttattgatattgattctatgccatatgtttattttcttcctattagctttgtaatttgaaatgaagagattgcacaatatgtattactattgtgttattggagatctcacaattcagtaaataaatgttagtttaataataaaaatataggcagccgaaatataggtatcccatacacataaatctattttgctatttgtgaagcaaaagaaaaagattcctattttccttcatattggaaacgttgttacattttggttttcgaatagcaatatgttaaaaaaatgaacaaaatgcaaaagaagagatgtgcttacaatgaaatctataatttcgagacattttagag

SEQ ID NO: 334403 - DNA, 1242 bp, Cannabis indica
atttaaggtgtgtatcggaccctgaagctaagcaaattatgctagaggtccatgaggggttctgtgcagatcatacaagaggcccaagtctctcaaagaaaatactgagacaagggtacttctggccaacaatgaaaaaagattgcatagactacgtccagaaatgtgattcgtgccaaaggttcgcgaacataccgagagctcctcccaatgaaattaccctgatgactagtccctggccctttgcggtctggggaatagatcttattgggtccctgccaacaggaaagggaggagtaaagtatgcaatagtagcagtagactacttcaccaagtggacggaggctgagccaatgaagactataactgctaaaaaagcactagactttgttatcaaaaacatagtgtgtcgatacggcttgcctcacaaaatagtctctgacaatggaaagcagtttgactgcgaagaattcaccgacttctgcaaccaacacggagtcgttaaaagcttctccgcagtggcaaggccgcaaacaaacggacaagcagaagcggtcaacaaaatcctaaaggtcaccctaaagaaaaagctgctggcctgcaaaaacaattggcccgaagaattgccaagagtgttatgggcctaccggacaaccccaagaaccacgaccggccactcgccattttcaatggcgtacggttgtgaagcaatggtcccggtggaaacgttattcccgtcccacaggagaacaacttacgatccaacaacaaacaaggctttattacaagaagcgttggatcaaattgaagaactccgggatgagtctcaaatacgaatggcagcttatcaaaagaaggtgactaagtactttaactctaaggttaaaagtagaaaatttactattggtgatatggtcttaagaagagtcttcccagccactcaagaacccggagtgggggtacttgggccaaattgggaagggccatatgaaattgaggatgagatcggctccgggacctataagctaaaaagattggacggaaccattgtgccaagggcctggaacgccgatcatctccggaagtattaccaatagtccaaaaatgtaaacttaggctttgttaagagaatttgtaccgtaaagtgtatgcaacctctaaattttgaataaagttgagtgccttaaaaacaatgttttcatgccactcaggggggtactaaggcataccacacggacaaat

SEQ ID NO: 334404 - DNA, 1036 bp, Cannabis indica
tttttttaaaaaaaaaaaagtaacacggtatgcactataaaattcgggttttctcgtacttagagtttgaggtacaaaacactgatttatcactagtagaattgcactgtgtaaagtgttatctttatgtgtatttcatatttccattaattacttaaaaaataagagctacgtttcaactctttctcaaattatgttgtttgggttattttgcatgatcaactaataaagaacatgggatattacgtgaaagattcttttttcctttgcagaaaaatatgcattggtttcttcatggacttgtccttgctttgttcacctacaagttttttccgtatccttttttatctatcatattattaaacttgggatatatgtattgtagatattagtatattcaatgtgcaattccatcagaatcacaattcgagttattgaaaattataaggaactaaataaatgagtgctgaacaactgcaacagattgaggaaaatcagcaagagtaagtacaagccctagatccagagagaggaaagtaagaaacatacggaaacggaagtatcgtgacggggacgatgagacgttgaagaagaacgagaagtgaatgaattgcaatgggagacacgaggtccgctctcggaagggatggagtcccaagaagtggcgggaaggcatggatgttctaggttgagattctgaaatagagatgcagtgaaatcggagttgagaaccgccattgttggatactagagatgaagttagtaatgaagtggaaatggcatggctaagggaggagtgcgagggagagtgaaggtaggcagcccagaaatttagagcagactgttgatgtatctcaaatcacccctcaccaccatccatccaccccgcccaaaacaaatgctattttaaattataatatttttatttatttttagttttttaatcacaacaataaaagtatatttattatttttaaaagggatattggcggctaaaccacctaaactttacggtttgtaacacttaaccaccaaa

SEQ ID NO: 334405 - DNA, 651 bp, Cannabis indica
aaggtaatttcgtactgacccagctccactgcccacttgagtagctgtccagaagcttctggcttttgcaatatttggcgtaacggttggtcagtgtacaaccaaacaggatgagcttgaaaatatggccttaactttcttattgctagaatcaggcagtaagcgagtttctctatcaatgggtatcggccttcagcctcaatgagtcttttactgacgtaatagatcgggtgttgtatgttgttttattctctgatcatcatgacacttacaacgtactacgtaacatctaagtatattccaagttcttttctatccaagggttttgagagtacagaggttttgcaagttgcatttttagctcttgaaaagctttttcccattcctccgtccacttgaactgtttatttcctcgcaggatgttgaagaatgggacacacttgtttgttaattttgaaacaaatctgctgagtgcggcgatcccaccagtcaaccttcgcacttccttggttcttgttgacgacttcatatccaggacggcttgaatcttctctcgattggcttcaattcctcgtgcgttgacaatgaagcccataaactttcccaagttggctccaaaggagcactttaagggatttagtttcatgttgt

SEQ ID NO: 334406 - DNA, 624 bp, Cannabis indica
gactcctcccatcaacagctctagggatgattcggtgtcaacgctggccagctgatcactcacctcatgaacaaaccagttcatgtagtgagtgagcatctccttgcctctcttagcctctggatggactggcgagggtggggtaggaccccgcatctcctcaaatccgctcttggccagctcggatccgccctttctactatccaggcctgtctgagcttcctccttgagaatctttggacttaacagttttcagagcaaaagggtccgtgacagttagctcctcagaaagatcaataacctccccgaccggtgccttctccttggatggggtcgcctcaccgcacctagatttcttggccgggggagatgagcttgagcttcctccaactctctccttcagagcatcgagcatcttttgagatatgtctgcacggaataaaagcaacatggttagaagaaaaaaggcatcagaagcataaaagcatgatactcaaaatgtttaaaaacaagacagaatatcctacgcttcatgagaagtgtttgtccgagcaagactcgaaactcgatcatcacctaacaagtcttttacctccgccatgacgaccttcccttttcctagta

SEQ ID NO: 334407 - DNA, 618 bp, Cannabis indica
caccatggcacccatcttgaagagttgggaagaactattgccctcactaatccatgcaaccagggatttttcacttaataaccagatcatggcgttagcaaataaggagatcaacgtgcttccgaatatgcatgcgagtcgagccactcacgacttagttccgaaggcagcaatcaggtacatagcgataaaaacgtactatattattaaaatatgctttacattgtactaactttatattttatgttgcatttagtggtgattgtagcgtttattgcattgagtatgtggagcatctcatgatgcgacgtggattaactgatatcacacaaggccggatcaagttgtttcgtgaacggtggtgtgttgatttgttttactagaatgttgactgattatatgtgtaattatggtgacattgtatattttttgtaattaaaaatacagttatatattctgtttacttaaaaatatttttttagtatttagtcttgtaaagtctaacgttgtctcagttcttcatagtaaatttaacatacttattcttagtcttgtaaaaatatttaacattgtctttgattcacacaaaaaattatcaacctcaaccttattttaaag

SEQ ID NO: 334408 - DNA, 778 bp, Cannabis indica
gcagcctttttcttattaactgtgttaacagcttgaagaggcttcttgctattcttccacttcttctttttgatggggtttcaaagcagagccaatgtttacctcagtcattggccgtaccattagtagtgctagaactaggagctttagttcctcctttctgtggtcctccaatcaaattttgaaatgtctaaagattgttgattaactcgtggaattcaaaatccaacttgttcatgacataatttgatgtaaagggcagaaaagctggagtcaaactatttaagatcaaactcacttgagttgtctgatctataatagctccatgattctcagcctcttggaagtaactagtcatctggagcaggtgatcacacacgttctaatgagatttcatccgtgcattaatgaaattcttggtcgcctcaaaataagcttgaattgacgccatcccaaacagttcactcaactggttcatgatatctacagtcgtgacagtattggcaaaccttgttttcaaggcgtcaaccatgctagacatcataaagtaccgagctttgttgttagcattccgtcaacgctcaaacttttccttgactgccttggtcgcattctcatctagctgctcatgagcctcttcattcaacacaaacagggcattttcaccagtgagagcaatattaatgttctctctctgtttgacaaagttagctccagagagcttgttgtcagtaaacagtgacatcatggggttgttcatagtcatagtgtgtactac

SEQ ID NO: 334409 - DNA, 844 bp, Cannabis indica
atctagtttctaactttttcaaacaactagtagatgagagacactttctatagtaatttgaaccctccttcattgttctttaaccaattcgcccttagtgatagagtgccatgcccacacataccaagtcaagtagtcaatcaaagtgagtaagacggtggtaaccaacacgaaggagagaaagtgatcgaggcttagatcttgataatactctgcaacaaaaaggaacaagggttatagatctgagcggaaagagtcataatattctgctgcaatcaatgtaagtttttctataactcttatgtgtttaatttcattattttagagatattcatatttaggatgttcatcaacatacttgttagtaaatctagatcctagttaaatattcccaacaactgatatgagagctattgtaatgatttattttcatgaaatatggatttagaacaatgattgtgatgatttggatttgttcatgttggtttatgtgcatatttgatgattgtatggaaattacgtttacaatgataaatatttttagcttcgttctgaaagtatttttctggaaattagatgaaaaattaataaatttatgcttttacagaactcaatttggattgtttatgaattagttatgattttctaaaatttgaatgcaaatatcacaacctgacacacacccatgcgcgtccgaacaaaggcatgtacacggtttcggacacacgctgtctgaatgagcaactgacccagatttaaccctaagtaggctgccagcagcctcttttcatgccaaagtccctgtaaagcccgcttagttaatttggaaattagcagttgttta

SEQ ID NO: 334410 - DNA, 1715 bp, Cannabis indica
tgccttatgtaattatttattttctttattacattgcatttttgtggaaattgcattatactcactttactttatttatttcaatttttaccttcatttctatattcttttagatatactcacttttatagatgatgtccccattataccccttagattaatgtaaatcatgtgctacacttaagtggatggcaagggtatattaagcaacccactcataaaagttggtagattttagtgaaatataatacgagggtatttttgattaatggatacaagaaaggtatttctcaacttatcccttacattttttatatattacaaatttacctttttttgtgggatttttacaccacatactgaaatttttttcaacttttctaccttttaactgtggagcagaatttttttaaaaaatattgtgtaagttttatactgtgtattgtgttaaattttcacaattgttttttagttgttccactgttgttttaattattctgtttgttgttttacggttgttttataaaaagacaatatttttgtaaaaaattatctgtgacagtaaaattgtaaactttcatccaaaatccagtatttttgtaaaaaattcttttctttctctttcttgttcctatgagtagattataaagcctgcttttttattgaagcgtttatacataccttagattgcataatctgagatttaatccctagatctcacacacacaccctcccataccccttataccctcccataccccttataaccatttttttttaaaagaacgacaagttcattaaacaacggaaagatagtcgggaatcacaaggaggattccctccccttgcaccaagccagcgttttggctagacaatctagctctctatgctagctcatcaacaaaaccattacttgtgcgactaatatgaaagaaactacatgtcttaaataacttaattatgtctaaaataactaaagaaacattcagaaaactccaatccagtgggcatttttttgttgcaaaagcttcgaccaccaccttagcatccgaaaggacatgaattttctcccaaccactctgtgtagcatgttgtagggccatcaataaggtagaggcttctgcttccatggctgagcccgccttgctatgacaagaggactgaaaccagatgcctgactcagtgtcaataagaacagcacctagaccagcctctccttcacaccaggatgcatttgtcataatcacataacggcatgggctaataatacctcgttgcatgatgtaagttgaggctgtcttagtctctgtatcccagaattctttaaaacttgaagataacttatgcaccaaaacatttatgttttcagctttcccatgtattctaacaaagtttctctgctgccaaataagagagaatacacagccagcatagaccaacatatgatttcttgaattttctgaagctgagattagattttccaatacctgggccatgtttgctcccggcattgagtgtatcatccaaggctcaggacccgcaaaccaaatcccacgggcaaaagtgcagtctttgaacaagtggttgtttgtttcctcaaaatcatggcagaaaggacaagctttataactaaggaaatggagattgaatttgagaggaagggcgttattaagcactctccacaacatcagagcaattcttggatgtattttaga

SEQ ID NO: 334411 - DNA, 948 bp, Cannabis indica
tgtcacccacaagttcaagactgatgtatgtaacacgcaaatatggctggccgcttacgcatggtcgaagagggaatgtgatagacatttacaggtgcttcaacagatggatcctgccatcgctgcttatgttgagagtataggattggaaaagtgggcttgtccttattgtctaggagacaggtataacatcatgacaaacaacgctgtagaaagcctcaacaacgtgacagaagaattccgggcatatccaataactactctagttgagttcataaggttcacactgcaaaattggttcgctaaccatctcaaaaaagcaagtaagtgcgttacccctttggaaactcattttgaggaagatctgataaagcaacacgaggatggtagacgtagaagtgtcctacgtaacggtgcacaattgtttaacgttggaagaggttctgacagttctaactttgagaaaagtggtgatgtgaacttagttgagagaacatgcacatgcggcatgttccaattgttgaaaattccttgtccccacgcatgtgtcgcggcgcttacccagaatgtcagtttgtacgctctgtcctccccctattacacaaaagagacgtggaagaatacttacaatgcaacaattaatcttgtcgacgaggaggatgaatgggtgcttccagaacacatgcagaacatgagagtcgacgtaccagtggagaagaaacccgtaggtcgttcaagaaagagcaatgcatgaagaacacagactaaccgatttccatctaacagtcaaaaagtgaaggaacctcgcaaatgttcaaactgtggcgcattgggacacaacaaagctacatgcaagaccagggtttgagcatcattttcgaattttaattgcatgcattactaatatggtttatgaaatctattttgtagttttttgtgtctgtgtat

SEQ ID NO: 334412 - DNA, 1779 bp, Cannabis indica
attttgatgtgttgagctttcatccctcgggctagtttttacgccaacgatcaaagcttcatattcggctttatattggatcccttgaatccaaacttgactgcagcgtgcaggtggtcccccccaagtgtaacaagggtgattcctgcactagatagttgatctgtagccgacccgtccacatgtagtttccaagtcggcctgtcttcgctattacttggctgaggtgttttactggctcggggttgccttccgatatgctttcttctttacctgtgcattctagcacaaagtctggtagggcctagcctttgattattgttcggggttggaaggtaattttgtactaacccagctccactacccacttgagtagccatcaagaagcatccaccttttgcaatatttggcgtaatggttggtcagtgtacacccaaacaggatgagcttgaaaatagggccttaactttcttgttgctagaatcaggcagtaagcaagtttctttatcaatgggtaccgaccttcttgctcaatgagtctcttactaatgtaatcgactgggtgttgtatgttgttttcttctccgatcagcacgacactcacatcatactccgtgacagctaagtatatcccgagttcttctccgtccagaggttttgaaagtacgggaggctttgcgagttgcattttttagctcctgaaaagctttttcacattcctctgtccactcgaattgcttatttcctcgcaggatgttgaaaaatggaacacacttgtctgttgattttgaaacaaatctgctgagtgcggcgatccgaccagtcaaactttgtacttccttggttcttgttggcgacttcatatccaggagggcttgaatcttctctggattggcttcaattcctcgggcattaacaataaagcccagaaactttcccgagctaactccaaaagagcactttaagggattaatttttatgttgtacttgctaaggactttgaagcattcgtccaagtcatctttgtgcccccaaccttcctggatttgacgagcatgtcatccacatatacttccatgttccaccctatctcgtctttaaatatcttgtttaccaatctttggtatgtgactcctgctattttttagaccaaatggcatgactttgtagcaatatagacccatatctgttcggaaacttgtatgttcttggtctggtagatgcattttgatttgatagtacctcgaataagcgtccgtgaagcttaatatttcgtacccagctattgcatccacaagctgatcaattcttggaagttgaaaacagtctttgggcatgccttgttgaggtctgtgaaatcaatacacactcgccatttcttgttcggcttgggtactagtacgggatttgcaacccaagctgggtagaaagcttcaattatgaaattgttaccccaaatttggcactctgatgtggcatcacgtaaatggtgacacgtggaatccacttggagcatctgctcagattgatagaccgagcaggtcgcctcactgacacatccagaatgaattattcaacaagccgtgaagggtgatcaacacttagcaaattcagctttcgcatcatgagtcatcagcttaatccctacaactcagggatcaacttacgtggatgtggcatacacacgatcccactatcaatgtactcagcctcaatcccacgatccttgcattcagcattaatcacacgatctttctgtttatgcgcattgtaacgaga

SEQ ID NO: 334413 - DNA, 1889 bp, Cannabis indica
ggagaagcagctttaactgctatttatttgatcaatagaagtccatcaagtgcaaatggattcaaaactcatgatgaaaaatggtctggtaaaccccctgacttatctaatcttagagtatttgggtgtgcagcatatgcacaccaaagtattgggaaactagaacctagggctatgaaatgtgtttttctaggatatcctgagggagttaaaggttatagactttggttttgggaacaaagagggtttaaaactataaatagcagagatgctatatttaaagaggataattttccatgcttgcctattacatctaaccctagtgcatgtgcaaaagagactaatcatgcaggtagcaacactgaggtcagaactggatctgttcaggtggaacaaacaggaaacacacctaaatagaagtaggaagaacatgttcaggtggaacctggggaccaggttcaggtggaacctgatgatgacaacactggcattgttgatgaagggactcaagaagatttgggggattaccagctaaccaggaacagagacagagagtaccaagacctaatcctaagtacagctttaatatctgggatgaagacattgcatatgccttcatgagtgagttggatatggtcaataatgaaccccaatcttatgaggaagccattaaaggaccaaattccagaaaatgaaaaggtgcaatggatgaagagatggaatctcttgagaaaaataaaacctggattgtggtgcttaaacctaaagataaaagtgtagttgattgtaaatggctatttaaggaaaaagaaggtagaactaaggaagaacctataagatataaggccaggttagtggccaaaggatttatacaaaaggaaggggttcattttaataaagtatttgcaccagttgcaaaatacaggacaatcagaattatgctaagtctagctacacagtataacatggaagtagactaaatggatgtcactacagcttttctatatggagaacttgaagaagagatctatatgagacaacctaaaggatatacagaaaaggggaaggagaactatgtctgtaaactagtaaagtcactctatgggttgaaatagtcacctagacagtggaataaaaggtttgatggttttatgctaaagctggggtttttttaggagctattatgaccattgtttatactataagggaacttatataaataaagtcatatatctacttctatatgtagatgatatgcttataatcagtaaagaaagagcaagagtaaacaccatgaagggcttactcaaaactgagtttgaaatgaaggacctaggggaagcaactaagatactgggaattacaattaagagaaatagagcagaaggaactcagtctaactcaggaagattacatacacaagataattgagaaattctcaatgaaaggctctaaaattgctagccaacctataactacccagtacacattgtctaagaaacaatgtccagagagcaaggcagaaaaggaggagatgagcaagataccctatgctaatgccattggatctgttatctacctaatggtaagcacaagacctgaccttgcttatgccattagtgtacttagtagattcatgacaaaccctagaaagacacactggcttgctatgaaatggctactaaggtacttaattgagacaactaaactaggacttaaatataagcaacaacaaggacatacagctatagaatgcttcagtgatgcagactatgctggggacagagacagtagaaaatccacctctgcctacatactactaatggggggaaactgtgtgagttggaaggtgcaactacaaccagttgtggcattatccacaactgaat

SEQ ID NO: 334414 - DNA, 909 bp, Cannabis indica
aaatttttaaaaatattttctcgagcaacatcaaacaactataagacagtgctttagcaaagatatctttctatttgaatcttgcatagtgaatacgttttagattttactagagtgactcgaagtcttgaactctatctctaacgtcgtaccacgcaccaatctttcaagggtgtattcaaataagcccgtgcattaatggccatgcacgtctatcccagtatagtgaacgctctagaaattttgctacaaattccataggaagcggcctcactcccacattcacatatgtgagtctatcaagagtactcctatagcttggtactccactccacatagagtatagatctcattaagagtttctattaactcatcctcttatcggttcaggacttcatgcttctcgtataacaatagcatgatcaacacatatcacctcataacttgttatttcccgttgaacctaattcttgggatctccagtcattaggttgggttaccattatgagtgactcatctttctaagggcaatagtgccattcctttcaaagttttatagactttctctctagctagtcctttcgtcaaaagatctgctaaattgtcatcagtgcgtacatgatccactctaacagctcctggtaagaggaactctctaacagtgttgtgcttacgacgaatttatcatttcttaccgttgtaataacggttttggacttttgcaatcgccgtggtactatcgcaatggatcaacacagctggtatcagtttttcccataaggggatctcagctagcaggcttctaagctaacttgcttcttcactagcagaggctagtgctatcatttcagactccatggtggactatgctaaaatagtctgtttctttgacttccaagatacagctcc

SEQ ID NO: 334415 - DNA, 632 bp, Cannabis indica
actatacttaataagtaaatttttatgaaatttcttatgtaagtataactatggaaggttatctatgaaactaaaagccaagtgataatgaaagattcatctttaggggcaaaagtgaaacatctacagatgaggttataaggatattcaactatgattaaagattagttattttggatttggaaaagacttatacaatatcatcacctagatgagttttggttttgaattctattttgaataattaggtcattcttgttcatttagaatttgaaaaattagtctttttccaatatttcaatattggttctactagttctttaatttataaatttattgaaatttgcctcatataaagaaaccttataatttttcttctggtacaaaacataaattgaatcatgagaattctattatactttggtataagtattaagattatgtctcccaaaaagagaatataaagacttatttttaatagaattcttaactccttgatttaataaattttagattttgtaaaggggtaacaaacaaacataaagaaatcaagtaaaaaaataaagtttcattatctaagaatttttgctatgttttggtggatctttcctcatggtttcatggaatgatca

SEQ ID NO: 334416 - DNA, 393 bp, Cannabis indica
tttttttttgtattagaagtgcctaacaaggtgaaaccttagaagaaacttggggatcacacgaccacacatgacacaacaactcaccaaaagaacatgatgcgattaagtacgaatggaaccttaatatcatgtgatctaaagattagctcttcttggggcttaggcacacaaagttataaaattaaaatgaaaataagaaagggaagcttattagaaagttccactggaaaccttaaaaggacctcaaaaagataaaaggatgtcattaactcttaagttatatttggttggaatgaatagaaatataggaataggaatgagagtgggaatagaaataagaataggaatagagtaaaatttaaaatgcataaaaatgttgggttttgtgcc

SEQ ID NO: 334417 - DNA, 577 bp, Cannabis indica
tttgtttttaatttatatttcagtgttttaggaactgatttcttctttgtttttaattgtaatcggtttgagttattgcatgttacttgtttgtattgattatgttatataaccagttttattttagttataaccggtttgagttatttcgtgttatttatttttattcattttaattctgttttggaaccagttatattttaattataactggtttgagttattaatttttattcatataaccgattatatttttagttatatttgagacatttactttggtgacttttccagcgacgttgacttttctgttgatttattcggcaacgttgacttttctgttgagtttccggcgacttttccgatgacttttctggtgaccgtgatttttccggtaactttttcggtgccagtgactttttcggcgactttctcggtgccgatgatttttgcggcaaatcttattgttgttttacaaatatggaatttctactttttctttacaaaaatatgacatgaaaagaaacccatataaatgtcaaaaaattaaaaaacccataaccgtatagtgttattt

SEQ ID NO: 334418 - DNA, 498 bp, Cannabis indica
aaaggatttttttgcttcctttgtatatggagctaatactgtagaaggaaggaaagatctttggtctgctctttcaaagatcaatgtaactaaagcttggattattcttggagatttcaatgcggtgttcaaccatgatgatagacaaggggggaatgcggtcagtgcttcagagcttgaggattctaatgattgggtggttaactcttctgtagggccgatgaaacggactggatcgaatttcacttggactaataaacagaatagtaggatcttctcccgaatagatcatgttttccataatgaggattgggttgatgatttcccgaacacatcagctcacttctcttgggaaacttgctcagatcattgcctttgtgtgattcattcgaatgccactgagcttattggtagtaagccatttcggttttttaatttctggaccgatcacccagattataaaaagacagttatggatagttgggggaagcctttgag

SEQ ID NO: 334419 - DNA, 750 bp, Cannabis indica
ctctttatatcatagaagtaactgaactcttctaccgtgggtgccctatgcacatactccatatacatcgcatagaaggctagggctgtgcgataactgttaggggttaattgaaagggagacacgtcataccgcttgagaatagccgcaataaagggatgaaaaggaatcgatactccacatcgaagaatgggtattgagactaccacatcctttgtgggaatgatcgcagggttggtaaaagagaggtgtgctctctgggtaagcttaggacgtaaggacgcgagtcgcagaaggtttaacctcgtgaaagtggtaagatctgatttggtgacccgtgagacaaagtcctcgcacgaaaaggggtcgttcaactgagtgttgtccaccgaatcagtcccacttccctccgcatcttcttcttcctcacctgactctcgagctggggccgtctaatcatcgtccatctcttcgacctcgacgtcaggagcatgcctggaatggacaagatgatcacgcgctgacaccgtagattcactgtctcggatctcaatggttcctggttcagagagttcctgcaccatcctctcaatgtcagcagaagacatcgggcgtaattctgtacctctggcagttgcgatctcctcttctgagatcgaggtcgggataaaactatcttcccgttggtcctcatcaccatcaaacgcgttgcctcctgagccaagcatcttgctatctgacaggtcgctc

SEQ ID NO: 334420 - DNA, 765 bp, Cannabis indica
agcctgagtcatggtaaaaaagttgtcccaggttctgtttagtcttcttcttaggttcctctttcttggcctgaggacaatctctgatgaagtgactcaccatgccacactagaaacatgccttggcccgaaactcaccctgatggtgcttcttgcatttaggacactcaggataagatcgaaatgaagatctgcagctctaacagccacctctgtttccctgaaactttctattatctcttgatgctccggaagcttcagccttctgtttgtgatcagggttgccactgtcggtccccttacagtattaccactagcaggagggttcaatgtcatgacggcaccctttgcagtctgctctttggttacatgttgctcaccctcctcagctattaaggctagctctaccactttcttgtacaaagttataatgactgctttagtaattcagattagtaaaggcaattagcactaatttctgattttttataattatttatgaatttaattatctgtggccccattgttagaaatgggcattagagttataatttctcaattccaaagattttattaaactctagaggtattatttgacttatatgtcaattatgcaatttttgtaatttttgctcgacgacaatgaaaaatgtgatggatggctagtttgatcacatggataagtctagaaccttatttcttagagggatgtatattggagaaaataaaataccggggttaagcggggttatggaatttgaccat

SEQ ID NO: 334421 - DNA, 740 bp, Cannabis indica
aagatcttttcagcgtggtgaatgtgtgaaaaataaagtaagtgacctcacccgcatataaactataaaatcgtcttgggaggatgatttgaattctcccgaaaactaaccatcctaccaatatgcgaaaagataggtgtgcgagtagaaggatatctcaaaaacggctgggtgtatcccagtgaccgaagcgacatgcgttttttagtatgggccagaagtaactgggagacacccaccgttttgaggaacctaactaatcacaacctgcgagtgactcaagaggagaatgatttgaattcttgcgaaaactagcgatatacctcaaaaaacggctgggagaatctcagtgactcaaggggcatgcgttctcaagcacaaccctgaagttattgagatactctcaccgtttcgagaagatctgccagccaaagagtacgcttatattgtaacattggcgcatgccacaaatggctgggggtttcacagtacttcaaggaacatataatcacatatatgaacattagaatactgtgacacgcccaccattcgacagacttagccagttctcgcaatagaatacacatcgcacaaagtcctaaggtttaaaacaacgactaggaatagtaaagtctctgtgaaacctaggacaaaccgacatgcgagtaatcgaagtgttcatccaaatacccgcgtgtattcaaaagataaagatgcggttatgttgggttttgtgccct

SEQ ID NO: 334422 - DNA, 616 bp, Cannabis indica
ttgggaatgtcgggaatggtcaggaatttagagtgttcccaaaataccctttagtgcttttaaatccttttagtatcggaggggcaaaatggtcattttgctccataagcctttgtcctttagtgaacttaatatttggtgattatgtgatttatgttaggtttatttggctgaagtaaataattaaaaatcactttgtcactcattttacaaaattggaaaaaaaaaaaaaagaaaagaagcaaaaccatttcctctcaagctctctctctctttcggcccctctttgagcagcaaagatttggtgttttccttggtaattcaagctggttttaacaaagatttagtgatctcaagttgttggtaagattcttgtagcttcctctttgttttcttgagttttaagaaaaatatgatagtttgcatgcttggtaaatttgatgttgttgctgctgtgtttatgtgatgttttctgtagattaaatatgttaaattgagtgggttaaaatagattttgatgcatgttagttggatttaactaagttggagttttgaactcaaaactttggttttcatggtaaaatgatgagttttgttgctgcagctgctgctattg

SEQ ID NO: 334423 - DNA, 1098 bp, Cannabis indica
tattcaatggatggtatcactgactctcgcctaaacgggacactgatatcagtttgttgaagacattggaaattatttaggattgtataatttagtattttcgcttgtcattcctatttgctaaatgcttaattatttctgaattgtctgtgaatttatattgaaccatgttattttctgttattaattgtaatttaatttcgaatcttcattgttggtctaacttggcttgttgtttttaatgggacaaatccctaatggattgccatccattagacaaacataatagtgttagatctcgatagataaatatttgtacatgcaacatctagttgttcatcaattgacgataccttagactagtgtttactatatgaaacaatgaagaagtttataaaaataagaataactttgactctcgttgatcgggacgtcgttggattcttattttaaactcgaaattatcctttattcttcttagcttattcatttcgaatcagcttaaatataatatcattggatgaattgtttataaatcatctgcctataatgtcattccactttctcttaagaaatcgaatggcgcaaatgactatattcccgacattctatcctgaaatgatataagtcctcgatcctagaaatctcctacttatgcttaatttaggcaaattaaactaagagttagattagtagtggtggttcaagaaagaatcattactcattgtatatttggtataaatttaagcctttgaatttaattttagattccaaatcgaaactttatatttctaatttccagaatacagtacagtctaactttcacaagtgtttaatatccattttctgtcaatggattcaaactgtatgttaatatggaatatgagtttagtattctgtgaccgaaatccacttggactattctaagaactctttattataactagacctaagtcatcaaaagaccacaaccacattcttatatagatctatggcatttgtatcttgtttataggggttttgataagatcaatctctgcaaagagtcaatatgcctatatccactaaaaagtaatttcatctcattcgaagatggat

SEQ ID NO: 334424 - DNA, 767 bp, Cannabis indica
atccgtaaaaaaattaagcggggcgggtcggatctgatccaagatccaataactatccgatctgaatgaatggatctttttgccatgcctacctttaatagctgaccttggctgatatgttatttcatatatattgccccgggtaaatagtggcataagttcccaaagtttcaagtttgtaagtggcataatcccaatatttatttttagcggcataagtacccaatgtttataaaactgtaatttttctctaatttcgtcattacaaactatgttattttcttaaataggccacatataaggtccagattctagatcattgggtatagacagaaatatatagtatcagttacttccaaatgttcctttaataaattcaaaacggcgtttgtaccgacaaaattagaggaaaattacagttttacaaacattaggtacttatgccgctaaaaataaacgttgggtttatgccgcttacaaacttaaaactttgggtacttatgccgctatttacccttttgccccaactctattgcccatttaaggaggcgtctcgatgtatcgtgtttttgtagcacctggcataatggttggtcagtgagtaccgcaatggggtgagcttgaaagtagggtcgaagcttctgggatgctaagagtaaacaacaggtcaatttttctatgaaggggtatctacactctaccccaatcaacattttgcttacatagtagactaggtgatatactctatcttctgttgggttttatgc

SEQ ID NO: 334425 - DNA, 742 bp, Cannabis indica
gaaaaatagtggaagccggcaagttcaattatataaggcagaacttaaatccaatttttgatgactttgaaagtataattggacttaaagctaaacatgaaagttgtagatctagttctcagcttttcagacattttgaatcgtccaattccgagttgtattgaagaatttatgaccaaatactaatctgaacactcgacaaaaaattttcggcaacaagtcatggccaggataattaagcttgtaattttttagtgctcatgtttaatgcatgcttttagaatcccaggagtgaggttggattccttgctgtattgacttgtaccaaatcatgtctttgaatttttgaggctattaaaagttttcccaaactattgagattattgtaccaaatcgtcgatcgggttactattttttttaaaaaattggatagcttgcacttagaattttacaaatgtatatttatattgggttagaaaatttgtagtataaactgactaaactgaccgatgtacaatcttaatttgatacaagtcaaagttaatcctaattaattttttttaaccaactaacattttatgaaactctgaatgaaaagaaaatcctaatatttaagataatttattatatttacaaaaccctaatacttatttctctttttaggagcaccctaatatatatatatattttttttaaagaatttctatttattatgatgaaattattacatgaaaatataact

SEQ ID NO: 334426 - DNA, 1259 bp, Cannabis indica
ataaaaaaatcttattaaaatttgtaacatcataacacataataatcatcaagtcattatattgaattatctctaaaaaataatataatatataaatatattatatatatttattcttatataaaaaaaagaataaaaattagtgtaattctgaaatatatagtgcggtgtagtttgaactgtaattattaaatttaaaactgcaaactacattacactgcgtagtttgataaaaatacaaattataaacacaccgcaaaaaatttaaaactacatttttatgcggtatagtgcggtacgagcagtttgtacagtataaacgatttaatgaacaccctacttggcaacttcctccaccgaccatttgaaaagtgttgttaatgtttaaaattgccattccaacggctactcccaccttaggagcctcaaaatctgccacctattcatttcttacaaaccaatatttaacaaaccaatttcttttttttattactttctcacctactcattatttattagtttggtgaaatttaatatttttattttttatttgtgaatgaatcgacaaatttgttaagagataataaaaagaatgttcctagttattacttttaatcaaaaaataaataaaattagataataagtttttatcaaggcataaataattttttataattattattaaattataataatgttagaagacataaataattttagagtaattggcggcaaaactcttttatattttaatttttaagtttttggcagttaaatcttctcagccatcgtttcacttgtacttaaccctccaagctcaaattttggcagtaaaaccttccaaactactaaactgttagcaaatgtaaggtgtaatatggctaattgacactgttgattatttatgtgtacactcgtgtacacgtgacacgtttatattggtacacataatattattatttcaaaatttattttaaaactaaataaaattataaaaataaataaatatttaaaaataaatttttataattttaaataataatattaagtgtatcaatataaacgtgtcacgtgtataagagtgtacacataaacagtctatgttagtagttaactataaaaaatatatgacatcttaaatttactaatagtttaatagtttggagggttttaacaccaaaatttgaacttaaaaagttaagtgttgctataattttaaacactacgcaagtatacgcaatcaagtagtaaatctcaca

SEQ ID NO: 334427 - DNA, 949 bp, Cannabis indica
ggacttcaaatgggtggagttggctggatggaactacttccaaaagagccaaatctgtcatccaaccgaagctccccttgtcgctgtccacaacgccatcgtgggatgagcgttgttagatttgagggaccgaacacgggtgcgccaaaccctccaacaaaatcgggacgcaagacggattcataacatttgagttccacttaattatgcctagttgcaattttgtaatggtagttggttgttcacttttattattggaaaattgtaatgttgaatactttattctaatgaagatgtgaaaaattgtaatgtggttcctacaaattaattagcaaatataaaagatttctttattctaataacgtatttctacgtatgtctttccaaccctaaaatcaaatttcatttggaatagtactttgaatattgaacctcctacaggcagagaaataaattatatgaaaatatgtttggaacgtatttcaatgtacgtcagaagctggatctcccatatctcaataagttcaagtttgaaaataacgtacatcaatatatgtgcagagtacttcacatcgtaaatacagtatggtgcaattatgtttactcaatatttgaatataatgagataatgagatttcttttcaaatgtaaactataatttcggacatatttattcgtacaatactttattttaatacagtttaaaccatttcctatttaggagttgtactaattttggactactacccattcttaatagtccccgttcttaagttgttgggaattatttaaaaattgtccaaataatgtaatcttcttaaccaagtatggactatttgctgtaattttaaattgtagatactcactaaaaaaaccagaggatgtcttatcactatttaattttctgtgtacgtcccactgtgtacttactgacgttaaatggggtatt

SEQ ID NO: 334428 - DNA, 582 bp, Cannabis indica
ctgcagatgggtcaacaccagactcatttggaactgcagacggtgcacgtggtggagacggtggaggtggtgtagagtctctaaatatttggactgcgtccgctcgttcttccaatgtggagcggcctggcttcgcaaagcatcctgtgttggttgcccatcctcacccaacacaagttcctccaagtcaacaaataaaggctgctgacccccagtgatgtaacttacaaactcaatctcattcgggcggggacataacatggagtaaactgtcaactgaaaaataaaacaaatatattaatagaatatatggaaattaacatgaattaaacatttctagcaaataatcagatcactctcccagttcaccattcttggaaagcgatgcgacttcctcactgcatactcgttgcccagctccaagatggcctcgtatgtccaatactgcaacgctttagtatagccgtaagatgagtattttgcctccttctgagtaactcccttttcaatctttttcaacatcttattcttcacatccaagtagtcattattacaagtttccatcagcttggtgtaagaaat

SEQ ID NO: 334429 - DNA, 551 bp, Cannabis indica
gtcagtttatttagttctcggtattgaatacacatatgtagggatctgtctttcttcttaacaaacaatacaggagctcctcaaggtgacacactaggccaggaaaaccctaggtcaagcatcccgtgaagctgaatcttcaattctttgaattctgccagagccattgtgtagggtgccttagaaaattgttatgctcttggtgccaaatcaataacaaaatctatttttctctacggtggtaaaccaaaaatttcatcatgaaaaacatttagaaattcctgaacaaccttgataacctctgaccaaactatctcaggccgtgtggtatccaataccacagccaaaaatcctatacatccttcttgtaacaaatctgtagtttttaatactaaaattattggaatccaggatccttgagccgaatccacaaaaacaaacggttcctcgcccttgggttggaatatcaccatcttccgcttacagttaatactagccgagtacttggataagaaatccattccaagtataatatcgacactactacaaaa

SEQ ID NO: 334430 - DNA, 528 bp, Cannabis indica
tattctaagaactctttattataactagacctaagtcatcaaaagaccacaaccacattcttatatagatctatggcatttgtatcttgtttataggggatttgataagatcaatctctgcaaagagttaatatgcctatatccactgaaagtaatttcatctcattcgaagatggatgtacattcaggggtggataagagttttcgttatgctcataaaactatcactctagattttaccttaagcaaaagaaatttgaaatctttgaaaatttttatgaatttctagcaatggtggagaaatattaaggtaagtggtggaagatcttgcgaactgataggggttgagaaatatttggtcaatatacggttcaaagatcattaagttgatttttgaattatatccaaacctaccaccccagaaattcaatttgcatttttatgataatataaggtctataattagttactagtcgttgcctaaatccttctagggaaataccctagtgaaaggaaaatttcagaatg

SEQ ID NO: 334431 - DNA, 603 bp, Cannabis indica
acgtcctcactttttgtcattctcttatttgtgaatcacgacggggttagtcattgaatcgcttgaatgcatctcgggaactgtaagtactgatgttgagtttttaaaatacatggcgactaggtaagcttgccaaatgcgctttcgttagtctcttggacattagtcaactaaccttgaaagttaatagtgctaatttttggagttaacatcaactaactatcaaatttgaagcgtgcatcaagtttccacgcgcgtgcatcaaggctctagcctagaaatctcagctaaccctagatgcttagggtagcctaatgtgaaattttcaaatttccataacttccttaattttaacccaattttaattttgtagaattctaaattgcatattttttaaccaactatcattctacaaaaatttcataaccaaattaaaattattttttatagaaaattttgcagtaataaatacattcattatatatattaaaccaaacacgaaacatccaaattaacacaaaaataaaacaatatcgttttaattctatatttcatgaatgtaaattattaccatgattttgaggccagttgttagaaattatt

SEQ ID NO: 334432 - DNA, 1124 bp, Cannabis indica
tttttaatgaaaaggtgaaaactaaaaactgctttatatataatatataataataatatgttagtaagtgtatacaataatatattttttaatgagttagatgagtgttagtaataagtatatgttttataataataagtgtatacacccactgaaaaatgaaaatgaaaggaaaataggaaatatgagaaccagtcggagaagagaacatatctcaccggagaagagaacagtcgccgtcgctgactggtgggaggacacaggatgtcgaactgagccgagaagagaaccagtcgccgtcgtgggtgggtgcctactgtgcgtgggtgggtgtcgagtcgactagtcactggtgtgggtgagtcgactggtactggtttaagagtgtatattatagattcacatttcacacagaattgattaattgaatattgagtattgagaagagaatacgaataggcttagcttttgtttgaaattgaatgtaataaattagtaataaataatttaggggtgcacatttatgatttatacaataatagattagtaataggcttaaattctgtcagataattaagaataggaatacgaataggtttctttttgaaatgatattaattattaaattagtaattaagtgttaattttttaattaaaaaaatttataatttcgagttacgggttataacccgaccagaaaaaaaaacaaataatcaaatccgaatttgaaacccatttggagtccttttcgggttgaacccaacctgaccagacgggtttttgggtgatcggttattttggcagcgggtcggggtgggtagtcggatttttcgggtttgcgggtctaaaggtgcacccctaatggtttggtactttagaaatagcagggtaatttagttagacatttggaatgttaagaatactcagggtaatagttttagaccattttatctctaattatattgattacttcttggtaaagtaaggtagaagaatcttttacccccttttttgtcttttatgacttactagaatgttagtgtttctttgagggcgcagttgggtgtatgtcggagtcagctagtactccggcgagtggcggggctcctacccctcctgcatca

SEQ ID NO: 334433 - DNA, 804 bp, Cannabis indica
aaattcaaaggctactaatatctgaaactttttaataattaaaaaattaatgaaaattaatattattctaataattagtgttatcccaatttgtacactctaacgtggcatcacacgatagtgacacgtggaatcaactttatatatacctgctcgcaagagatatgccgaacaaaacaccatatatattcgctcggacgaagccttcttaacagggcagtgagcaatccaaacagcacaccaacactttgcagtttcagctttcgcatcgtgagtcacagaagaaatccctataattttgggatcagatcatagagatatggcaagctgtctgaatcccttgattagtgtattctgtatttaatatgcaatctttccaattatatcaattgtaatcagaagggaaattcttccctcaaagcttatagccctataaatagtgatccatactcactgggcaaagggtcgaaaaaaaacttatctaagaattgatattcagagatattattgtaagagctctaaggaaaggaattattatattccttgttcttaagtcaatacaaaccaagaggattaggttattaccgaactgcttggggccgaacctctataaaattcttgtgtctttatttacttcattatattacatatacattatacgacttgtagcttacaatcaagactcactgtcattggccaaaagtgaggtcaacaattagatttttgtttgaaaatttggattctacacataattttaccaaaatttgaatttgtttcattaaaaaatgatttttgaaactaaaa

SEQ ID NO: 334434 - DNA, 739 bp, Cannabis indica
ctcggcggggttgctgagcaacacccgccgtttcctcgttgtcagacatagatggaacaacagcaaagtcagcatgagaagctcgggcccgtttcagcatactacgaaccgaggagccaacttgacaggtctgtcgagcaaaagaccttttcctggtggaggatggggcagcaggggaatcattgatgttgaggctggagagaggcggactgttcagtgaaaccagggatggttgtgggtacatgggtgctttgcctttggaagtggtaggaagggtggtggtagtcatgatggggtgggttggtagagagcagtggagggtggggttgacggtttgaggctgactgggataggtagtgttggaagtaggatcagtggtgtgttggatgaaagtaggggatgaagaggaggctacagtagcagggaaggtggtaggcacggtggtcacgagaaatctatttgtttggtcttgagggctatggtgatcaaggttggtaagggatggttgttcctcaaagggaatggagttggacaattcaaagatactcttcttataaatggatttggcaggggcccgtagggcatccttatagcttaaactggggggaaagggatggtggtcacagtgatggagaaacttgtcacacttgttgaaagtgtggtcaagttttccacaatgatagcagtagttttgaataccctcataaaggaacttgagccatttagtgagggagagttt

SEQ ID NO: 334435 - DNA, 1483 bp, Cannabis indica
aaatgcatttcagaattcaacaataacagtataaataattatttaaatatctaaaaataattttcataatcaaacataattaactgctaattttccaaattaaactaagcggtctttacacagggcattcccaacactaaagttccgcccgcaacaaatgctcgaacaatcattggatatgacaccgagatccaaataatctgtgctgttcttggaatcatgcaaggtcataccaacaccctgcatcatgatcaagtggaactccatgctggtgaatctcgcattcgaagagaaaaggcatatgttcgtagaatggagggataaagaaatggaaatgttaagggctcaacaagcaaccattgatgaccgaacaaggcaggccaccatgctgatacaaaaagcctatcaggctaccaatcagcagtctacaactatcatccacctgggcgagtcagacgaagatccagccgtgaacacttctgaaaccctgaatgatcagtcgtccaatccccggtcacaggttccgactgtgggccaagcggtaggtgggcagaccttgtctagtaatttgtcaagagatttcatacccaacaactctgcccaagttaatggttccggccagctgatcggccaaactaatcagaaatgatttgaacagaaggagagggctagacgagcatcatgttacgcaaatcgttcaacccggagcccgtgctcaaaatcccgctcaaagggatgctaactaacaaatatgttccaaggcctggcgagtcagaagaacaatgacctcgagttggaccgagcacgtggatcccctttctccctagacatcaatatcttagaattgcctcacaagtttaagatgccaacctggaaaatgtatactggaaaggaagatcccctatcccatctcaaggagtacgaggaaatgtatgctgtagagtttttcctgccaccctcttagaagccgcccaccagtggtacttcaagttgacactcagaaggttcaactcatggaaggctttctcctcagaatttcatgcacaattctcttcttcacgccaactcccgttgcacttagaagatctggccgaggtgaagcaaagactaggagaacctctccgagcttatatcagtagattcatgacgaaggcaacgaaggtttcacggatgaccgaagatgggaaattgtccgcgatactagggggcatcaaaattcttggagaacttttgaaggatatcagaaaaaacggaccaatagattctatgagtgacttccttgaccgtgcagatggcctcattaagcttgaagaagctgttctgcgagcagaagtcgagtataaacctggccagctaaaggctccctccactggaacatccatccagctcccttagtacccaagcagttaaagctcaagtggtaaacggtcccacaataacaataggcaaggcaatgggaaaaagggaaagttcgttggcaaaa

SEQ ID NO: 334436 - DNA, 490 bp, Cannabis indica
gatcgaggtgcatccccacttcaaaaaatcataactaattcataaaaaattcaaattgagttctgtaaaagtctaaattgattcatttttcatctcgctttccagtaaaaataattccagattgaaataaaattatttatcatcgtaaaattatgatttccatataatcatcaaatattcacataaaccaacatgaacacatccaaatcaacacaaacatcattttaaaaccagatttcatgaaattgaatcattaccatggctctgaggccaatttttggggattattttaccaggatctagatttactaccatctatgttgtttaacatcctaaacatgaatttctaaaacaatggaatttaaacacttataaagttcaagaaaccttacattggttacagcggaattaaatgactcattccactcatatctctaacccttgtatcttttctgtagctgagtatcaccaagatctgagcctgattctc

SEQ ID NO: 334437 - DNA, 968 bp, Cannabis indica
gtagtgggagggttttaaggaactcaccctataatgacttggaacacacttgtgattaaaatctattgttagtttaaacaagtaatggatagtcagaataaagaactaagaagtaaagccaagagaactatggttaaaaccattcatatagagtaactaaaagttttttattacaaagacaagaaaggaaatttcgttagtaagtctattcaatggacttaacaaaaattcttgttcctagtattataggtttgagattatcaacctatgacttgtggtatacctagtaatttaattactctagtgcaagcaacttacttttgtaagatgctggtgcatttttctaatggctacatctatagaagcttcgtgacttccaaacatagattttatttatctaaggaacagtttcaactatttcagaaaagataaaggccaagaaaataattccttaggatccacagtgagaggtctcagacatgctttgttatgcattagaccagacacctactgttgagtgagattgatgagtaggtatcaaattaatccagaaaaagaacattggaagacaatcaagtaaatcttaagatcaagaagaggaactatatgttagtcgatacgtgtaatattttaatactcttatactacaccaaatcaggtttccagacttgtgttagtgctagaaagtctactgatgagatggtgaatactctgggggtggagcagtgattttggagaagtgtaaaaactgatttgaagtctctaactctaccagtgagactgaatgctaaagttgcaggaaagatacttattcagtctatggaaagttctatacagtttttggcattgtaccaacaatttattaactactagtgttacttcctgactaacatagaagtagttgccaaaaagtaaagaatccagtatccctagaggagtaaacatatagagaggaatttcacaatatc

SEQ ID NO: 334438 - DNA, 1095 bp, Cannabis indica
gtatgactcttggtcacttgtcttttacttttacagtatattgttatctgtttcggtattttggggttcaccaaaccttttttacgcactggatggtaaattataaacatgctgataattttgactcaatctgaattttgaaataactatctttattcatttattgatcgaaaagtgtatttgttaccgtagtaacttacatcagagctatttgatccaatctgatcttttagcttaacatgagataaaacaaattgcagacataagaaaatgtactttaaaatggtcacccgacctgagtactttgtttcttttattgaaacctttgagcgtagtccgccaagcaggccattcacttaaaagtaaatgtccattcagtacttaaagttgtcatccgacgtggtattttattggtagtattttcttaaatgttccccattttttcgtaatacttacctaatttgtatgcaccgtagtcgagaacttcaaccacttgatatggtccttcccagttaggtccaagtacacctgccgtactgtctttagtgtttaggaatacccttctcaggaccatatctcccacgaagaatttctgagccttcacttgtttgttgaaatatcgagctactttttgttgatgggccatcaactttaagtttgcagtggctcgtctttcttcaatttcatcaagtgattctgctaggagtatgtgattggtacttcgatcctatgtccatcttctgtgggaaggtggctcgagttccacaggtagcatagcttcataaccgtacgccattgcgaatggtgtctgtccggttgtcgttttttcagtggtacgatatgaccatagaaattcaggaagctcttcgggccagtttcctttggcatgttcaagtcttttcttcagtgtatccttcaaggttttgttaactgcttcaacttgaccatttgcttgaggatgtgtcactgcggagaaacttttgatgataacatggttcgcacagaaatcagtaaaggattggctgtcgaactgcttgccattatctgagactattttgtacggtagtccaaaccggcatattatgttcttcacaa

SEQ ID NO: 334439 - DNA, 2580 bp, Cannabis indica
ctttcattgaaagtcacaatttgagttccccaagtatagtttgaattggtttctagaaactttgtttcgaaaatatttcataagttcaagcaattaatcatccatgaacacgcaaacccacactaccacacttggtagccatgccactgctaataatgtagcaggcattgggattccccaaaaggaagtgaactacgagggagcatctgaaatgactaaaacttaggaacgtggatctatgggtcctccgatgataagagcaatcacctgtaagggaaatgagctacgagtgaacgtcgaaactgactaaaactcgagattgcaaacagagaggtccaccacatgtagctgataggaccagccgtaattctactcaaagaaatttgaacaatataggaaatcgatctcctctgtcggattctctttacaagtctaatgaatctagaccaccctgtaaccctgcaaagagaaagggacctacaatcatacataggggaagataccaaaagctctactatgaaagtaaagattatgagatttggagggtgaagattaatgagctaatttggagggtgaagatcaatgagctactcaacactcagatgtacttccgagactaataaggtgcctcatgtaagtacttttcctgagatattgttagtaaacactacgaatattctgtgacaaagcaaatgctcgagagacgactctatcgttatacgggataaatccctagagttggtatcatggccacatgaccaggaaataaccagaatgcctagtgttaacgcaaatttttgttaactaaatttgagcctcacagtgatgatttcttaaagaacaaatgaaggctatagaaaagtaaataatatgaacacaagatttttacgtgatattgcagataaaattctgcatagttcataagtcaatcttattcagatttcagagtatttttctaggcctctttcatatgagttttttcatcccttttttgatgttctttgtcactatttataattacatagtggacattcaattacaaagttggtcaaaataattttgcagcaatcatccttaaaatcgtgatatttgattacatatcaagtagtgtaaatgcggtttatgatttgcaaatcgtataactgtgattttcctgcttttactggatcaaaactatcgttcattaaacacgtctttaactgttaaaactgtaaatgtctcgacagaaacttgattgtagtgatcccaatagcgagtaggggccattcttcctgctggggttggcaatatacgtcttgtgtcgatcacggttatttacaaagaagtcttctgactcgctagggttgtaagcctcgctcctattagctagatgaggctataggaagtcttcccatagcgagatggtaatctcgcttacttgttctttgagccaatccgacttttacacttagtttgttcattgcaagcaaataatttttatatttgatatgtgtcactctcttcggtgcctcgctattcacatttagcgacatatcctttcttgttaatataccaagtgccagtttgtaaattgattccttgcctaagacgttacagtcagcaggttacaaatatactctgactcttatgtaattaatgagttattccataagagcaattgcattgtttcacattccctttatcctgacacgtgtccaacgtggaggtggcagccaaattttgggtataacaattgtcccttaaaaagctcttttttagtaaaaagagcttttttataattacagagcgcattttcacaaaaatcattttttagaaaaaacgcatcctttgattctggtgcttgtacggtttcgaggatcatgataaattttctcttcattataattacagagcgcattttcaccaaaatcattttcaccacccatcagatttcccaatctttagctttcttgtcactgaactttgtctataaaacggtggctcaagcttgtcatttttcacaaacctctggctttttggtgcggtccattttcagaatggatcatctctttcctgctagaatgtcccttttgagttcagaagttcatctttccaaactcatcttacccagacacaccaacccatttccatttgttcctacagacttcaagcctcacttgaagctggaaacgatggattctaagactgaggagctttcgaccaatccaaactagggaaaccctgtagcctgccatggccgatcctcacaagtgatccctgagggtatagatcttgtgaacgatctcaaatgtactcctcaagatgatgaggaattccagaggaaaattggcatggttttaggtggatgtgggaagaaagttggcgtggtttctatcagagagtccagcaaacccaaggcccaaacctgtgccagaagacttttgcgccaacgtctttcttgtatcgaggaatttcctaaggctggtgaaaagatctcagcttcaggaaatgggatcttctgatgatgaggggaatgaggtctgtacagagatcaaggctctctacatgtacccggtctttctcaagctatgtgtagtcggt

SEQ ID NO: 334440 - DNA, 895 bp, Cannabis indica
ttttcttctcttggaatttgtctgagaccgtagcttttgaattgtgcgagcacatgtattttgctcaaatatgctatcgtcttttgtccccgagcctcgtattctctggatacatgatttaccactagctgtgaatcactgcagatgtcaatgtgtctggcctttattgcctggactagctttagcccagcaattagagccttggactcggcttcgttgttagatgctttgaatccgaacttgactgcagtgtgcaggttttgagagtacgggaggtttggaaagttctgcttttagttctcctccatccactcgaactgcttgtttccttgcaggatgttgaagaatggaacacacttatctgttgattttgaaacaaatctgctgagcgaagctatccaaccaggcaagcttagcacttctttggtttttattggcgagttcatatcttggaggtcttgaatcttctctagattagcttcaattcctcgggcattgacgatgaagcctagaaactttcccgagctgactctaaaggaacactttaagggatttagtttcatattgtactttatgaggactttgaagcatttgtccaggtcgtctatgtgccacccagcctttctggatttgatgagcatatcatccacgtacacttccatatttcgcccgatcaggtctttaaacattttgtttaccaatctttggtatgtagctccagcgtttttcataccaaacgacattactttgtagcaatatagacccatatctattcgaaaacttgtatgttcttggtctggtggatgcattttgattttattgtagcctgagtaagcatccatgaagcttagtatttcatgccctgctgttgcatctacgagctgatcgatccttc

SEQ ID NO: 334441 - DNA, 1086 bp, Cannabis indica
atatcaagtggttcatattctaccacaagacacatgtcagtttttgtagtgtagtcgaatttcgggtataacaattgccccttaaattcttttttaattaaaaagagctttttaaatgattacaagggtatttttgttttagtcccaatttgaaaaattgcatgctttgagttttggcggttcatgatttcgagacacatcattagcattaaatgcccatcttttccgattctttcgtgttcccatccgtttagaattttttttcttttaatctaacgatgatcactcttaaagtataaaactcaagagaagacatttatttgccatttctgcctttcaaaccttcgaactattcagaaaaaaccatctctgtttttccatcaccttgaatgccctattatccttgacttattttttgcgtgtttcatcagacttcgtcttcaatctcagggaatctcataactcattactccaatcatcaaattctcactcgacaagttcttcattacccaaaaacttttgtcaaaacattaagttgtttacttctttatttctgctattcctttttccagactttgtaatcttatttttgctttcgattgcctcttcatttactgcgtttggtttaggcatttttcgatttagtttctagataatttctagggttttaaggagaaaacttatgtataattaaattcctaggtttctggtttagattgaattaatttcttccagaaattgggattattctttttagtcaatatgtcccaatctaattttaaaatttcaactccaaatttcctagaaatagaatgtcctaacgaattagcccttccattcgaacccaaaatccaaaaacctaattccaaacttgagataaatgatgccaaaattagggatcatctaataaaaaccaatcatgatgaaatttccagtcactataggcaatttttacaagaaataactgagggtaaacgtcgttatctgtgagatgcagcttggcctaaaccctaaactttatcttctatccctttagcgagacccttgttttttacctcaagtcaccgttgctttttcaccaagtga

SEQ ID NO: 334442 - DNA, 823 bp, Cannabis indica
aaaagagtaatttgcggcataaatacttaaattttatgccgagtagcaaataaatacctaagtcgtatttttggcggtaaaaatacctaccgtcactaatatgaaacttccgtaggtacttggccgttaattgctacgtcagtagctacgtggcagtctcttataggtccatatcttttaattttatttattattttaaaaaatcattaaaatctagaatttacttaaaaattatttaaaaaacaaataaaaaaagtaaaaaaaaaataattaaaataacttaattaaaaaagaaaaaacctaaatctctctctgtcttccccaacactcttctcgcttttcttcctcagacaccctctcttcctttctccttcttctcaggcaagctgcaacctttctccatcctcgcgcggctgcaacctttctccatcctcggccaatagagctctttcctcgttgttgaccgatggagctcttctctcggcgccgacagtcccgtgtctctctctctctctcgtcggttttaatggtggaccaccaagctatttctttgctccacttcagccatgaaggtcgtgtagctggttcaaaaattcaaacctcatagctcaagttccctctactcagtttctccctctcttgtctcctcaccacattcaatggcaaaattgctatccctaagctcagcttgccattcgaacagaagaggtcagatctgaatgggactgtttaaaataaaggtttacatgagaaagagaagattatagaggtttatggtgcttattttttttttctttggctattttcttctgtaaatagaata

SEQ ID NO: 334443 - DNA, 587 bp, Cannabis indica
agtagtttgttcatccatcccaccgcagcacatatattcgcagaacctacttcactattgttgaatattaaagatattcaaactccactaatcagtaataattaatttataagagaagttacctcggttgttagaattaagtgtttaggctaaggaaggaacatctgtgatacgtacctaacatatctgtacccttcaattgggattgggatttcagcgtcttttagcaggatttccgaaaccagaatccgggcatgtgaatcgtcgtagtccctgcagtgaatagtgatgttaccaacatgctcgtaaaaatacacttggggcacaatgttgtcgatgttgtcagagcagaaatggacttgctgattaagggtcgcatggtcatcgaaattgtacaggacaccttggtcgttgagggaaataaactcctcagtataagtttgttgttgtccgtcatcctcaagagcgtatggttgtggaacatacgcctcaccagacacctctccttcttcctcttgttctgcagcgtttctcttctgcttaagggattggactttggcttttaatttttcaatcaccttcgcttg

SEQ ID NO: 334444 - DNA, 653 bp, Cannabis indica
atcaatcattactaccagctcaaaaatgtgacttatgagttctctaaagatagttgtaagctcactgatgagctgatgcacaagattgtgccctaattggccactttagaagcagagtgggatatagacgagcatggtgtgttccatttcaactggactgatctgaagcacgatatcaagtgtctatataatttctttcaatccactctgctgcctacgtcacatgactccacagtgagtcgggaaaggatgtggatgctatattgcatcgtgaaaggcaagaagattaatgtcggcaaggtgatagctaaagagatccttgaatgtgcacattgggtaaaagggaaattgtttttcccatgcctcattactgagatgtgtagatacgctggtgtaccgatgttgtctgaagaggagccgattccaaaaatggagtagttagcttcaggcctgctcgtgccccgaagcgcaccactgcatccacggctgcagcctctactttaagggatccaatggatgagcggcgggccaagcatgaggctttacaacaacagatgttccagcggcagtcgcatatgtgtaagcggctgcattctcactggaactacgaaagggagcaagatgcgtggatgatgcgaactcttcgtcgcaac

SEQ ID NO: 334445 - DNA, 514 bp, Cannabis indica
ttacaacatggtatcagagcgccaaggtttttagatcctgaagattggttcgatatgtacattagctgcaaggacttgatcaactcatggtttagtagttaaaagatagtttgttaatttttcttattgcctgatgatctgaattgtgttgatatcggaatggtgtgggcaggactataatatatggaaataattattattattgttactaccgggaatgtgaccgcaggtgtatagatatgcacccgaggcagactggtaggggcgagaaccctccaccaccaccaaactgggaagagttatatgctgcaatgcaagagactattcggcagcagggtgagaaaatcagagaatttagagagcagcgagctcagcatactctaaaccgtaatcctgatcctctggcacctctggtagtgccaccagatgtagggaaccgtttggaaccgttgtatgagcagtttcggaagcagaacccgccagcgtttgagggtggtgctgatccactcaaggc

SEQ ID NO: 334446 - DNA, 741 bp, Cannabis indica
gatccagccaccttcggaccccatggaggtaaacaatttcaatcttgtgctacggttgacatgggtttcatcagatctggtttgtggttttttttttttggttttatttattttgtattttaaaggttctgattcagatttgaaaaaaatgtaatgatggtaatgggtttctatgatttcaggggtggtgatttcggtggttgtttttttagatttgatattcttgttttttaatttaatttgggtttttgtttgattttgtgagatttagatctgatatcatgataaatgtggtgtgtataattgtttgtttgtgctataagatatgggattgtgtttgagtcatggtggaggtggcagtaacattgatggtggttgcggtggtggtggcggtgggtggtggtgatagtttaaaggtgattttggtggtggtgatatggtttgaaagagtatgaagaagaagaaaagtcagaaaaaaaaaagaaacaaaaagaattttctttatatatttaatgattttttaaaaattttaattaatttttttgtctttcaaaaaaaaatattttatttttaaatatttattttacggggccaataatattgtgccacgtatacattatgtccatgtgtacaatccattatagtagttaacactcaaatttggatggaagttgtaaagtgctaacagtatcatagttttgggggttttaccgctcaaatttaggttttgggggttaattg

SEQ ID NO: 334447 - DNA, 519 bp, Cannabis indica
aactaagcggtctttacacatgcgtaaggcaaacatttgagagtctaaaaactttgctttaatcgattctccaagtattcttcaaatttcaggtaatttctcaaaaaatttgaattttttttcaaatttttttcttctcctcttgtaaagcttagtttaaggattatagatcttgctagaaattattaaactccattggtaagccctctaaaaataaaataaaaaataaaaaaagatattcatgtgagctatttgagctgaaattcttcattcttgcacagtttgtttgagttactcactactgctattgaaagtgtggacccgagagactgagccttcgagctaagacctcgtttctttagctcaattacccagcaccaagttgaactggtttgagatgagtattcactacctgagcctattgttagaaaacccataattggatgtgctagttgttctcaaaatcattgttttaatgatctcaagatttcatatgaatgtggtgttggaaattatttt

SEQ ID NO: 334448 - DNA, 468 bp, Cannabis indica
aagacattatatgattgaaataattattatatgttgtttctatgattgtgctatgagtatgatgtcagggttgtgatcccttcatatacgtaatggtttcgtttagtacaaatatatggtattatgatatagctttccatatctggagttattaaattacaattatgagttaaggtatataatattgttaagactgaatacgttaatggtataaagaatcatattattatgaattttaagatatgtttagtgtattaaatgctattgtatgttaagcatttccttactgggcttttagctcacccccttactttccccctataggcaatagacaggtaacattgaatataaatttgatgagttgggtcaattctggtatgtatactgcgaggcgctatggacgagcaaacggtttagaacgccgatggagccttggttttgtttttttatagtaaagtaatctgagct

SEQ ID NO: 334449 - DNA, 565 bp, Cannabis indica
cgcatctgcggccaatagtacccatgtttcaaaatggcatgtgtcctatgccacccatgatgacccgcccacaacgtgtcatgacactcactcagcagcgtcctccttagatcgcctgccttcagaacaaacaaacacccacctttggtccataagaggtcatcgtctacccaaaactaagttgtctttccctttcttgcgagagtcacgatgttctttgcaactgggtccttctccaagttctccttgatgcgctctttgattagtgtacccacttggctagctgacatgcccgctaacacctttagtgcctccaactctgctttacgactaagggcatcagctgcctgattaagacgtccagccttgtgctcaaagtagaagtcgaattctgtcgagaattcctgccatctggcctgcttgggagtcaattttggttgtgtgaggaaatgactaacagcagtattgttcgtcttctcaacaaactttgaccctagaaagtaatgcctccacgactgtaaacaatgaataactgccaagagctctttctcttgcgcagtgtacc

SEQ ID NO: 334450 - DNA, 409 bp, Cannabis indica
cactagaaggcgagctatcactagacgaaggggtaaaaggaccataatatccactaaaatccctacagcctgtaatcttgaatatatcaaaaggctcgattggatctatcccaactcgcatctatatgacctgctctgtcttccatagtagcgtattgctcagctataccataatatgactcgtgacagttaacctggatgtggaatctaggatactagctgtcaaacttatgagcaatgccgtcaacgagaaggaaatcccaaatataaaatttaaggcgggagtcttagaaggtgactaatgtactatgttcagccctaagtacagtgggaaaccaatcacattgattacctggggatgctccttcaccggcttcccaaggggcagtgctttgaagatattgtgctt

SEQ ID NO: 334451 - DNA, 1244 bp, Cannabis indica
ttttttgtccggcttggcttgggtgccagtacgggattagcaacccaagctgggtagaaagcttcaattatgaaattattattgcgtagcttctctacctcctccttcagggctagctcgctctttgtccaatagccttcgcttttgttgaactggtcagaagttaggatcaatatttaggacgtgcaaaattatagaatgatcaactccgaccatatcctcatgtgaccaggcaaaaacgtccaggtttgctctcaaaaattttatgaatgctaattttacttcaagcaacaaactttttccaatttttagctttctggtcgaaatatcatgatcgatcttgatctcttctagttcttccacaggtccaacattgctgcttgggtccagaagtcgaggatccacatcttcatccccaccttgggaagctccctacttcgaaatgttttttcccttgtctgtgctctggctggaggatacttccttcttagccttggccacaacaaggttataacatttcggagaaatctgctagtttctacttagacaccctaccccattctttgttggaaattttaggcatgaatggaatattgacgtaacagcctttaactgatacaaggcttgtcggcctagcatgacaataaaggctgatggaacgtccaatactagaaattgtgccattatagttatgctcctcggagcttccccaacaatgaggggtaggcaaatttgccctagaggtgcgactccttggccgcagaaaccatatacgggcagaagacagggggttagatctttgagttggagccccatcttttcatatgttgtcttgaataagatgttggaaaaggctccattatctatcatcgttctggccaccatcttgttggctatctggacctccatgaccaatgggtcgttgtgcaaaaatctgattttgacagcatcttggccattgaatgttatggagggctctcctgcccgtgggattttcggctttttctcttctacggccaagattatttcttcttgctcgtgctgtaatgttcgggcatacctctcccgagcttttcctgaatctccagctatgtgtgggcctccaatgatgacttgtagatatccatctaccatcggtggtagaaagtcttggttgttgttgttgttgttgggttttgtgccctaaataaaacccatttcaaaataatcagatttactaattaataaagatcacaaatcatttt

SEQ ID NO: 334452 - DNA, 1109 bp, Cannabis indica
cttaatgaagcaaacttatctttattcagtaatgccatttttctgttctagttttctaaatactaattctatctattgaataattataattagttatcaaataaaattaccatttaaatatatttattaattagatcttccaagatctcttaattaataaataaatattgaattttcttttcttcttaattatgtccttggtaaattcacaaataaacatagtcattatttagaatcctaattgattaaataaattaattaattgagactacaaacgaatagtatcccatttagtccagggactatgggcctatgtaaccaaactcccaataagtagttctagaatttaccaagtaaattctctatcttattaatccctcttgaatccaccatagattcggaattgcactcctaattacatagaacgctgtattcatcaagaatatatacgctataaattatccattgtttcaatctaaataatcaatgattctctatagatgatttacatcgagtagaaacaaatttaccgttttactcttcaatatattttatccttaaaacacttgacttcttataaataatatttcagttagataatataattactgaaataagagctcttccatttatgtctgttagccaagctctaaggaaatcatcatttcagttctaaatagttatagaaattatagatttcatatctatgattaccgctcccactcaattgcactaccatatttccaagatataagtattaggccgatccaaatggtcaactataacgaacaagtcaaagaacacatgtaatatatttaagccaaaagcctaatcatctcaggattaagatcttttaatctaagatcaactaagtgacattaaagatattacgataagtttatgatatcttttccactgtcaatattggtccagtctgatgtatggcatccgatactagtatactttgccaatgacctggaaaggacattccacatgtcactgtgtaagtaaattttatcgttgattatcacgtcagtgtaaatccagtgcactgatatatcatgggactaaatagtttgaagcatataatcacaattaccttctactgt

SEQ ID NO: 334453 - DNA, 835 bp, Cannabis indica
ttatagaaaggtgtaaaaaaaaaatcaaacaaaaatattaatttttattgaaattattatatgaaaaatataaattgacactttatttacaaaaatacctctataaggtgtggacaacatttatacattttatgtacttttaattaccaaaataccacttacactatcacttacacaatcagacaatggttgcagggtgattggccaaaggttgcatcagacgaaggttgcatcagacgaaagtttcaatcaaacgaaataactgttagcaaaatatttatggaactgttatgaaacattaaaaatcagaacagtattttcacgtacgtaactctatctacatgtcttttcatgatttaatatgaacaaatttaccattaaaaatttaaaaaataacgaaaatacactagagtaaatattttactatattgctgtaattttttttggattatacatgagttggattgtttgggacctccagttcaactttttgagatgaatttaatggatctgaaaattaaagtcaggacattagttttatacaaattaaactggatttccggttgaattttagtttcatagtaatttttctaaaaaattttttccatgaattcgaaacagctcctgttttgattgattctagttgtctttacagtgaagtcaccgaaattaatggtagttctttttctggttgaattttcgtttcgattgtgttgggttgttgagtggttgcccagaatgcatagatctggggttgatgttgtgtctgagtggtatttgtgtaatttttttttatttagactgtatatatatttatttagccagctaaaagtat

SEQ ID NO: 334454 - DNA, 534 bp, Cannabis indica
gtttgtatttctttctctctgtctccccccgtgcatgtgcttggttgtatgtgtggaatgtactctaaattgttttgagtttttcgttttagttttttatgaatatatgattcggtatttctatttaaagtggaatgcactgtaatttaggggttttgatttaggtattttgatttcggtatttgtgaaatgtgttagttgacttgtttggattttgaatatttggggattggataaatggagattttttgagcaatatgacaaaactcatttcaatttaaaaatctgaacccaataaaacaaaaatagttgtattgttattattattatggccttatgtataggtattagagaaaaagatgttatcttttttcagttatgtgtacggtgaagactaaagatataaatgtatcatatgtttttgagcaacacccgaaaaatataattcacaagttctataatattaggttggatattgttttagtgatcttatcattatgtaactgattttgctttctttcttgtttttgggat

SEQ ID NO: 334455 - DNA, 629 bp, Cannabis indica
taagcactcacacttcaaagacgaagagagttcgctgtttgaaggtggttctgaaattagactcatgaagtgcattacaaaggattgcgaaaaagatttggagggagtttgtctttgtaattgttgatactttattaattgatttttttctctaggcgtggtcccgtggactatgagtgttcgaaagaatactgataccacgtacaaatttcttgtgtcaagtgattttattttttacaattatttttatttctgctggttctggtttgtttctgcaaaactattttttgcagtaacagaattacattctgctgttgcagactattacaattaattatttttctgtaataattattgacatttgtaaaaacttgatttttcaaattgaaaataacattttgatgtaacctttttttttaattttttaaaactcaagtttttataaaactgtttttaaaaaatttagccaaacaaccttattaattttttaaaaattattttctatttttaaaattaaaaataatttttaagttatgaaatcaaataacttctttaagcatcaatgttaatcaaattttgcaatggtttgaagagagagagagagagagagagagagagagaactttgaa

SEQ ID NO: 334456 - DNA, 644 bp, Cannabis indica
ttttttaagtaaatttcatctattaccccttccttttataggtaataaatatacttggaataataatactatttttgaaagacttgattgggccattggttccgattcttggtgtaatttatttccttcggctgttctctatcatttaccatattatggttctgatcatagagcactgaaagtaatggttaatcaacatgtgcccaatcgtaatcctcatagtaataggcggttccattttgaaaatatttggtttgagaatccggatttttataccacccttagtagtgcttggtccaataatgattccacattaggtgcttatcctaggttccttcattcccaaaaagcttctattgactctcttacttcttggggaaggtaaattagaaatgattttaagcttcgaatttcttatcttcagcaagatattgagagacttcagtcctctcaccatagagatagggatacaatttcttctattaaatatcttcaatccaacttgatgctcttttatatagggaggagatttattggcgtcaaagggctagagttaactggcttagggctggagataggaacacaacattctttcataggtatgcgtccaagagaaaacgtaataatgctattccttttcttag

SEQ ID NO: 334457 - DNA, 620 bp, Cannabis indica
tttatagaaaattaaatttgagttgaaaattaattttaattaattttggaccaaattaaattaagtaattttcataatatttattaagaattattactaagatggaaaataattttatttattttcagatctatctaaatataattttataagtattgaattaaaatttatatttagagttttctaaattagtaattttaattaaataaatatatataaaataaatagattaaaataaatattagatgaaaatacgctttaaataatgagctttattttaaggatattcgatctctattgttggttctacatagttctcattagaaatttaacgtcgtagaatctcgaaggataagtattatttgtaagtgttttattcttagtgacgtccaccctaatggtagctgctaagagtaagacttacaaaagtttaaaacaatggtggaagctcatgaaataagaatgaccttgtctctcgcctaaacgggacaatgtcggattctcttttcgatcgaataaatggttgctagaatatttttcattttagatgagcttgttgggttttatgccctaaataaaactccatttcaatgtaatctctattcttttaaatatcaata

SEQ ID NO: 334458 - DNA, 993 bp, Cannabis indica
tagggcacaaaacccaacaacggattgatcaccttgttgcaaacgggtgagttgtgtttgcgactgaaagattcgaggtccattaccctcattgaatctttcttgaagatcttgccacatatctgttgcaagatcaaaatacatgatgctctgtactatttcataagagacagatttatgagccaagacatcaccatgttattacaacgattccaagagttaaggaggattaccagatgcaggtcgaggaagggtgccatctatgaatgcagatttattctttgttgtcaacaccattgttatgcctcttttccaagactgaaaaatttgtgtcattgaggacggtggaaacaagaatgaaacctggatggttggctgaactgagaaagaacgggctggagatgtcttcgtgagctagttgatcaagaagagaccttcgagtgggttgagttgcgttgtcagctggaggagtaggagaagattgcactggttcgtgtttttcctcattttgagacctagatctggagcttggatttcaatgaggaacaactggaatgttggctgctggtgtagaagtagaattgggaatggattctgatggattgtgctcagttgcaggtggaggaacaccatcctgggagcgtgtggagggccttgccattgaagagttggctagggtttttgctgatacaatatgagaaacagagagattggagaagaagaagagagaagcagagttaacgctctgttatttctctgttatgttcttattaattgaattagaaaatgaattacaaaggtttatatactgaatagctaatcgacatttaaccaaggtataaaagaggataaggcagttgtaacagtagacaactgtcataactaacaactaacaaacttcctaacttcctaatcttgacacgattgaatctgaggatacggttagaattacctattttgatgacaaattatattttgttattagcttttttt

SEQ ID NO: 334459 - DNA, 1528 bp, Cannabis indica
tcccagaacttagcaagagcctcttcaggcttgggatagaagtcaagtttgatactctggccattcgactgccaggccatgtaggcgccgtcgtcgaagcgcttgacgcaatgcttgcagaccacgggggtcaggagctcatctctttcggtctttttcaaggcctgatctttgaaatccctcagctccttcacctccacggttaggttggccgtagactgcaagtctgcctggtgcaactcctctaaggacttcaccttcgcaaccatctcgtccataacttccctggcctcccgaagctcacgtctagccctggctccggcctcaccctccaccttcaacgcctcctggtgcctcgcctccacctcaacctccctctgcttggcctcctctcggaacttcgcctccgcaagggcctcccttcgttgagcctcctcctggaacgcccccctttcggcagataagtcccacaggatcctcacggtctcgtctatacccccaaattcggacatgacgaagcaatgatcaataaaggtcttggaaaggcggccggtctcggcagtaatttgaaaaaagagacaagagtgagatcggatgccttagacaaaatagcaaaggaaggaataaattacaaatacttaccgcggccgtggcagagctaatgtcttgaacctggtaaacagagttcgaagaggcacaagccgcatatcttttggctgggaattgagtcaggtgggagacgaactggctggtcatctccgaggcaaagggagccaagttgggcccgacgaagcggttgaaccagtccgccagcggatccatgttcaggtcccacggattccgaaaggcatcctcatgaagagtgttctgctgctcctctcgcaaaatcttcttcaaggcctccacctcaacatgcccccaattgtacttgtcaagggcgtagttgtgcttggccactcagagattttgcctctcctcatccgcagggaccggggtcaacactatgccgtgcggcatagtgtattcctccgcttcggaaggaatcccggagtcatttgtcggtgctggagtgtcccccctccgggtcgcttggaagttcagcctcaaccatcctgccctttcgcttacgctcaagggcggtcgcatccgccacctcgccttcctcgacttcctcctcctcgtctatcaagacgattgcgcctgaaggggcattggaggaggacctctcgggggtcactgactgggagggagtcggtggaagagaggcaccaggactgtaggcctcagcaagagtggccaggagatcttccataggcctgactgctgcaacaaagaaataagctaagtgttaggatatccatgagaaaggcaggcactcaacaaaaaagcaataaaactagtcctaccctaactctctaattcgaccctagcaaagtctcgaatcataacgcaggcttcatcatccccaagaaagctgtccgaggagaaactagctagaggataagtgggctgaatgatccaggggaat

SEQ ID NO: 334460 - DNA, 877 bp, Cannabis indica
ccacctcgcttcaatgtgggaacgcccctcgttacaacagtagtgatgttcaagaacacacaaacactactagaattaatcacaaaatcaaaaactagaacttagatgaaattagacaagaataaacttaactcgagaataaataaatcatgtatctttattgattgaatagtaaaacacaatgacatatgtccaaaaatacaactcaacacaataaacaattacaaaaaaaatatctcacaatgagagaaatcactttaagagtgatactcccactacatctcttcacacacacacactcactataatcttggactctctctctctcaaaacttgactctgaaatctgaagtatgagcattggagattccttcatagagtagagacacttctatttatagatgttggtggagctctctttaagtttgtgtaaaagccaactgttataactaacaacatgaaagatagaactactgactttgacaaattaagtgagtttaatcccattataccatatgtagtgtgatattaagcttaaagagttatgtatcaagtttgcatttgattactctgcttgattggttgcattaagagcagagagctataatgtgtacttctgatgttaagcttcctgaagatggaattgggagtcttgtttgtcttaagttttgagaatctgatacattgaataaaaattttagcttgtctacaatcatttatgaacctcacacacgttcgtacctggctcaattttatttgatcatttgcagaaagaaggcaatgacagctgctgcattttctgctgatggctctattttggcagttgcagcagaaactgtgatcacattatgggaccctgaacacaacgtccttgttg

SEQ ID NO: 334461 - DNA, 357 bp, Cannabis indica
ctatcatcttatttgacatatgatgatcccactgcctctgttgtcttgtcacaaccgaagagatcaataccatttagttttcttagacgtaaaataatttccaacacccccaaccaggggcatatccccttgtacggtttgtggcacgattagtgttggccggaatgtagcagtccagctcgcctaggtacccgtcctggtcaagagttcgaaggcgcgcctctgtaatcttggatcgaggacttacccacctggcgcccaaggcaccctgcctcctatgaggaaccgtcgcagtaagctcctcactgacgtagtcaacgccctcgatcaggacgtctccgtcagcatggaatggct

SEQ ID NO: 334462 - DNA, 892 bp, Cannabis indica
cttgctgagtcaacaccaagatcagctgatagtatgttgcaactcgaagcaaatgttgctcatttcaacagaaatttcagatatcctgctccttcacgaggtcagtattactccactcatccgaatttccctccttctaatttccagaattactcttctaatcgtcccccttattctggcaatttctatcgaggttcatcctcatccataaatctgggaaggggatcaaatgctggaaccagaggaggcaaaccatttcaacaacacagagttcaatgccagctttgtcacaagcttgggcatactgtggttgattgcttttatcgatttgataaaagctttactggtgcagttcctactgctgatgcctcctcaatgcaggccaatttagctcagaccacctctgttgatgatggaaattggtatcccgattcaggtgctaccaatcattgtacaccagaccttcagaacctgatgactaatgctgaatacactggttctgaccaaatttatgtgggaaacggcacaggtctgtccattcaacaccatggtaccactcttattgcatctaataattctgataagcctttatttcttcgaaacctactgcatgtacctgagataactaagaatttgctaagtgtctctaaatttgctttagacaataatgttttgtttgagtttcatgctgatgcttgttatgtaaaggatcaggttaccaaggaagtgttgttgactgggatcctccacaatggcctgtatacttttgatccaggccatttcaaagtgctgaattcttcccatccatctctcagttctggtgcttcattttctggtcaaaaatctgctctagttgtcaccaatgaccctgctgtttcagcttccagcaata

SEQ ID NO: 334463 - DNA, 1051 bp, Cannabis indica
ccctgttcgaacatctggtcagatagggattttctagctcttgtcttgtttgtagtagtctccgttaagcagccttgtccagccaagttttggttatttgcatggcatgcttttggatctttgctcttatctctctatatacgtctcatcttcttttcttggatatctcttctttgtacctaccgttaataaatttcaagctttttaagctttaggaaacgtttttattctcatgttagtttgtaatctcttttgcatattgatcctcatgacagttttggaatgtataacgtgtgagtttttaatggaaaagattcgattttggtcgttgggattcttcactctttgagtcgtaaaggatacaaagcacatattcaagttttaaaagaaaaacacacattgggattcaaaacttacattggccgacctgggaggtcttgcttgagaactggctgaccctaaggcttaattatgggagttagtcagctttagggttttagcctataaatctagcctattcatatgattgggtttggtgaccctagccagttcttgattgagtcataggaccctggctaacccttttaaggcatgagaaccttggacgtcatgggccttggttccaagtgggtagctagttttctgtccccttttgacttcaacatgaatctagctctataggcatatatagccatagtctcatacatggtttccttggaaaatctgtatgaaacttagtggtgagtctattatagtcaaatgttcaacttaagactcaacatggcttggaacttgtaaggaactctactgtagtcgtagctcgatacgtggcccttataggagctctttttggttcttttctggctgtattgttcttgtagggccttggcctcatgcgtgtgaaccgatttcatatctggcctcaaggctctcatgttcttgcttaggcctataggccctttatttttgaacactactattattaagccttaaagccatctatgatggaaatatcatcatgttaggttttatgccctaaataaaactcttt

SEQ ID NO: 334464 - DNA, 608 bp, Cannabis indica
tttatgatttttatattttatgcacagtaatagtggaatgtcataatttggccattagagtcacttagatacaccggagtatcttaaaattagtgggacaagttatttagacatctaaaatattagaattattcaggattataatttttattattttacccctaaattatgaaattacttcttggtgaagttaaagaacattatggtcttttaattttaagctggatcttatccttttaatgagtttttttctagaataatggttaagttagtaagttgcatataattaaaataaaacaagaattgttggtattatcttaaagtgagaatagtcaaacaaaagtatctctctctttccctttctctctctttggttcggccattacatggaagcaccaagaaactcaacccttttcactgtaaattcagactaaaattgttagagagtcccacattgttaatgtgtggaaagataatagaatatataagagtaatgggctactcctcccatagccaatttgttttgagatggaaccgcattcatcttatccccaaattctaacatggtattagagcaaaaactaacaaaaaaaaatctctagcgacta

SEQ ID NO: 334465 - DNA, 958 bp, Cannabis indica
taaatgacacttaaaaaccgacggaaattatactttttgtagtagtgtatgaagttccaagagtcaaattcacaacttcatattttcacttttttggcaaagtgaaatattcagaaattaggtagtttcaagtctcctgtttttgcaaaatgagaacatctatgagaattggtggccagcttcataactggataagtgatatcaaaatatcacttaggcataaaaaaaatatcccaacacgttttcccactcacccagtatccaggggtatgtcacatgtcaacccgggtgctgggcgaagaataacttttaataaaatggtcataactcactcaatattgatctgattgacgtgattcaacttgcatttcgaagctatttaaataacctatcaaggcatgcttaacactacaatttcctttgaagttataaactccaaattttgtcctcaagagagttacaaattttagctacaacttaccagaagtggatcccgcagacgcgactcaagctctagaaattgacgaccaaactctggagtcaatgtcactgttagatcatcatcaatactcaaaaatagcctaaatgtatttttccatattttttacaatattttatttttaataggacctccttccgtataaaaggaaagctccactagctcattttttatgttcacaaaattgcccataaggtcagagcatctctctctagaaattaaagctctcatgcttagctatttttctgtaatccatctcatgagaaatgaactcaaagtagatgctgcaccattactttcgcggcacaaggagtgaattactataaattattgtttctcttttattcactcttatctcttaatagattctcactaatctagcgagtgggtttggctagacatatgtgtcctgatttttgtgttaatactttggtactttcattgagagccataactcaa

SEQ ID NO: 334466 - DNA, 694 bp, Cannabis indica
gttatttcttaactaacttttttttgtatgaaattgcaggatggactgtgtttctagttatattgtatgatagtgtttgggggtgttgagggttttaattgggtttataaaagcgaaagaagttcaacgttgatgggttaaactaatacaaccttatagaaaatgtgcgagattttatagaagagttggaggatgaccattggactatgatttgaaattagaaatttgttcgttgtacatgaaaaagtaattggttccgctagagaaagaattgttgggctttgtgccctaaataaaactctattttaatgtaatcttttctattcaattatcaataaaggaatatatttatttgcattacttatttagtgtgttatttggttcatgtgatcatttatttgtatatttgatttataaattcatccaaatccttatcacaattatattcttgtttattgtattgtcaacacagtggaaaataatcaagattgtgtgattaaatgtattccaatgatttatcagtacacaggatttaactgataggataatctacaatgtagtttacttgtaccttggataaatgctatgtcttttctatggcattagttaaagtaagcttgtgttggatgtatggagtatgcatcggaagggaccgatattgaacttgaatcaatatgataaacttactgtaata

SEQ ID NO: 334467 - DNA, 1080 bp, Cannabis indica
accttggaaaggacataacacttattcaaaggtgtaagtatacctatcgctgaatatcatgccagtctaaatccagtgaaactgacaaatcaggaaattaaacttttgaacatataaacatgattatattccactgtgctgacaatgctataatcacaaacaaatacatatgttctgcacttaaaatttatacataaaatcaatgaaataaatcatgtgaaccatgcaacataaaatgatttctgatctttattaattagtaaatctgattatattgaaatagattttatttagggcacaaaacccaacaatagtaaccaggtacccttatggtagcatattaactcagaattttatttaacataaatgagacacttgataattaataatttgtaataaataatataagaaatttaattaaaaagatttacataatagaaaaatttgaaaaataaaattacaaaatacattaactaagaaaaatttattttttctcaaaagaaaaagaaaaaaatttatttttattatttgaacttttttattttacaaaatatatattgagtaaaagtaataaattgtttttatagttgttttataccgacctagaatttaagttgagggggtgacacttttttagtaagtgagggagtcgagcgttcttttttttttttttttttacattgtataatatattaaaaattgatgcgaatttgtattttagtattaaatgtagtataaagtaaaaaaaaaagagtaacaataaaaatattgagttcaataatcaagacactaaatataaatcttattggtagaagttcaaaaagtaaaattcaacatttcactatctgtttgcatgaaataactttaccattataccaaagtttatgttatgtttattaacatcacttttatttagaaatatatgttgtaactagctaaaatgcatatacactttttttctttagttttttttttcagggggttgactgtccccacctggcctctatgcgggtccgcccctggttttatacttgtcataaggttgtttctctaattatttttagttgttttatagtttat

SEQ ID NO: 334468 - DNA, 830 bp, Cannabis indica
gctagatatcatccttattgggcccagatttgggcctacctgatggataataggctttagaattatacacatcatcactccgaaaataaggaataaaaataagtcacaatataaatagaccccatccctgattatcacatcattgtaaatctaatgtactaataaatcatgggactaaatataattgaagcatataatcacaaatttttttcactatgaagattttactatgattttgaataattgtatgttctgaatttagtaaaatttagatattaaacatataatcatgtaaacataagcatgtgaataaagcaattgactaatttgaaagtgatttgtatttctatattaacaaataaatgagatcacatagattaggttttattaggacataaaatcctaacaataactactttaaatacaaacacagaacaattgagagaaaagacacacacatgaaaataataaatgaagagtaaaaaaaaaattaaaacaagataaacaaattgaagaagtagaaaaagaaggagaaatgagagtgtaatatcccaataagcttaataattaataattagggtttatatttatattatgagttaaccaggtaatgagtgggatgataatccaactaatttagttcaacataaaattttaaatttgctataagtggataaataagcgtgatttttaaattacggagatttatatagtatgtgtgaatgtaatatgaactatatgtggaataaaaatattttcaggtttgacaaccttggagactcgatcgggggctagaaatgtcataacaggcttaattgatagaattaatg

SEQ ID NO: 334469 - DNA, 681 bp, Cannabis indica
acagtacggtttaaaaatcacgctaacacacctatgctagttagggtgttacagtatctgaagctgttattttatattataagtctttgcttggatcccagattgtaaataggaaaaaggtgtaaaacaaggtgatatttgaggggcctattcttgattcttcacaagctgctctactggtgaagttgttcaccatagaagaagtgaagatggcactatttgagatccctggaaataaagcccctagacctgataggtataccagattcttttttcaagacaactgggatcttgtgggagaagacctttacagagcagtcacatcttttttagaatcacgaagaatacttgaggaggtcaataccactatcttgacaatggtggccaaggttaaatgccctactacgatcaaggattttagaccaattgcttgttgcaatgttgtatataaggttgcaactaagctatagtattctagaatcaagctcatacttcctgacttggtttcccaaaatcaaggagggttcattcagggtaggttcattgggcataacatcatgatttgtcaagacctggtgagacactatggaagtaaatcaaacaaggaaaattgtttgataaaactaggcttacaaaaagcctatgatactatagaattggactttgtggaggagatgttac

SEQ ID NO: 334470 - DNA, 467 bp, Cannabis indica
aaaaagaaattaactcctttatttgtccatagcaatattaataagcatatcctttgattgtaaaagcttactaaccaaattaattgcatataagatttcaaaccaaataataattgctattaaaaactcaaaatcacaaagttcatttattgctaagggttttgcttcacttcttatttttagaatcaagttcatccttttccaacacttcaagtaaagcttctctaaaatctgacatttgagatcttatagctttaacactttctacacgactctcccaatgagtggatgaaaatgattttggagtctatcctttcacattatctttcaaaatttgccatctcttagtagaattggcaaaaattgtaatgagttattttatgttgtaacggtatccgtctatctaaggaacattgtcctactgatcctcaagagatagaggatataagtgttggaaatattttacc

SEQ ID NO: 334471 - DNA, 638 bp, Cannabis indica
aaatgtgtgaggaataagtcgacgaaggtttcccacgtcgatatcgacgcctcaggcaattgggtaaaccaatcgtgccgcaagaatgcggcactttgcgggctgtggtacctgatccacttccattatggtattgaatttttcaatataacctattgggttagaagtacctttatacttgagggattcagatagacgaaacccctttggaagttgagcttgtcgcacttctgtagtgaagggcgaggtaccatgcaacttgtatatgggcttccgttgctgctcgagcattttcaaagcctgcagaagcatgctctggtcgatccctccagtcgcaggagtcggggctgctacgaccgcgggagtcgcaactactgcggcgagatttgctgggacattgatcccagtggtcgcgatcggcgcggtaggcgggttattataagtgttgacaccctgatcgtccgcatggggatcacggagtgtctcagtattacgaggggcgcgagaacgtgccctaaaaactgtgttgaggtgatcacgcagatcaccccgatgtacctcgtaatgtcttccatgttgcgtctgtatagagccggaccttgtatatctacttggtgtacgaccgtgcgatgacgaag

SEQ ID NO: 334472 - DNA, 2010 bp, Cannabis indica
ctccttgaaatggtgggtgtctcctcattacctcagggtcatgccgaaagatgcatgtcgctgtggttaccagggcactcctaaccattttttgggacgtttttctatttgcatatttggtattcgctctgctcgcatattgatagggcggtcagtattcgcgagaattcggaccattctctcaatgcgattttatagtttatatgcgggtgagatcacttattttgttttttcacacattcaccacgctgaaaagatcttctatctttcagatgagcgacctgtcggatagtcagctgcttggctcgggaggcaatgcgtttgacggtgacgaggaccagagggaagatagctttatcccaacttcgatctcagaagaggagatcgcacctactgtaggtatagaattaggtccgatgtcttccgcagacatcgagagaatggtgcaggagctcactgaaccaggggccattgagattcgagacagcgagtctacggtgtcagcacgcgattatcttatccactccaggcatgcccctgacgttgaggtcgaggagatggacgacgattgggcggccccagctcgagagtcaggcgaggaagaagaagaggcagaagggagtgggactgattcggtggacaacactcagctgaacgagcccttttcatgtgaggacttggtctcgagggtctccaaatcggacctcactacctttacaagactaaacttgttgcgacttgcttctttgcgaccaaaacctacccagaggacacacctttcctttactaatccagcgattattcccacagaggatgtggtaatctgaatacccattcttcgatgtggggtatcagtccctttccatccctttattgcggccatcttcaaacgttacgatgtgtctcctttccaactaacccccaatagttatcgcacagccctcgctttttatgcgatgtatatggagtacgtacatagggctcccacggtagaagagtttagctacttctatgatataaaaagcgtaggccttcacaatggtttctactgcttcagcaagtgggccacttctgagattaacggggtagaaggcatggtttccaatatgggagattggaaatcaaagtggttttacatattcaaagtcccagggattagaactgactttaaccgtcgacctagtatgtcgcatgtttcctgacttagtcatttttttgagttactttgagatcttaagctaactcgctcttttttgttttcgcagatagaccagctcgccctgcactcgacgcgactcgcagagagacagctgaagttctcgggagccttcctgtacaagatcgcgactggcgattattgtgtacgactgctaagctgcgagaacacaaactgatccctgagaacgcaagtctctggagagagccggtgtataaggaaccttctgaaaagcaacaagagcgaattgataaacgtctttccaagcaaacttctcgaccatcatcaggtagtttatcgcatacataaactagggcgtttagaatttcatccttattagtattaatccttattttttgctgtaactgtagaaatgactttcttgaagtccgctcctactcttaaccgcaagctgaaacctggaacagcagcaacttcccctgtcgctcctcagaagaggaaaagcgatgtggtggttactcctgtcgcagattcttccaagaggcctgttaagggcagaaagtcgtgatcgacccaacagttcgagctcgccacgtgttgtctcttcaggagaaatttatcagcgacgagttccagtcgaaaatcgaaaagactcctactgaggagctactgcctcgctccgcagagttagcttcgcattttatggccatgttctcgagagcttttgctaccgggtccaaggaggttgaactcgcgaagagacataatgctcggcttcaagaagacaataagaagctgaagcaagatgtctcttctaaggacaaggagctcga

SEQ ID NO: 334473 - DNA, 986 bp, Cannabis indica
tgggtccaagttgggtttggggcacaggtcccccatctaggtttggatcctaggtcccggtctggttcccagttcagttttgggtttggatcctgagtttgggtccgagtctaggtcccaatacgggttcaggtttaagtctgggtctgggtcacggtctaagtctaggtccctgttcgggtctaggtcggggtccctattcgggtcccagtcaaggtctaggtcccagacgaggttcgtgtttgggtttgggtgcgggttcaggtcctgagtctagctctatgttcgggtctagattcgggtttgggtttgggtactgggtttcaatctcggtatgggtacgggtgtaggttttgggtttgggtttaaggtttagggttttgggtttagtttttagggatttagcgtttagggtttagggcttagggtttaggggtaagtgtaaagagttaaggatttaaggtttaaggtttagggtttagggttgaagggtccgcttctagttcctgttctaatttcaggtcacatggtatgatttaaggttcgagtgtgggtcaaagtccgagtctcagtcccaaatccaaacaccaaacacatgtcgagttttgtttgtgttttggtaccggttagggttctggtctgggtttgggtttgggtctaggtcaaattccgaaatttagaaaccgactatgggtcgggtccaagcctcgggtcttgggtcctgggtcctgtgtccaaatctagatattgctctagttctagctcatgtcttggttccttgttcggatctcacatccaggtttgggtgtttatttgggtcttgggtcttgagtcatgggtctgggtccccgattcaggtcagggtcctaggtctcggcctgggttaggtccccgtccgtgtttggtacttgtccatgtctcaagtgcctagtctgggtttgggtcacatttcagttctcaggtcccaagtgttgggttttatgccc

SEQ ID NO: 334474 - DNA, 571 bp, Cannabis indica
cgctatcagttgatttggttcacctgtttgctatacttagttcgtatactataaattatatgctaagtgtttttactgtcgttatatcccctccacgtaacaaggttagtgcctcgtcttgtacacctgaagttacatggtttctcgtcgatgcgcaaggcaacaatttgtatatttttctctcgcataagactattcaattagctgagttgtaaatatactctgttaattatgcttctaacgagttattccatctcaagtgtaattatcattacgtgccttggtttgtgttcttcccagcctgacacgtgttttcctctgatgtgctagacgaattttgggtataacagcgaggccacgtggtaatgacctcagaaaccatctaaatgacaaggtttggagaagagatctcctggacaatgacaccaaaagattagaagagaaattttttgctctgacaaaattggtcaagaaacaaagtgcagccctcaccgactatgaggatgaggaccacggaaaacgcaattttttacctaattcagatttttttcccaattggaggcacaccttt

SEQ ID NO: 334475 - DNA, 198 bp, Cannabis indica
tgaaccaaatgacacattaaataagtgattaaaatacttctgtctttttattgatatttaaatggtatagattacattgaaatagagttttatttagggcataaagccgaacacactattccctacattgaacattctttgattcttacgttatactgttatccttttggtattttgatctgcatgatagccttagga

SEQ ID NO: 334476 - DNA, 527 bp, Cannabis indica
taataaccccactattttgagtttttaacttcttttcgattttctttgtatatatgaaacctaaaaccatttattaaatattttttaaatcgaatatacataaatgaagtagttggtttgttttcaagtttgtgtttaaaacatgtaacttaaagatacacaaatgatatgggagttaattagatatgatgtataaatcatgaattctcatattttagtatttctcactattatgatcagacttagtgtgattaattattcaaaaatatattttagaagggattaaagtttaaattttataaaataataaaattttattgtaaatattataattaaattgcttaattgtttaaaaaattataatagagacttaaacataaaataaaattattaatattaattgctaaaaaatgtcttattaaatatttaaattcaaaattaaatattttaagaatagttaattatagttaatttattttttaaaaaaaaatatttacatgttactaacctgctattacatgtcaaca

SEQ ID NO: 334477 - DNA, 510 bp, Cannabis indica
gattcaacttccaggaagaaaggctgaagttgtgtaaaaatacaagctcagacctcgcatgaaaagatcataggagaatgcatcacgaggagtaagacacacttcaagtagtcctttcattatgtgaaagaatggttgaacacgtggcacacccccaatgatctttcttgcacaaaaaacaacgtgcatgcgagagtcttgttgaatttttttgtagcaagcttcggtttccaaaaaggaaggtttgttgtagcataaaaattcaagctcaaaattttcttgaaaatattaaaaggagaaaagatcacagggagtaagacagacttcaagcagtcctttcattctgagaaaggagggatgaagatgtgccacacccccaatgatctttcttccttaaaaaaccatgtgcatgcgagagtcttgttgaatttttatgtagcaacattcggcttctaggaaggaaggctgaagttgcataaaaattcaagctcatactttgcttgaaaagat

SEQ ID NO: 334478 - DNA, 1229 bp, Cannabis indica
aaactcacagacgctagatctgatgctgcaggacccagggagttcgagcgttccacccgctgtcaatcctggacagacgggaagcgtggtgaatgatggaacaactcctgttactaaaactgcgcctggtgtgcaagagaccggaaacaacggttctgcacacagccaggacgttcataacatgattgttccaccaggcatcaacgcccagacgaccatcggagatgcaaccgaattgcaaaacctctgtgctgcgcttagactcatggagggtcacaacaataccctgcatcacgatcaggaggaattacgtgccgcagtgaacctcgcgtttgacgaacagaggcgtatgttcgccgagtggagggacaaagagatggaggcattaagggctcaccatgcagaaatcgaagatcgtagtcggcaagccactgtgctgatacgaagagcttatcagactgtaggccagcaggcgccgagcgtcattcccgttggaaaaactaaggatgacccaacggtgaatgcttcccagacaaccaacggtcagtcgtccaatccccggtcacgagttccactcgtgggccaagaggtaggcggacagaccttgttcgggaattcatcaggaggagtcatgctcgatggatccacgcaaaataacagagccattccacctaccaaccaagcgaaccaatcgctgaggcagccaggttcttctgtgtttgaagggttaggaacaccccatgacctatgggacgacctaaacagaagaaggggaacagacgagcagaatactacaacgaatgtgcagttcggagcccatactcaaatccccgctcaaaaagacgctgacgtagcccaacccgaccagaatgccaatgttgtcagcccggccgtacagcccagcttgaagaactgaagaatatgtttcatggcatggccaggcagcgtaataataatcttgagttagaccgtgcacgtggaactcccttctcaccagaaatcaatctcctgccactacctaacaagttcaagatgccaacatggaagatgtacactaggagagaagatcctctctctcatctcaagtattcgagatgcaaatggatttacaaggggtgcgagagacgtatcttgcagaatcttccccgcaactctgtcagaggccgcacaacaatggtatttcaagttggctccaggaagtttagttcatggaaaaccttctctttgga

SEQ ID NO: 334479 - DNA, 584 bp, Cannabis indica
ccccaaataacataaaaacgagaaaaatagggttcccaaaaatttcccaaccggcagaccggttgcacaaccagaattctggttctggaaattcctgaaccccattcggaattccagttgcacatccggaattccggttcctcgcaggaatcattcaaaaaattcataactctttcaaatcaaacccaattcataccaaaccttccagacctgttctaaataccccaaagaacatttctaaagcatcaaaacaacccagcaagtacagatacgaaaaatgccatgtgagcaccaagctttgagttaaaactcaagcttggctaaagctcacctacaagcatcaaaactagattcaaactacataatcatgcatataaaaactgcagaaaaagaactcaagcacaaccaaactctacaacaactattttcacattttcactttgaaaaccataatttttacgctaaaattcacaactttaaacaacacaactaacatgcatcacaagcagctctattctactcaattaatcaagattaaacttctataaacaacataaaaaacaaagcagcaactatgaatcaaa

SEQ ID NO: 334480 - DNA, 870 bp, Cannabis indica
ttttttattttttttttaagaataaacttaatatgtacatatatttgaataaaaaaacacaaaatatttttaaaaaaaattgctacttcaccttttaggttttgacataagctctagaatttgaaggtaccactgaaaactcttaatttggtatggtgggctgcttcaaattatttgcccatcttgacattaagtggtaagagagtcccagttcaaactatgtaaccggtttgtcaaaaaggtgaggaaagtatttccatgcacttatttcctttcaattgctgctcaatgttggtagagacttttggctgcagttaggccggttgttgctgttgatttttgcagctggtttgattaaattttgtaaaggtgtcgtaaggacaagtgtggggaggttgttatattgtgttgggggttatggaaggctcgaaacgaattggtttgaaaccaaaagtatgccacggtggatgatgttcttatctcatttataagttgtcttgtgcaatagaagtcagcccaaaatagaggttcaaaggcttcttttccagtttttgaagctggtgatggagctgaattttgggttaagccgtaggagaatacaaacaaggtaattgttagaggtgtacatcaaacccctcaaaccgcccgcaccgcaaaaaaaatgcggtttgaaattcttcgcggtacggttgcggtttgaatttttcccaaaccgcgcagtgcggtgcggtttgcggttttgaattattaaaccgcaattcaaaccgcaccgcatcttttaaaatttcaatttttatatttattttattaagcccatacatatgagctcaacccaagcctataaatcttagggcaaaatccataactctt

SEQ ID NO: 334481 - DNA, 1592 bp, Cannabis indica
ggccgagggccgatatccgttgatagaaaaactcgcctactgcctcattctagcaacaaggaagttgaggccttatttccaagctcatcctattcgggtatatagcgaccaaccgctatgacaaatactgcgaaagcctgatgcttctggacggttactcaagtgggcggtagaattaggtcagtacgaaatcaacttccaaccccgaacaacaatcaaaggccaggccttggctgactttgtggtagaatgcacaggaaaaaaagaaagcataccagaaagaaaccccgagcaagcacctcagccaagtaacaatgaagacaaactgacctggaaactacatgtggatgggtcggctacagagcaactatctggcgcagggattgccctcgtcatgcctagggggcaacacctgcacgctgtggtcaagtttggattcaaggcatctaacaacgaatccgagtatgaagctctaatcgctggactaaaactagcctgggaaatgaatgtcgaacacattcaaatctgtagtgattcacaactggtggtaaatcatgtatccggcaaatacgaggctcaaggagaaaagatgatagcatatctaagcaaaatacacgacctactcgcacaattcaaaagctactatctcagacaaattccaagagaagaaaatacaactgcagacgcgttagctcgattggcaagcagtaatgtaagtgacaaggcaaacttggtccctatctagttccttgaagagcctagcatcactggcacggaagaaatcgaaatgattgacacgtccgcaaattggatgacaccaatagcagcctacctcaactctagggaactcccagataaccgaaatgaagctcagaaaatgagaaggaaggcagcacgatatatcatagtagaaggggtcatgtacagaagatgattctcgatgccattactcagatgtgtcactcaaaacgaagctgcacgaatcctatctgaagttcacgatgaattttgtggaaatcacaccaccagacagagcttatccaagaaaattctaaggcaaggttacttctggccaatgatgattgaatatcgagagcctatgttaacaagtgcgataaatgccagagattttcaaagataccaagaacttcgcccaacgagctgacacaaatgcaaagtccatggccctttgccatttggggaattgacctgatctggaaattacctaaaggtaaaggcggagtacagtacgcagtggtagcagtcgactactttactaagtggactgaagcagaaccactggcaaccattacatcaaagaaagttcaagactttatagtgaagaacatcatatgcagattcgaactaccgtacaaaatagtctcagacaatggcaaacagttcgacagccaatccttcactgatttctgtgtgaaccatggtatcatcaaaagtttctccgcagtggcacatccttaagcaaatggtcaagttgaagcagtcaacaaaaccttgaaggatatactaaagaagaaactcaaagatgccaaaggaaactggccagagaacttcccgaagttctatggtcatac

SEQ ID NO: 334482 - DNA, 818 bp, Cannabis indica
gtaaagttcatttttattttaatttttgattttattaaagtcgggtctatgtccggggtcggattcgggttaaagtcaaaagccatgctcgccatattacacaacagaatattggaggagaacatacgaaggaacaattatgccagttggtgacgaggatgattgggaattacctgatgacataaagaacatgacagttggagtgcctgttgagaagcaaccagtagggcgacccaagaagcaaaaggttggaagaattaagaacaaccgaactgcttgtaatggtgaaaggattatcaaatcacgaaaatgtagcaagtgcggtgccaagggacacaacagaagcacttgcacctaccgaggtttaacataaatttttagtttattagtattgtgatgcgctggactattatgttatttatatttatggtgtaaaatatttttaatttgtggcatgaacatgtgttgtactgttacgtatttcttagaaaattatttctaaactttgttaaacatctgagccaaaaacaagttctactgataaaataaaataattttagtgaaagtagtttgttcaaattgaaaagtgtaaaagtaaacattgttcaacaaatataaaaaattaaacatctaaagttcatgccaagttctggtagaataaatctactgcccatctctggcgaaagagcgacatatgctgatcatgtactccatcgaatggtagatccaataacttatgctcaatatgctctatgacgtacattccacaatcgccgctgcaatagtaggtaaacgcaaaatttaataaaccatagaga

SEQ ID NO: 334483 - DNA, 900 bp, Cannabis indica
aattctaaaacatagactaaaaacataaataaaaagtctgaaaaaaaaactaaagaaaacacttgggctgcctcccaagagcgctgtctttatcgtcatctagccggacgctgagttgttgtctacagaggcgctagaataatggcggactttgcttggtaaatttgatctcccaagtaaaactttaaacgctgtccattaactttgaaggttgttggaccttcacctttcaactccaaagctccatagggaaacaccttgaccacggtaaacggtcatgaccaccttgactttagcttaccaggaaacaatttcaaccttgaattgaaaagtaacacttgctgcccaggttgaaactccttcctaactaagccttggtcatgccacttcttggttctctccttgtagatcttagcattctcataagcctcattacgaaactcctccagttcattcaattgcagtagtcttttctctcctgcagccttcaattccatgttgagagtcttcatagcccaaaaggccttatgttctaattccaccggcagatgacaagcctttccaaacaccaaccgatatggtgacatgccaatcggtgttttaaatgctgttctatacgcccacagtgcgtcatccaactttcttgaccagtctttccttgatctctgcactgttttctccagaatcaactttatctcccggttagaaatttcagcttggccattactctggggatggtacggtagagcagttctatgacggacaccatatcttgaaaggagtgcttcaaactgtttgttgcagaaatgactcccttcatcacttatgattgctcggggagtaccaaaccgagtgaagatgttcttttgaaggaagaagagaactgttttaccatcattc

SEQ ID NO: 334484 - DNA, 778 bp, Cannabis indica
tcaaaataacatacttatattaatttggatcccgttttacaaaatatttacaaaagctttacagtgcattacacaaaagtttgtcgcccaatgactatacaaaatatgcccaactgtcccaaagatcgtacgatccaagcctaactgccacgacatgtacaatctttatcaactcgctctcacgtttgctcaaccttagctttgcccttacctacacatgcaaacaatatctgtgagtcgacagactcagtaagaaaagcataaataacaatatagcaataactcagattataattaagcgcccatgcacccaaccataaccctatcctcgggtctgacacggtgctgagtctagaacgttcgtacaaccatactatcaaccataatatcagcttatatttagtatgctagtcatactctagccattctgatgtgatagagttgatcagtatctaagccatacatacatctatcaatatctaatataactctacgtatactaatactactatcgatataatctaacaagtgtaaataacatgtaaacacatatgcataacattatactaatcttacctcatttccaaatttaggtgtgccggccaacctgagtggaacagctgctcgacgatttacaggcccctaaatcacattattcgtaaaattggtgagtgacacactaaatcacaatttggggacttaaacttgaaactaaaagtttccctatcgatggataacatggcaataccttaaatatcaaaaacgggaaaactagggt

SEQ ID NO: 334485 - DNA, 1267 bp, Cannabis indica
cgcgaaaggtccgctcaaatttctcgaaagggaaaaattcgtagaggggcaaactccaaaagggagtcttggccctcaggatcgagaggacagaaagatcgtttccgtgcaccaagagcccgaagggaaaggaagaaggggccaaaaatgtcctcccattgatctgcgaaatcagattaacaggaaccaaggtgatctccgggatcacgtagaccaaaagaaatacggacccgcggtctccacgggaatgttaaatgaaggaatcatggcagaatttgccatactccgaaaaagacatcgcccgagtctctcagagatagaaaggcgacgactctaactctgattctgaggaccgggagccatgtgctaaacacatcctggaagcagagctccccaaaaactttaagatgcctgaaatggcagcttataccgggaactctgatttaagtgatcacctgtcacggttcaaccgagtcatgacagtcatgagggtcagcaatgacgctaagtgtttgtgcttcccgcttactctaagcggatccgcagaagaatggttcaagaaattggaaccaggatccgtgggttgctggaataagttacaaaccaacttccggagacagtttgtcgccgcaagaaaagtcaacctggaggtcagcgctttgactaacatcaagcagctgcctacggagacactgaagaatttcataaagaggttccgggaagaagcctctaaaaccaagaaagtagatgacggacaacaacttgctcttctccaagcaggtatccgtacagggactccattctggaacgagttacagcaagaaggagcttccagccttcaagacttccagaagagagtccagaaatacatcaacctagaagaagcccaaatagtggcctatggaggatactatcccaccgggatagcaggatatgtgcccggagcccagctctcaggcactatgccagcagcaactccaccgatgagcggcatacagttttttgctactcccggacatagccaaggccagaccttagcccccgcatcttcccattttggaaatccctcagggataattggacaagccccctcacactccactccgactgcaagtttagccggtccttcccagggctcgaggagtaaaaggtcttccaagggcaacacccagacggaggataagcgacaaaaaagggggtatactcctcaatatacccagtacacggagttgacggactcccaagaacgtgtatattttgctactag

SEQ ID NO: 334486 - DNA, 742 bp, Cannabis indica
cttcacatcgagtctcgaacggtcatgctcgacacgtgtccccttccaaggcagagccagctcgaaagaagtctatacgcaacctcggaggtcccgcacagacttgggggtaaatgttatcccaaaattggcactttgacgtggcatcacaagaatggtgacacgtggcatcaacttagagcacctggtcggatcaacatgccgagcaggatgcctcgctggcatgtccataatggaatactcaacaagccgtgcagaatgtgcaacactcagccaattcagccaagcacttcgtgagtcaccagctaaatttctataactcagggatcaacttgcgtggatatggaatacacacgattccactatcagtgtatacggcttcaatcccacgatcctagcattcagcaatgatcccacgatctttgtgttgatgcgctttgtaacgagagagaaaactcttcctcctcaagtttcctgccctataaatagtgaggaatattcagcaatgatcccacgatctttgtgttgatgcgctgtgttagtgttattattttgtggcagtgtttgttcttttcaatgtctagtcgtatctggatttttagtctgttatatctgcactaacgtttgtttacgtgagtctcatttcagttttagttagtgccaactagacttattttgtggatatataaaaggtcggtttctgttagtaaagtggttatccattaaatcgttcagacagtta

SEQ ID NO: 334487 - DNA, 741 bp, Cannabis indica
tcttaatttacgagtatctccaatagagtgctataaatgtggtgcatatgtattttctagctcatgtttataaaattaaaatctaatagtggtgtataagactatctctaatagatgatgtatatttttttattaaatttgacttaaaatataccataaaattatgtttgatccaatttttgtatttgtgctctaataaataaggtgcaaattagctatataaaagtcaatattaccattaattaatgctcattaacaatatacaaagtaattatttttatttatattattttaatatctcataaatatattttattgaaagtcaatgaatagtattaataagtgacaaagagataattaaaaatataatatttattgtgggttaaaatttggcccatgcaatcttttgagctaaatttgacattatttttagtttggaccaaatttgacacacattttacatcattattagagttaaattttagcaaaatattcaagaaaaaaaaatggcaatatatacactatatttatacatattaaaagttgtgccaaatttaatacaaatttagcataggctgaattttatcacaatagatatcatttttttcgtatacttttgtatcactccttaatataattcaatcattactataattcataacttttcatatttttatttatatatttaagggtttgtttggtacactgtattacaccaactgtattgtataatattatatt

SEQ ID NO: 334488 - DNA, 505 bp, Cannabis indica
ctgatatacatgaaggagagtgcagtaaccacacaagaggatattcaatgtcaaggaaggtattaaaacaagggtactactggcctagcttggagagggatgtgatgtcattcgcaaagaaatgtgacaaatgccaaaggcatgccagctacagtaaacgtcccccggccgaactcacaaacatgactagcccgtggcctttcgccatgtggggaattgacctgattggggcctttccaacaggaagggccagagcgaagtatgcagtaatagccatagattattacaccaagtgggtagaggctgaggcactagtcagtatcactgtcaggcaagttgtgtccttcatcaacaaattcctgatatgtagatttggagttcctcacaagatcatcactaataatgggaccaagtttgaaggagacttgttgagttcatactgtgcggagaggggcattgagtggggattctcggtggtagtgcactgttgggttttatgccttaa

SEQ ID NO: 334489 - DNA, 551 bp, Cannabis indica
tcgagcaaaactcaacttaaagagtagggacaaactgtagaggctaaaattgggctcaggctcactgtcacatgcgatgtttccagtgaatgctagaacaagattgggttggactatttgactagttatgacgatacaatcaacataccaagccttagaagcccaaaacgacacagtcaagttagacattaacattatccatgatccaacattgagctcacgatgatctgacctgtatacgagactgagtcttaacactcatctaacgatctctaaagtgatcagtcaaattgaccacgcaaataacgatctccctgatcaaatgggagaggagcgcttcacaaggggatgagtaacgcctttctatggacgcctataagagccactcttagttactgagagaggcacatcaatttcagtcatctcaatagttcttacttatcctctctcattctctctaaaactacatacttattttcatagtcaagataggtggtaacttagttcgatcatttattctcatcttttttattacattgttaacaatcttg

SEQ ID NO: 334490 - DNA, 533 bp, Cannabis indica
  modified_base (506)..(506): a, c, t, g, unknown or other
attaatggactacaagtaagaattttgtaaatataattctatattgttaaagagtgtaattctatatttacaccggagtaataatagaattaataaactaaattattctattgatgagatcgataataatcaagtatttattggagcttcaaaatataagttcatggtccccgagtcacctctatacaggggtaagatcttatttgatgaataaattttgagtgagaattaatttaaatgggaaaattcttaagggtaaaatagtaatttgtgaaattattattttgattaattatggaaattatgaattgtataattaatagtatttaactatttagttttattgaatgaaattatattaattagttaactataatattattcttaaataatattaaagagagaaatatatcattttatagaaaataatatttgttttaatccttgtgaaataagaaatgggctttttcatttttacacttcaaaactagttttttttttttttntttttttttttattttttactatttta

SEQ ID NO: 334491 - DNA, 880 bp, Cannabis indica
ttgaagctatttaagccctctataaagtcatagctcatacaccaagtgatattctgaagctattttcatcaaaattcacccctaaaggagttacaaaagtaaactctgtgtatctcgcaacgggactcgtcagacaccaaaaattaaatatctttgtcagaagctatttttaaccattagatcatcatcaatggtggaaaacattttatttgtaatttatctcgtatttctgtgggcctccttcacctataaaaggagagctcccttagcttacttttcatattcaaaaaactactcataaggtcagagcttatctctcaagacattctctcgctagagcgtcaagtttttgatccttaaacacttgttgttgtcattatctcgtgagaataaaaacttgaagtagacgtagctccattactatcgcgacataggggtgaactattttaaattactgtgtctctcattaattactttacaactttttatattctagccaatctagcgagcgggtgttgcttaaaagtctaatcttgatttttgagtcaaaattttgtgctttcttggagagccacaactcaagaaagtcactagtcaagatggttgcaacatgtcctacaagtgttgacagatagactccagtagctcgccaatcaactggggcatgctagttgatggagctattcctgagattactcctgcaccccaggcactaggagcaggcctcagaactagctcctcaactcgtcctctaaggccactcccaccagctcctaggactggcactaacgactagatcccacctaaggagccatgtgtggagataagaagacccctaaggaggctatgtcgggttttgtgccctaaataaacccattac

SEQ ID NO: 334492 - DNA, 479 bp, Cannabis indica
cattcggagttccggatgcacaaccggaattccggttcctcgcaggcagaaattcaaaatttcataactcattcaaatcaactccaaatcacacaaaaccttccagacctgttctatatatcccctagaacatttctaaagcatcaaactcacccagaatgcacataaacaaaaagtgccattaaagcccaagctttgagttccaaaactcaaacttggttaatatcaactaacatgcatccaaaccatgattcaaactcataatcaagcatataaaaactacagaaactaaaacctaactcatgcaacaactacagcaacaattcacacaaattcactttgaaaactcaagctttttaacaagaaatctatccaactagagcaagaataactagcatgcaattcaacctaattaaacatacttaaatcaacatttaaaacatagaaacaacagcagcaacaagcagcagcaacatcct

SEQ ID NO: 334493 - DNA, 593 bp, Cannabis indica
ttcagtaaactaatataattaccgaaataagagctcttccatttatatattttagccaagctctaaggaaaccattgtttcacttctagacaaactagaagctatctataattaaggcttccactcaattacactaccgagttctatagatataattatgggttagtccgacaggtaagttggtaacaaataagttaaagaactcgtatactacaattaggttaaagcttaatcatagcaggattgaaatcaatcgatctaaaatttaatgactttgacttagaaaagatataatattataagtttaagatatcttttccattaccagtgttggtccagtctgatgtatagtcatgatcaataaattcgatacaagtttactttgctgatgtcctagaaataaattctacttatctaagtgtaaccaaatcagattattgattatcacgtcagtgtaaattcgattcactaataaattatggaactaaataatttcaagcatataatcatgattatttttagttgtgttaacaacactataatcatgaataactatatgtttgagatttaataaaatttatatattaaacata

SEQ ID NO: 334494 - DNA, 571 bp, Cannabis indica
gacatattatattcttcaccataaagtctagtactttttagatgtaattgtttccaagggcttgacttctgtccactacgtaaaataatcaactgcgacactgcatactgtaccccgcccttacctttgggcaattatccgatcaagtctattccccaaatagaaaaaggccatggactctgcatctgagttacctcgttgggcggtgcacggagtatttttgaaaatctctagaatttatcacatttctttacataagcctttgaatcgtccatcatggtaggctagaaatatcctagccttagtattttctttgataggctttgccctactgcgtggttgtcacaaaatccatcatgtacttcagacagaagccgtgcagcttcttcttttgttacacatctaagtaatggcatggagaatcctcttctatacatcaccccttccacgatgatgtaccgtacaactttccttctcatcttccaagcttcgtttctgtcatttggaagttctccagtattgaggtaggctactatggatgtcatccagttcagagttgtgtctatcattt

SEQ ID NO: 334495 - DNA, 1301 bp, Cannabis indica
tcatttgtttgaatttcttttctatttcttctatttttctcctttctttaaatatttgaagtttgttgaattgtaaagaagtaagtagcagccatggatgaacaacttttattttggattttatattctgatttgaacatgagctaaacctcttgaggcttgaatggctatgaatctctatgttttggtatgattaatttttagcatattttagcaactttgtctctgttcattcaagtaaacttgttatttattggttgttattacttggccatgagtaacaatttactaagctagatctggttggaaagacaagatctagtagttacaacttggatgatgcaagtgaatacctagatttaggtttttcttagtaaatgaaatatgagtatttcaattgccttgcataacttgagaattgatgtttaaatattgttttgcaatctggtttgatataggaatatattaattatgtgagttttggaaaaatctcataaacattaaaaaattcagttaactctgtgcaactttgctggaacaatgctgaagtaatgctgaaaaactgggcagatttaacataagggggatttatctattcaagtctatttttccatagataccttttcttgcaaataatgttccattattaattgtgttattttgagtttatttttagtgtcactaatttgttttacttttatcaatcatccattcatttttgtttatttttatttccaaggaccttaagttgttaattagttagtttgacatttattttaatttgcaattcctgtggagacaatacttgacttatcattatattacttgttgtcgattgcgtgcacttgcgtataaatattaattttcacaacaagtttttggtacaattgctagggattgaaattaaaaattgtgtattatcaactattttgcaatttatttttggtttgaggttctaacctcactttggtgcgctgtatttttttgaagtgttgtcgaggatttagcttctacccacttggtaaagtagtctacatcgactacaacgaactgcactcctccttttcccttggggagttaaccaatcaagtctattccccatattgtgaagggccaaggagattgcatcatcatgagcttattaggtcgagctctagggatttttgaaaatctttggcacttgtcactttttttgacatagtccatcggatcttcgatcattattagccaaaagtaacccctattagaatttttttgggtaggctttgcccccgacatgattgtcgcagaagccttcatgc

SEQ ID NO: 334496 - DNA, 561 bp, Cannabis indica
aaaacatacagccaaccagaaacacaatctcacattaaaaacctaacctaaaacacaaaactcaagaaggaaagaaaatagaaagaattaccttggccaaagccaattaaataattacaaactcccaagggtaaattggtcatttaccaaaccccgaaaattctaacacctctaatatctaacaatgataccccaataataaaattttaaacatataaaatatgactctctaaaggcccaacgtcattttccacagcttctgaacaccaacacagagattgagaaattaagtaatttacataaaatagcataataaacatatatgaacttaattatatttccacaacatgcattttataaatattaattaaatctcatatataaaccctaattaattaataatccaatttgttaatctcaagcggtctttacaaatagcaccctttatagcaatccatatcaattgtatgagattgaattgctaacctagttattgaaggattactatcaaagttgttgctgttgggttttgtaccctaaataaaactctgtttcaatgta

SEQ ID NO: 334497 - DNA, 946 bp, Cannabis indica
taaattttcaattcacccctcttagaaacatattttggattaactagttcgatatttgtaaaccctagtctaagtagtaggggtgtgcagaaagtcatccgatccaatcccaaccgatcgatccaatcccaaccgatccaatagaatctgatatccaattatgattggatcggatcggatgttggatgagacatccgatccaatagataactgaaccgatccaatccaatatcatccaatgtccatccaatcatatttaatatttataattttatatagttaattattttatttaatattttatatattattttattatctgtgttggattattatgttttaaattatgtttttcatatatttttttttttaatgaaatcaacctaaatagtggctataatggattggattcattggatggatccaatccaatccaataaaaaaccagttaaagcatctaatggatgggaccgatccaatccaatacatccattggatcggatcggatgactcaattcaattggattggatcggatggaaaaatccaatatccaataaataattaaattggatcggatgggtccaaatccattaaatgtgatccaatgaacacccctactaaatagtcattgtaagaatgagtctactagagttcagatttacaaaatacatatctttcaagatctaacagtgttaaattgtctaatggttgatcatccatagtgggacgaatctaacgtgtcaaggtctcattaaaaataagaactttgttagatcgacaatggagatcaaatgtcttatattaaagctcattactttttaataaaaaaatattttatttatttattatttaatgtatatatttatttaattaaaattaccaaaattattttgattttattatttattttatgtacaaattttaatttaatattattaaaattat

SEQ ID NO: 334498 - DNA, 1507 bp, Cannabis indica
taaataaaaaaaaagagataagaaaaatcttggttgaaatgggcttgattctgaacggcctaatcaatgcgaggaggaaggcgaggaccaatacgcgcctcaagcatggtgtcaagcttcttcttcttctcctggtatttggcaatcatctctgcaggttttgggtaaaactcaatcttgatacactgaccatttgtcgaccaggccatgtagacgccgtcatcgaaatgcttgatgcaacgactgtaggaaacatgggagaggagctcatctttcttagccttcttcaaggcttggtctttaaagtccttgagctccttcagctccatggccaagttagtcctgctctccaagtccgccttgcgcaattcctctaaggagctcaccttggcggccatctcgtctaaggcctccttggcctcccgaagctcgcgtttggccttggcaatagcctcgccctctgccctcaacgcttcccgatgcttcgcctccagcctatccctccaaaggacctcctctcagatcatcgcctctgcctgggcttccctttgcttagcctcttcctcgaacttggccttagcaagagcctccttccgctcagcctcctcttggaacgcccgcctttcagcagacaagtcctgcaggatcttcacgacctcgtctatgcccccaaattcggacaagacgaagccatgattaattatggttttggaaaggcggccggcctctgcagtaatctggaaaaggaagtaagagtgagtgaaggccctaagtaaaataatgaggaaagaaataaatcacaaagtacttaccgcagccaaggcatggctgagatcctgaacctggtagacagagttcaaggatgcacaagcagcgtaccgcttaggcgcgcaccgagtcagctgggagagtactcactggtcatctcggaggcaaaaggggccaaggtgggcccgaggaaacggttgaaccaatccgtcagggggtctaggttcagattccacagattccggtagttctcctcattaagagagttttgcacctcctctcgcaaaatcctcctcaaggcctccacctcagcatccccgcgggtgtactcgttgatggcataattatacttggctacccgaagctcttgcctctcctcatctcaggtgatcggagtcagcacaatgccgtgaggcattgtaaactcctccgcctcgggagggatcccggaatcatgactcggggccgaagtgtctaccctctgcgcgcgtttagaagactcctctcctaccttcttgcctttgcgcttgcgcaccagagcaacctcttgctcttcttcactttcttcaacttcttcaggaagagccccttgctcttcttcaccttcttcagcttcctcaagaagtacctcctcctgatccactaagtaaatagtgttcggaggggcactggaagaagccttcccgagggtgaccatctgggaagaagtagggggaaaagggaagcatcaggactgtgg

SEQ ID NO: 334499 - DNA, 656 bp, Cannabis indica
attaagggacatttatactttttgaaagcatataatcataattacctttccactgtactgacatcactgtaattgtgaataactatatgttatggatttaatagaaattgtatatattaaaccataaatatgaaaattacatataaacataaataattcctaatcttcaattgatgacaaatcagattattttgaaatagattttatttagggcataaaatcccaacaaactcccacttgcactaacataaaacaagtactgcatttcaatcaatccattgtatttatatccagatcaagtgtagtgattttgactaaacccaaattacaggaattataaggctgtggtaagcaactgctttcatcaccattacttcctttgtgttcataaaatattatgcaacatcattttttatatgtattactcatctagggattactaaattctttactgctcattaagtgcaactgaatacacataagacacatatctaattctatccaaaatggaatagagactaaagacagttaagaactttctttagtttgaataactttctagtgcttttcgaaaacaaataagttactttagcttcactggtggaactaaattattacagatggggttttacatccttctagaataattcttccac

SEQ ID NO: 334500 - DNA, 788 bp, Cannabis indica
gtgttggattttctggtatactacaaggtgtgtggtgaattttctggtatgctggggaaggattgggtttggccagtagaaggtgccattgcctcaggaacaatgttgggaaacatagcagaaccagtattagtgcaaggtttgtaaaaaaacttgcagtaggagtaaaatgagtagaaggtgcatgagttacctctgtgatgttgctgggttgagacatgccgggtataaaatttcattaaagatgacatttctggctatgaatattcttccattcttgttttcacacaagtatcctttatgcattggagagtaccccaggaataaacattgctcagatctgaaatctaacttgtgagaattgtaaggtcttaaatgagggcagcaagcacagccaaaaggttttaggatagaatagtcaggtttggtgttaaacaaacattcatagggacttaaattgccaagaacaggtgtgggtaacctgttgatggtgaatgtggcacattggaaggcatgcaccagtatgagagatctaagttcgcttgtgaaagcaaggtaagccctgtttcagtaatgtgttgatgctttcattcagcacgaccattctgttggtgagtgtgaggacaaggatgggaatataagatgccttgatcagctagaaatctagcaaaaggcttgtactcaccaccaccatcagcttggacactcttaatgggtaacccaaattgtttccaccatacttttgaatttaataaagctgtcaaaggcctgggatttcaatgtgagag

SEQ ID NO: 334501 - DNA, 1105 bp, Cannabis indica
tgtgagtagatctaagatccctgtaaagtaatatccaacaattgaatggcgagtaaacttgttaaaccagatgtttgctgctccaacaagcgaggtagggaacaaaatacagcgtaaattattcgtcacattactcgctcgcattattgtattaaaattgttcaaattcgagaccggatctgtggttctgtcatacgacgagacatgcgggtttttaaatccctgaggaaaaggggtaattcataatatctgagtgatatggctcaagcttctcgtatgaatcttatccagattgtctcccctattttccccccacctcgatatctcctgaacttgtcttccaactcgtctattcgtaattggatgggatactcttgctttggactgagttgttgacgaaggtcaggtttctttcgattcaagtgctctcgtagatccggttgggagtagttgctgacagacttcgtcttactcatagattgcatcctactcatagacctcgtcctgctcatggactttgtcttcgagtgactcacggatttactggtccccatgctttctcgatcattagctcgttgagtactttctcctcttcgagttgaccgactgtaggtccttgaccgcctcgaggtcacactttattcttcacgctttgttctttccccttgagtgtggtttgtcgtatttccctattagggtctgtacgagccctcgctctatgggtttgggaagaacgtttgtgattccccgcaggtgaccttcttctccaggctgagtcccaagattttcctcattttcatgaggaatttctcgttcattagtttccggttgcctcccattctcattttcgtgagagggttctggctggtcattctgacttcggggggtatctcattttccctaagttgttcttccctgacattttcctatctcctggttcgtgagctacgaagcctgcctcgtggtcactctaggttcaggttgattctgagcattagttccctgtgctgccttagccacagccgtgtcacgttctaacgcaacgttcgactgctgcgcctctccagacggcgtctaaggcggcgatttttcgtttcataaatat

SEQ ID NO: 334502 - DNA, 1868 bp, Cannabis indica
gttatggtttgggttcgattctggtctcaagtgtgggtcctagtcattgttccaattatgattccgggtctgggtttggttccgggtctgggcatgggtctaggttggggtcgggtaatgagtcttcctccgagtttgggtacgggtttttcggatcgcagtctgggtccaggttcgattcctgggtctgggtcccaggttcgtgtctgggtctacgtctaggtctgggtccaagcccagtgttttgatccgggtctgggtctgggtcggtattcgggtctgggtctgggctcgtgtccatgtctaggtccgaatcccaatttaggtcaggggctttgtttgattccgggatcgagtctcgatttcgggcttaagtctcagtcctagtctgggtacgggactgggtcggggactggctccgaggccgagttctagggttgggttctggtgtaattcgggtccccgcccaggtccaggtactggtcacagtccctgtcctgttcaagggtcctggtcatattctgattcaagtttttgtttcgggtccaaggtctgggtctgggtccaggtattggtccagcttcgagtctttgtccgagtcccagatcaagacatcgactatgggtcttgtccaagccccggttctcagatcctgggacaagatctggatcctaatcacggatcccagtcgagtttcaattcatgccccaggtcccgctctgggtatgggtctaactgtgggaccgagactggggtccagttttgggtttcaatccctgttctgggtcccgagtcctgttcaatgtttgagtctgagtttaggtctgggttcgggtctcgagtcccggtttaggttcaggttcaagttttggacccaatctcgtggtgggtctatgtccgagtccgggtccaggtccggttacagttttgggtctgggtccaagtcctggtcctgttcttattcctgggtcccgatccgcttctagtttcggttctagtttcaagtaacggggtacggctttgggtcgagttttggttcgagtctaggttcggatcctggtttgggtcatgggcgaggttcaagtttgagttttagtctcggttagggtccgaggctggatctggtttcgagtttgggttcgggtttaggtcccggtactgttccaagatcccgatctggttccagttcaagtttcggttttggttcccgtgtgtgagcttgggtcttgtatgtatctgagtcctagtttgagttcgagtttgggtttgggttctggtctaagtcctagatccagacaccgactacgggtcgggtccaagcatcgagtcccgaatcctaggtcctgaggtgggtcctaagtccaggtttgggtctggggtcgagtcccggatcctcatcgaagatctgaggcccaagttctggtcctagtttgtgggcccgattccgagctctgggtcccccatctatatttggatcctaggtcccaatatatgtcaaagttcgtgtttcgggtccggtctgagtcctggtcccgatttgggttcgggtccgagtttgggtcccagtcccagtttgggtttgggtttcgtgttccaggtccgagtctggttcttgggtcctgggttcggccctggtttttgggtttggttttggcttcgggtctgggtccaagtcctggtcttggtttaggtcccaggacacaggtcccggtctgggtccaagtcctggtcttggtttaggtcccaagacacaggtcccggtctaggtccaagtctcggtatgggttctagtctgagtttgggtttaggtttgggtcctgctacagtcccatgtccgggttcttgtaacaccctaactaccataggcg

SEQ ID NO: 334503 - DNA, 987 bp, Cannabis indica
agttatttattagagtaatttgccacataaaagaatggttgaatactcaattcaaaataaaagacttgggtgaagctaattatgttcttggatttcaaatcattaaaaatcagaaaaacagatcacttgctctcttgcaagtagctgacattgataaggtgctaaagcgtttctcaatgaacgacaccaaaagggcagttatgccttctagacctagtgtgcgactatctaaggaatagtgacccactgatctccaagagataaaagatatgggaagatttctttatatttcagcagttagaagtttaatgtatgttatgctatgcactagaccagacatttgttatgtagtgagaatcgtgagtaggtattagtcaaacttaagaaaggaacattggacatcagttaagcatattttgaaatatttaaagaggataagggattatgtgttagtctacaaaggtggtgctttaaatctcgtaggctataccgactcagatttataggcttgtcttgatgacagaaagtctacatctgggatggtattcactattggggtggaacatttgtttggagaagtgtcaagcaatccgcaatgtctgactctattacggaggtcgaatatacagctgccgctaaggttgctaagtaaacaatctggctaagaaagttcttcacaaaactttatgttattttagggatggaaacccacaagtgttactttgtgacaacactggtgctataaccatcagtaaagagcctcgaagccataagaggagtaaacacattgagaggaagtatcacatcatcagagaatatgtggcaagaggagacgtactggtataaaaggttaatactgaagacaacctagccgacccattcaccaagactttgaccgagactgcatttaaaaagcacaaagagaatttaggattaattgaaatgtactgtgtaacaccctaactaacataggcgtattacgtgatt

SEQ ID NO: 334504 - DNA, 521 bp, Cannabis indica
gacaaaccccatctcgcaagagaatgggctgccatattatttttccgagaagtccaacacacccctacattgccattgtcgaccaaagtgagaatccgattgaaagcaaagtgcatcagccaatgcggagaacttcgctcagagaaagccttcaccacagtttgattgtcggagtaaaacgttcccacatcaacccccagctgagccgccatattaaaaccaaaccgcaaggcttcaagttccccatgcagaggagaattaaccacagcttttgcagctgctattgcaaagatagtacctgaaatgtcaaaaatagcagctgccaccgcatccccatcagaagccgaagcataatcaacaaaacacttcatcctagcaggtctcggaagcccccagcgagtcacacaaatccccccttgctgcggatcgtcgattccaccctgcaatcttaactgcttaaactccctaaaccccttctctatagatttttttatttcatccaacaccagaatccctttgtt

SEQ ID NO: 334505 - DNA, 690 bp, Cannabis indica
aattccaaccaggttaatggtgtcggtcagtacattagccaaactaaccaatcattagatagccagcatttccgattttgatacattgggaactactcatgatctcaaaaatgatctgaataggaggagaggagtagaccatcagcttgacatgccgatcgtacagcccagaacctgcactcaaattcccgctctgaaagatactgacgtgactcagatcggccaaaatgccgaacaggttagtctagctgtgcaggcacagctagacgaactaaagaatatgttccaaggcatgaccgattagagaaacaatgattttgagttggaccgagcacgtggaacccctttctcccccgagatcaatctcctgacactgccccacaaatttaaaatgccaacctggaagatgtacactggaaaagaagatcgtctttcccacttcaagtatttcgagatgcaaatggatcggcagggagtacgaggagacgtatgttgcagaatttttcctgccaccctctcagaagccacccagcaatggtacttcaagctggcacctggaaagttcaattcatgaaaagctttctccttggaattccatgcacacttttcctcctctcaccaacttctgttgcaccttggagacctggttgaagtcaagcaaagaccaggcgagcctctctgagcctacat

SEQ ID NO: 334506 - DNA, 2228 bp, Cannabis indica
gttgatcaagtgttaccaccagcacctgtgccagtgttgggtaagtaggggtttgtaatgccgcaccgagattctgtatttgagcattttttgaagttgcaacctctgacttttctgggaggtacttatataataaaggctgagtagtagatgagtactattaccagtatcctcgataataagggggtgacgggaactaaatgagtgaattgtgcagcttttatgttgcaagatcatgcccgggtctagtgggacattgtggctcaaactcgggatgtaagtgtaattacctgggaagaatttaaaaatttgtttgaagaaaagctttacaacattgctgtgaggacctcacatatggaagtctttgtgaatacactctacagtttgatcggctgtctaagttagctggtgatctggtgcctacagattttactaggaaatagaaatatgtgagaggactgaatgccacgatcagtcaggacttgaagattaccacattacatgacactttgtataagaaagtggtagagttatccttgattgctgaggaggctgagcaacatgtaccaaaagaggagactgcaaaggatgccatcacggcatcgaaccctcctactggtggtaatgtcagtaaggggaccgacaattgcaaccctaatcataaatagaaggttgaggcttctagagcatcagggggtaatagaaagtttcgggaaaatagagttggtcgtcagggctgcgggtcctcattccgatcatatcctgagtgtcctaattgtaagagacaccatcagagtgaatgtcgggccaagacatgttttcagtgtggcatggtgggccactttatcagagcttgtcctcaggccaagaaagaggaacctaagaagaatgctactcagaacccagggcgactttttactatgactcaggcttacgctgatgctagtccgtcattagtgacaggtcagttgtctattaatggctgttcttatattgtgttgtttgatacgggagctactcacgcttatgtgtcgagtagagttatagaaagtttacacaagccatgtgatatataggcttcagggtttggtaccttgttaccctcgggagaccttatagtatccactaggtggattcggtctttgtccttctagattgactgtttttaattgaccgccaatctaattgaattgcaactctctgattttgacataatcatgggaatggattttctgtctaagtatggggcaatgatcgacagcaagcgaaagatggtggtgtttgaacccgataatgctaacccagcagtattcgtgggtaaagttcagaggacacgcataacaagaataacactgttgaaagctaaggacttgattggcagaggttgccagggactcatagtcactgcagtggatactagtcaacctgtgaaatctggacctaacaatataagattggtgtgtgagttccttgacgtctttctagaagattttcagggatcgccacctactcgagaaattgagtttgtaatagagttggttccgggagtggatccagtatcaaaggcactgtattgaatggctccagcggaatcgaaagaatgaaagatacaactgcaagagttattgaatctgggattcattggaccgagttactcgtcttggggtgcttcggtattatttatgaaaacgagggacgggtctctccgaatgtgtgttgattaccgagagttgaacaagcttaccatcaagaacaagtatcctttacctcgaattgatgatctgtttgatcaactgaaggggaaaacgatcttgtccaagatcgatcttcgctcaggttatcatcagctaagaattcgagaggaagatatctcgaaaactgcattccgtacttagtatggacattatgaattccttgtgatgtctttgggactcactaatgccccggcggcattcatggatcttatgaatcgggtgttcaaggattacctggatagatggtgattgtgtttattgatgacatcttggtgtactctgaatcagaagaagagcatgaattgcatcttagagcagttttgcaacgattatgggatcacaagctatatgataaattcaaaaagtgtgaattttggtcatctcgtgtgtctttcttgggcacatagtagaaaaagatgggatcatggtggatctgacaaaaattgaagttgttcgggattggccaacaccaaa

SEQ ID NO: 334507 - DNA, 555 bp, Cannabis indica
tttgatcatgagctttttttttgtttaactttttttgtcgttgatttgactttactgtagcatacacatacctaactgttgcattcctattaatttttatttctttttcttttatcttttcagttttcacttgctttctctctctctctttctctccatttttatcaatttttctttcttttttaactttaaaaataattttttattacatcattaatttaaaaaatattatcattgccacctatttttttagtgtgatcattttaaaatgtagaaagtatatatttttcacctttttcaaaatcaaagtcactatttagttacttatcatatcaattatatacttattagttacattttactaatttataattataaaattaaattttttataaataagtaaccaattagtattatgttaatttatttattaaaatatcatcagtcaccaccaaaaactccgacattacaatattttttattgacatagtaaacaactgaaaatattttatttatcaataaaaaaatacatattaataaaagaatgaatcattt

SEQ ID NO: 334508 - DNA, 519 bp, Cannabis indica
atagataatttcttggttagtaaactatggcatggccatggcccatggttgaattaattaagcaaccgattaccggacaaaacaaggaaattagagcaaaccaacttactagtcaaacattcaaccatcatatctaacggtccatatgcccaactactaatactactactattgccattgttgttttgtttttacttgctcccaaacaaaaaacctttcacatttcatataaaatatatattggaaattaattaagggcaaaatgctagactcctgccaataacaataaccttatgatatatttcttttcttattcctaggctggtatttttgttttgatcatagttcatcattcatggcgaggacaagcaacaagaatatacaagctaaattggtgggtatgtttgtattttctatttaaattggaaaatgttgatctaatatgatgagctgaaaaataattaatgggattttcgattcatcatttggttttttattaattgaaaatataatgtgttc

SEQ ID NO: 334509 - DNA, 615 bp, Cannabis indica
aaaaaaaaaaaaagggttccattaaactcaggttggccactcagttaaaatgggttatcggcaaaaaaaattttttttgagcttttactataaaagataaataatatttttaaaaattattaaaaaaatatgtatattttttaaaaagtgttttctctatttagtctcctaaaatgagtgggccataggcgcggccttagcccgcctatacgtaggggcggccctgattacacttttattcattaaagtaggaaaatttacatggtacactaacttttaccttttttttacaaaaatattgtcaggcggtattttttactttttttctatgtatttttataaattttatactgtagtatactatgtttattcttttatttgttttagtgttgttttacggttatttttcataatttatttttttaacgtcgatttgagtgttcttgctccatcttgttggaaataatgattattttctaggtgttctcatggtgctgtggtaattctatccgtgggtgtggaagatggaggctataaaatacatttcttcttccttctctatagttattttgtggttatttttttttttatttggttctcctaaaaatacatttg

SEQ ID NO: 334510 - DNA, 469 bp, Cannabis indica
gttttagttttattcttttttattgtttgaggacaaataatagtttaagtttggggatgtgatgggtatttgttcactaattcttaatcaattattagatgaattaatattgatttcgtgaagttgtgtatagatttgatgtgtttatctaagtgtgtaggtttgtgcttaaaatataattttgtgatgaattgagatctttgaaccaattttggactaattgttttttttttttttttttttctattttctcaaagatcttatgaaactcaaaatgatagagctcgttcatagattttcaaaatatgataaataatcttatttggagtctgaacgcaaagttatgcatgatttactgagtaaaggtcaaaatagtaaaagaaggaaacgaaaaaatggtctgtggcgccaaaagtgtggcgttgtagcgccgctacctagaaaaaaaaaaattagaagaaaaaaaaaa

SEQ ID NO: 334511 - DNA, 529 bp, Cannabis indica
atgaaatgtttatttagggcctaaaacccaacaggaacaataatctttatgaatcttaacaaactgttctcttacttcttgttcttgagcttccagctgcacatttaaaggctgctggtgtagtagactttacacattctcgagatcttgccttgcctttttctttgctgcttgaatgtctgaatagtgttctttattcagttctctaaagaatactttcaaaactttaagttttgacacaacttgaaacatctttgttcccaaatcctcttaagttccatatgataacttggatgagaagtccacatacgaaagtatttaaaaggttttttgccacttgggaaatcaggataaatattcagtactgcccgagtatgatcaaaggctccctctgtaagaaacactacttcacccctttcaaatagatccatccaagattgattagccataactctatcaatcttggaatagattctatcttttgattgttgtttattattccaagtaaaaaagcaaccactactcttta

SEQ ID NO: 334512 - DNA, 536 bp, Cannabis indica
gtttatttgtttatatgttttctaagttaatttaatttgttagagtagctatagtagaagtatttcatgtatagatatttatacaattatgtaactatgtggatcaactttgagaagtataccacgtggctcaggaatatggaatacgaatgggaatgtagtaaccatgtgagagtgtcagatgattctcaagagggtgattctattgtgatgtgttggactattcaacatttgacatataactaaacagagttaacttagatttgtataactacaacgaaaagctaacatagttatctatcctatagttacttgtatgtatttggggtttagttttgcttagttaagtgttatgaataacctggtcatgatgagctttgcatatgtatttggggtttatatcatcaatgggtaacaatgagatttatcatggatgttgatgttcaaagagtttttcctgtattttagtttgtatacagttgttttgtagttttattatagttttgctacttgcatatgttatttcactataaaat

SEQ ID NO: 334513 - DNA, 1071 bp, Cannabis indica
gaagaagctgctggcctggaaaacaattggcttgaagaattgccaagagtgttatgaccctaccagaccaccctaagaaccacaaccggccactcgccgttctcaatggcgtacggttgtgaggccatggtcccggtgaaaacgttactcccatcccataggaggacgacttacgatccagcaacaaacaaggctttatcacaagaagcgctggatcaaattgatgaactccgggatgagtctcaaatacgaatggcagcttatcacaagaaggtggcgaaacatttcaatttaaaggtcaaaaatagaaaattcactattggtgatctagtcctaagaagggtctttccaaccacttaggcacctagagtggaggtacttgggccaaattgggaaggaccgtacaaaattgaggatgaaatcagctctaggacctacaagctaaaaataatggacggaaccatggtgcctagggcctgaaatactgatcacctctgaaaatattaccaatagttgaaaaaaatacaagtttatgttctgtaaagtaaatttgtaccggacaagtatatgcaacctctaaattaaaaatttgtaaaactgagtgacctaaaatcaattttcatgtcactcaggggtagtaaggcataccacacggacaaatgtaaaacaggccaaaagtttaacaaagttaaaagctaaatatgtattcaaacgtgaatataaagtgttcaaatcccaaaaaaaagctctaataaagataagggcctggggacgggccttaaatgtctccccttaagaaaatatataataagtaaattgtcttagagaggggagaaggattaaatgtatataaaaaaaagagaaagaggaagataatgataatgataatggtgataaacaaatggcttaatcaactcggggtggaaagcgacgacccctgtgctcctccagcaaggcatcaagtcttttctgcttctcccagaagcggacaaggacctcttcaggcttgggatagaagtcgagcttaaggttctaaacattagtctgccaggccataaagacaccgtcgtc

SEQ ID NO: 334514 - DNA, 757 bp, Cannabis indica
gtgaaaaaccattaaggtaagtggttaaagatcttacaaactgataggggtggagaaatatttggatatgcatttccaagatcagtaagttgaatttagaattttttccaaacttacctccccaaaaattcaattttcatattgatgatagtgataggtctatgattagttactagtagttgcctaaatgatggaatggttgtgtacatagtgtaaaccattactagattcatggacgtcctgatcgtgatcttaagaaagctagaactgttaactaaggtctacatgtttgatagctattctaagtgattaggggttgaccatcctatggtcattaagataagtaagtgtttttttcaacaaatattaatcaaagtagaggaggtatttttcttcttgattccaaagtgttctatcatcttattctacaaaagatgatgccactttctctgttgtcttgatacaaacgatgaggacaataccacttatgttcttagacaaagttacggtaccttgtcttagtgggagggtttcaaggaactcaccctgttatgacttggaagacacttgtgatgaaaaatttattattagtttaaacatgtaatggattgtcaaaataaggaactaagaagcaaagccaagagaactatggttaaaaccattcatatggagtaaccaaaaagttttctattacaaggacaagaaaggaaattttcaaaataagtctattcaatggacttaacaaaacttcctactc

SEQ ID NO: 334515 - DNA, 734 bp, Cannabis indica
ttgcatgctacacaaacacatgcttcaaacgcatcaaaatctgaaattcaagagcatgaactcatcccaactcaaacctattacaattcaggagcatagcaccatttaaaacatgaaattccaacctagaaataccatgtaatcactgcccaagctcaatcacaaaacacacaataaatagaagctcaattccacaagattaacatataacctaacaaaattaagcatccttttcacaacacatgcaagacccaaaatcaaaataacctaagcatgtttctaccacaatatctagcaaggaaagcataaattaaaaccaagaaaactacctcaaacaattgcacaattaagcctcaagcctccaacacctttctttcaaccaacaagcttcaaatcaactagttcttcacaaatttaagctttgaaaatcaaaaggggtaaaagagagggagagggttcggttgagagggagaagcaaccagaaaatacaattcattttctctcaaaatccattaaattcaatataactcaattatggtcaaatgaccattttgcccttagggctatataacatgcataagcattctcaagggcatatttataattcatactcagtttattcccaaataatttttagattatcacatatcaaataaaaatgccaaataaccaatccaatttacatttcgggcccgaaattcccggttgtgactataccgcgctaacctgtcaga

SEQ ID NO: 334516 - DNA, 1955 bp, Cannabis indica
ggggtgggggagcaatccccacacccaccccgcccggtttacatccttatgtgaaacaatccaaaattacccaaattgaatcatacattttggtggttctaagtaatccaaccacgaaatccatggtgacatcttcccatttccactcaggaagtgtcaatgtttgtagtaaccttgttggtttttgatgctcagccttgatctattgacaagtcaaacactttgacacataatatatcatatccttattcatactacaccaccaataatagggtttcaaatcttaatacatcttggtggtacccgaatgtaatgaatatggagtggtgtgagcttcatctagaatctctttcttaagcccactatcgcttgaaacacaaactcaagccttataaagtagcataccattatcaaaaaccgtaaagtccttaacatgtcaaactaagacttcctctcgagctttgattaactcaggatcttccagttgggcacacttgattctttctattaggtccaaatgaagtgtcaagttactaagttttcccagcacaaactcaatacttgcgttgaccatgtctgtggctaattggggagagatcatcttggtactacaaacttgtccagggcccttcctactcaggccatcaaccactacattggctttttcaagatgataaagaatctcacaatcatagtccttgactaactctaactaatgtctttgtctcatgtttagatctttttaagtaaagaaatacttaagactcttgtggtcagtataaatttcacacttatccccataaaggtagtgtcgccaaatttttaatgcgaacaccactgttgcaagttccaaatcatgcgttgggtaacgttgctcatactccttcagctgacgagaagcataagcaatgaccctgtcggcctgcatcaagacacacctagaccttgtctggatgcatcacagtaaaccaaaattttttctttatctgacggtaaggctaacaccgatgctatgattagtcgcttctttagttcttggaaactggctacacacttatcagaccacacaaactgttagttcttcttagtcaattctgtcaatggcatgaagatcttagaaaatccctctacaaaatgacgatagtatccagctaaaccaataaagcttctaacctcataaactatcttcagtctcgaccaatctctaactgattcaatctttactaaatcgaccataataccagtctcactggcaatatgatctagaaaggatatttgagataactagaactcacacttcttaaacttagcataaagtttattctctctaagtctttataagaccatttgaagattttgctcatgttcggcttctgacagagagtatacaaggatgtcatcgataaacactatgacaaagttatcgagaaaatccttgaacactctattcataagatccataaaggctactagagcattagtcaatccaaacaacattactagaaactcataatgtctgtacgtcataggaaatgcagtctttagaatgtcttcctctcgaattctcaattgatgataacccgagcgaagatcgatcttagagaagactatcttcctttgaagttgatcaaacaagtcattaattcttggcaaaggatacttgtttttcactataagcttgttcaactcctggtaatcgatacacatccaaagggatccatccttcctcttaataaacaatactggagctccttagggggatacactggatcgggtaaatgcaatgtctaacatcccctgaagctgaactatcaattccttaagtttagatggatccatcatgtatggtgctttagaaacaggctttgttccttgtatcagatcaataacaaaatctatttcacgttggggtggtaaactgtaacgccctaactattaggcatgttacccaagat

SEQ ID NO: 334517 - DNA, 616 bp, Cannabis indica
tggtgttgatgcatgtttggttggtttttagctagtttggaattttagctcaaaactatgattttcaaggtaatttgatgaatttcgtggctgtagttgttgtaattttttagtgttgttttcagaggttatattatgcatgtttgagtagattcaagcaggtttgaatgcatgttaatggtttagccaagcttgagttttgaactcaaagcttggagctttaatggcatttttcatatctgtgatttctgggttgttttgatgctttggaaatgtttattggggtatttagaacaggtctggaaggtttggtgtgaaccatgaaggatagtagtttgaatccggaggtggcgtccaccatctggtcgattctgggcaaagggaaacaatcctttgggcaagctttgtttagatcagtgaagtctatagaaacccgcaaggtcccgttaggcttcggcaccaggaccagattggctagccattccgggtagtagacatctcaaatcatgccactcgttaatagtttgtccacctctttctctaaggcttcagcctttattgagttgacggggcgtcgcttctgttggaccggtggcatgtgttgggttttatgccc

SEQ ID NO: 334518 - DNA, 884 bp, Cannabis indica
caagttatttatttttctgcaaatattttatattttgcctgttcagttttactgtagcagaattactttctgctgctgcaaacgcgtacagtttttatattttcttatatacaactgacatttgcaaaaacacggtttttcaaatacaatgaaccctattcatcaaaaaaataatagtataaaagaaggaaataaagaaaagtaggcacagccgcaatatatagaaaatatgtgaagacaaagtttttctctcctgcacctaatgaaaagactgtcttttcataatataaacctgaatgactatttagtacgcgaaaatccagatgaacctgcattatacactaaaggaagtcacaagcgttttggacttagatgtaaccagtaaaaccgttcatagcttatttatgttctaacatgtttattttatttaatgccatttaatataaaacaaccattatcgatcgactatataattgaaaggacaactgctttgtatatgaagggatgacctgccacataatgaacttgatcactactttccaaacagtggactaaggtggtcgagttcttactgaaccactatattttttagtgtttgttgttttcattgctttcattgttgtttacttcttctatatttgcaaattattttgagtactcaatgacttttgtgtaagtgtttttatcctgtttgaatactcaggaatttttgatattgtctattaactccaacaatattcttatatatatatatatgagaaagcaatgatatatttatatatatactagatgaaagttacgtagcgagccacgtaaatattagttttatttaaattttagtgaatttttttttaagaattcaataactaattgtaaattatttt

SEQ ID NO: 334519 - DNA, 507 bp, Cannabis indica
ttcaaactcgtctaacactttagcttattttgaaagctgttaatatattccatagaatactaaccaatgattttttttgaaaaagaaaacaaaaaaaataaaataaaatggatcaacaacgaatgtatttgatcaatattggaatctagtgtgttctgttacaatattgtacatgatcatcatctccctaacgcctgattagcatcaatatgcaatgtaaatactttactaaaattgcaacaaaaatcagcacaactataagctttacctctttttttttttttataggttttttgtgtcatattttacaattacacttttaaaataggttttttttttttttttgttatttttactgaaaactcacaactcattagcaatcaatgggataacctaaatcgcaactaaaattcacatagcaacatacaaataaatcgcaacgaagggcaaaggttttttctctcaagtgagagtgttggggggtccaacttgactcagtgtccaacc

SEQ ID NO: 334520 - DNA, 838 bp, Cannabis indica
ggcataaaacccaacaaatactatatctgcacttatcagaaatcagaaaatagaaaatgttggagatcattaacatttctaattctaatcttataaagcttttagttgtgagattttttgtcacatatggctgtaaaattaggaatggtattgaaagctattaaagatatatgttgtgacaataaatcaatcaggctacattttagtaacaacatgaactcgataaggtcaaaggcacattgactttgagctaattgttattaaaataaagttcagagtaataaggtgtctatagaacataataaggacaaactccatattttgtgtgatccggatcattaaggatataccacttaaggctttgcaggagcttattgcccatatatggatgtgggattatttaagattgtgttagtttagtgggattttgcattttgaatgttctatcaagctgacacatatttatggtttgattctgcagataaaacatatatggatttatgttttgagtactttgaatgtattctttctattgagattaaataaagtagaaagactaaaggattgatctcaattaaggaggaccaactggagataggcatgctaagatcacatttgcatgtaatttctatgtatccatgattgatctatgtcatttggttatattgatatacgtgaccattgatgggtttagctacgttaaatgttgcgaaagccgctttgatcctatcaatggacgagattgttttgaaatacctataattatgatagcaaagttttttttttttttttgagtagaagcgttttttattaaacaacaagctagacctcgtggtca

SEQ ID NO: 334521 - DNA, 636 bp, Cannabis indica
cttatccaaattactccaaactttacagggcacatatatactataaatattaccatccttacgtaacagaaattaaaatcgagcccttaaatgaaaaacgccattatcgttcggactaagctttaaaaaagttccaaactcgatttctaacccaaaatcatctcagttttagcaagaaaacatcagaactagtcccatgactacacgagaacaattctacaaagtcaaaatttccataactattctaattcataaaatttcaatataaaaccaatcgtttttagcttaaaattaaattaaaccataccttaagctttccctcttcaaggatttgctatcctgctactaccggagcttagatcgctaaattttgtattgcaaatcgaagaaaatggatatagaaagtgaagattttgtcgaagaaagaagaacgagaattcgtttgttctttcgttaaactgtttactgatataacataatatatataacttatgtaatatatatatataaattttgagcgttattaataataatataataatagtaatataatataatagtagtataataatataatattattaataatactaataaaactttattattaatagttatcttattatttcttagtta

SEQ ID NO: 334522 - DNA, 751 bp, Cannabis indica
tggctcatgattcagaatgtaaaaactctaatgatgaaaattatgagagttattggtacaatgaagaagggtcattagttgaatacaaggaagataatgagcctacaattgaagatccagatccgtttgaagtggtattaactcaaaatttggctacttcagattcttacttgataaatattgaatgtcatgtagtaaatgaaatcatagaagatcatgaattcatccatgatcaggaactcattgaatatgaaatcacaagtaagggtatggatagccaagtggagactgagcaacaagaaaaaggattgttagatgaaagtgtagatactatgacattggaggatgaagaagaacatgacatcattgattcgacttcatcaatgatattgactaataaaccaccaatggatccatatatttcatcaacaccatattatatcctctacgagctacgaaaggcttctcatcgcttgccaagcttgaaggcaagtacaataacaattttcaagctgtcttgcatgacgcttattatgggaatcaaccgcttgtttatgtggcgctcaagtaagttctcttttctttttcttaaatgtcacattggggacaatgtgtcactttagtttcgggggtgacttaatttttatttttagttttttttttgttttttgttttatatctcttaatttttaatttttagtttttattgttgtgagtcaatttgaaagtaggtagatagcatgatttgaaa

SEQ ID NO: 334523 - DNA, 1065 bp, Cannabis indica
tttaccttttaaaaaaaataaatatctaatttaaatttaaattaaataaataaattcataaattaataaatatatgatttaaataaattaaattaaactaaataaactgaaaaaaataattcttagggcttttggcatttgcgtcgttatttgccaggaaccgacgccatatatacccatatggcgtcggttcctagcaaataaccaacaccatatttacccttatgacatcggttattttagaccctacagcatcacttggattagcgttggtagcgaatattaccaaaaccgacgctcaaaggccttaaaaaccacatctaaagagtctttttgtagtagtgtcatattttagattattttatatcaataatattaatatgttaattcacttaaattattttagatttatttttatattaataatatttatataaatctataggcctacgtacatagtattttatcataacattattatatgtagatataataatatatctttatatattaaaagtgactatctaacggcatttcttggtttaacggtgttgttattttcctttccgttaactttaacggaggctactgataacgttatttgattttataataataaataatttctttttacgagttgttacgtgaataaagcctcaaatagtgagaatattctagattacgaacgaactatacctcaaattttcaagatctctcgaatcaataacccaaccccattcttctccaatgcaaactatcaaacctcttcttccaaaagctttcaatgtcgtaagccactgcctgaaaatcctgaaacactcctcctccaagaaaggacttcgtttgatgtttatgaagtatttcgaggagggcatacagaaagggaatagaggaagaaggttggttttcatccattacatgagtgttaaagtggcaaaggaaattgatcattctgatagtgacgaatacagcaagaggtaccttatctctacatttgaatttcaatgtatatttaatcaagagtagtctttctcttttctatttgcccaattctaagatgtggtc

SEQ ID NO: 334524 - DNA, 1068 bp, Cannabis indica
gtaattgggtgaaccaatcatgggcattttcctcgagtgttgccgcaagaatgcggcactttgcgagctgtggtacctggtctacttccattatagtattaaatttttctaaatagtctatcgggttagaagtacctttatatttgagggattcggatagacgaaacccttttggaagttgagcctgtcgcacctctgtagtaaagggcgaggtgccatgcagcttatatataggcttacgttgctgctcgagcattttcaaagcctgcaggagcatgctttggtcaattcctcctgtcgcaggagctggagtcgctgcaactgcggggctcgcaactactgcggcaaggtttgctgggacattaatcccagtggtcgcgatcggcgcgataggcgggttattatcagcgttggcaccctgatcgcccgcatggggatcacggagtgtctcggtattatgtgggccgcgagagcgtgccctaaaaactgcgttgagatgatcacgtagatcacctcggtgtacctgataacgtcctccctgttgtgtctgtacagagccggaccttgtgtacctgctcggagtgcgaccatgcgacgacgaagaggctgattctgcgtcgttgtctctcgatggtcggctgcgaggattacggcgctcaggatcttcgtcgatttgtgtgctctggtttggaaaccttgtggattgatcccttgacattggatggttcaggtccagagcttcagggttagttcttcgttccctgcgtacacggttagtatgatgtctagaagttgttacctgagggttatcggtgcgaatggcgggaactcgaggagggcgtcgagctcggctctgtccatctacttcggcttgtagtgcccgcagttgatcctgaatcgcagcatattgatcagtggtgagctggatcattccctcggataccaccgccggagtgacggggggaaaatgcatggttgctggtggcgtggacgtgtccccgacttgagggccagtcgtttctgggaataggttgagaggtctgatattgctcctccctactccgccgt

SEQ ID NO: 334525 - DNA, 734 bp, Cannabis indica
caagggatgagatacattgatgataacgcgtgagatacggtgatgaaaataagtgagatacaatgagatgacaagtgagatacaataataacaataattctgaatgatcacgatatgaaattaatgcattatggagaacaccgcaatttttttctatactaccctatttatttatttttataaaaataatttcttttaacaaagcaatttaaaatactacatataataaattttaaatttctcaataaataattcaaaataataattaataaaattgtgcatttagtttttaataaataaaattattaataataatatgaaataagataatatatttataattttactatatttcagaattatatttttaaataactatttattatgatactaaaaaaattaatagaaattattttttagtaaggtcttgtcttttgacatgtttagaaagttatcttatgtctttcctttgaagaagatttgagtgtcagtagcagtattgtttgtgttttttctggtttcttggttacaaatggcgtcaagcagtagtaatgatgattggatgagtcaatatgcacacattcagttagaagaagaagaggaaggtgtcctactttctgatgaacaagtagaggatgaccaagcgttcgatgataggaggtgtttggtcggtaaattcttaacaaatagatcaatcgattttgatgctatgagacacatgatggcttctctgt

SEQ ID NO: 334526 - DNA, 563 bp, Cannabis indica
atcagcaagattatatgcttttgctgcacaatagaatgcatctctcagctcatctcctccttttctaaatcttgattttatattttggaatagatggaagcaacataccccatgcatcaagttgggaaataccattttcactgatttggcgatactttcatgtctatctgaaattatgcattgctcttcccgttccccatatgtttgtttgagtttatccatgaagtattgccatgacgcatcattttctgaatcgactattgcaaaagctagtggaaatatatgtctgtcagcatcttgtgcattagcaactataagagtacctccatatgcattcttcaaaaaagttgcatccacaactattattggtgtgcagtgattccagcctttgatagaagatgctaatgcaaagaaacagtatttgaatctcccctcatcatcttgtacaagatctgttattgttcctacaaatattacacattatgatatagttaatttatgaaacaggtactgttttgttactaattgttttattataagtttatttgtgtacctgggttgca

SEQ ID NO: 334527 - DNA, 574 bp, Cannabis indica
ttcttggcttaattgaaatgttggcagagtttgatcctattatccaagaacatgttaaacgcattacaaatgatgatattcacattcattatcttggacataacatccaaaacgagttaataattttgcttgcttcagcaattaaagctgaaatcattaaaaaagttaaacaagcaaaatatttttctgtgatacttgattgtactcctgatgttagccatcaagagcaaatgtccttgatattgagatatgtggatgtttctccacattctgttagcattgaagaatcttttttaggatttttaaatgtgaatgatacaactggtcaaggactttttgatgtgctacaaaatgagctgaaaaaacttgatcttgacatatttgatgtgcgagggcaaggttatgataatgggtcaaatatgaaaggaaaacatcaaggtgtacaaaagaaatttttagacataaatccaagagccttttatactccttgtggttgtcatagtcttaatttgattttgtgtgacatggctgaatcgtgtagtaaagctagagatttttttggagttattcaacg

SEQ ID NO: 334528 - DNA, 845 bp, Cannabis indica
attgtcatataattttcttaattgttttttttttttgctttgaatttttttgtagatcaacgactcgtttaagtttagcaagaaagtaaagaataattattatagtgtagaatttaattataatcttagatattattttagcagtgtgtgttattgtgagtacttatgcatggataaattctaaaagacgtctcaatcgaccattatctataatgagagtctacaaatagttagaaaacttacataatttagtgtatgcaagtgatgtcaattgtgtttcacaattaagaatggatagacaaatattttacaggttatgtcacatactcagtactaggagaaaattaagaaagacacaaaatgtctttattgaggagatggtagcaatgttcttatatgttttagcgcaccaccataagatttgaattgttggttttagttttaaaaaataaggaaaaactataagcaaatactttcatgagtttaaaagcaatgattcgcagccagaaatttttttggagaacacctgagcaaatattagcgacctcaattgatccaaggtggaagtggtttaaggtatgagttgaggatttacaattgttgtaaagaccgcttagtttaatttagaaattagcagttaatcatgtttaattatggaaaattatttatagctatttaaataattattatgctgttattgttgaattctgaagtgcattttatgtcatttagtgattttcataatttgcatttccggtgcccggaaacatggaactcggtgtttggctcagtaaaatcacaacttagtatgttagtttattgggacggtttattagacattggga

SEQ ID NO: 334529 - DNA, 832 bp, Cannabis indica
caatcacaactaaacccatcaatggtcacatatatcagcatagttaaatgacatagattaatcatgataatgtggtatgaaagttacatgcatggtgatcaattcatgtcaattttcaattggtcctactttactttatagagatcaaaattttatcttaatgtacaaagtgaaataaactgaataacataattttcgatcaaaaaaatatccaaatacacatatttcatgaaacaaataaaacacactaaggataataaagacaaactcctactgaatctaaatatcctcataatctaaaacactcatatgagcagtgtgctcatgaaagaccttgggtggaaaatccttagtaagggtgtatgcattcatggagtttgtacctaagtattctatacaaatttgtctactttgtacccgttcttttacaataaggaacttgatatcaatatggtttgactttgtcgagctcctgttgttgttggaatacaatacagctgatttattgtcacaatacaacttaagtggtctttcaattctatccacaatgcgtaacctggtgacaaagttcctcagccacataccatggctggacgcctcataacatgtaacaaattctgctatcatggtggatgaagctacgagtgtttattttgcactcctccacgatatagctccaccacctaacagatatatgtagcctgaaatggatctcctactatcttggcatcccgcaatgttgaagtcagaatatccaatgatctcaaagtgatctgacctcctatatgtgagcatgtaatctcttgttttcttcaaatatctcataaacttt

SEQ ID NO: 334530 - DNA, 716 bp, Cannabis indica
cccccttaaggtcatctgggttgttcccagcctatcgaacacagaaaaacctggctgccttagcgattggtccgcttggttggcaggtggaatggctccattattttgcgtggatccgtcgagcatgacccctcctgatgaattcccggacaaggtctgtccgcctacctctgggcccacgagtggaactcgcgaccggggattcggcagcagaccgttggttgtcttggaggcattcatcgttgggtcatcctcggtttctcctaggggaatgatgctcagcttttgctggcctactgtctgatagactctacgtatcagcacagtggcttgccgactatgatcttcgatttttgtatggtgagcccttaatgcctccatctctttgtccctccagtcggcgaacatatgcctgtgttcgtcaaacacgaggtttacagcagcacgtaattcctccagatcgtgatgcagggtattgttgtgaccctgcatgagtccgagcgcagcgcggaggttttgcaattcggttacgtctccgatggtcgtttgggcgttgatggcaagtggatctgtcgtgttttgaactccctggttgtgtgcggaactgtctgtcaaggattaacagcggatggaacccttgaattcccttggtcctgcaacgtcggatccagcgtttgtgagtttgctgggtccgacaagcctctacgagtttgtac

SEQ ID NO: 334531 - DNA, 593 bp, Cannabis indica
acttagtttaatgaaattaattcaaagtaaactatatgtatttttgtgtatttaattaaataaaagaagttataactaataagatttttctagatacttaattatttgttttttcttaaaaaatatatttaagttaaaaataaattcttttaaattaattttggattaacttaaattagaatatttttttaaataaataattaagtagagtttttctaagaaattagttattcggatattctttaaaaatatttttaagttaaatttcttttttaattttagatcaacttaaatagggatattttttcaaattatggtggttagttcaaaatacttaattttttatttaattaaatttggaaaattatttaagttaaaaatttaattattttagaacaacttaaattagatatttttcaggaatttattttattatattttattcaattttgaaattatatatatgattcatatatacttagattttcaaaattaattttaattaattttagaccaacttaaattaagtaattttcattattaaaataaatagattaaaataaatgattaattaaaatacattattttaaata

SEQ ID NO: 334532 - DNA, 710 bp, Cannabis indica
aagaggtggataagcttctgaccaacggcatgatccgcgacgtatactatccggaatggctagccaatccggtcctggtgcccaagccgaacggaacttggcgagtttgtatagatttcactgatctaaacaaagcttgtccgaaggactgcttcccgctacccaggatcgaccagatggtagacgccacttctggattcaaattactatccttcatggacgcctatgccgggtataaccaaataaagatgcacacggcagaccaagaatgcactagcttcaggaccgataagggggtatactgctacctagtcatgcctttcggactgaagacgccggagcgacctaccaaagaatggtcaaccggatgttcaaaggcctcttgggacgaaacatggaggtatatgtagatgatatgctcgtcaagtccaaagcatgcaatagccatgcggacgacttagaggagtgttttgaggtagtccggagatacggcatgaagctcaacccaaagaaatgcacctttggggtcaagtcagggaagttcctgggcttcatcgtcagccagagggggattgaggcaaacccagagaaaatccaagccctcctgagcatgccatcccccaaaaagcataaagatgtgcagagcctaaccggaaaggttgctgccctgagccgtttcatctcacggtctacagacaagtgcatcccct

SEQ ID NO: 334533 - DNA, 621 bp, Cannabis indica
caatctaggtccagatcaggctctgagtgtgggttcgcgtcttgggtcttggtctaggttgggttcgagtcccaatttccaatcccgatctgagtcgggattcagttctgggtctaagtccctggtactgatcatggtctaggttcaagttttggtccgggtccgggtctagctttgcgtctaattctatgtgtgggtttgagttcgggttcgagtctgcgtccgggtttgtgtccatgtctggacctcgatctgggtctaggttcgggtccaggttcatgttcgggtcccgagtgccggtacaagtttgggtctgggtcacgatcttggtccagatctaggtccaacatttcgatcatagtcagggtctttgtccgagtccgggttcgtatccggatccctatctacgtccaagtctgtctttgggatcaggtcccagatttaggtccttgtctgggtctcagttctggtctgtgtacacgaccatgtcgaggttcaagttctagtctcagtttgggtctgcggctaggtctgtgttcggttctaggtctgggtccggtccctggtcccggtccttctcttgttctaggatcctggttcggcgattcttgttcaggttct

SEQ ID NO: 334534 - DNA, 1911 bp, Cannabis indica
atccaaacacgatctcggacccggaataggaatcagactaggtctaggactagaacccagacctgggaagtagcaggacccaaacctaaacccaaactcatactagaacccataccgagactaggagttggatcgggacctgtgacgttggacctaaacaatgaccgggacacgaagcgagactcagacccagacccaaaaactagggctggacgcaggacctaagaaccagcctcggacttcggatctgaaactcggacccacactaggagtgggacccaaacgcaaactgggacctgaactcagatagggactcaagaccataacccgaaccgaaacacaaacttggacctggatcgggacctaggacctggacatagatgggggacccaaaccccgaaattgggaccccaaactaggaccaaaacttgggcctcagaacttggatcaggatcaaggacccgacccaggcccaaatcatgacctaggacccacctcgggacttgggatccgggactcgatgcttggacctgacccgtagtcagtgtttggatctgggaattagaacagaatcctaacccaaactcgaactcaaactaagacccggacacatacccagacctagacccacattcgggaaccaaaactgaaacttgaactggaaccgtactgggatctttgaaagggaccggggcttcgacccagatcagaaccaaaaaccgtacccaacctcataccctaaccgagaccgaaatacggacctgaacctccccccgaacccaaatcaagactcgaacccagactcagacccaaactcgacccgaactcgtaccctgtgacttgaaactggaaccgaaaccagaagcaggacccaaacccagaccctgaccaaaattcgggactcgaaactagaaacagaaaaagaactgcaagactaggacccggacccaaacctagaaccaaactcagacctagccccagaccaaaaccgagaccaaaactcgggcccaaacacattcgtgtaccagaacgggaccgagacctggacccgaacccagaccaggacctaaacctgggacccgatcccaaacccagactcagacctagatagggatctggacacgaacctggactcaaacccaaacaagccctagaccgagattgaaactcgagaccttgattcggaccgagaccctgacccagacgaagacctggacccgtacccaggacccaaacttggacctaacctgaaccaagacccagaccgggatctagaactggacccaaacccagacctagactcggagcaggattcataccccaaccaagacccataccgaaacccaaacctagaaacagaatcgaaattgaatctgggagaaggactcacacctgaatggacccagatcaggacataggacctggacctaaatttgggacctagacttgggcctcgaaacttagacccagatcggaactcgggactcggacccgagcctggaccgagaatcaaacccagatctggatacatattgagataggaacccaaacccagactcggaccaggacttgaaccccgactcggtcccgaactcagatcgagacctaggacttggacctggatgggggacctagacccgtgacacgggcataaaaattgggaccgagacccaacctcagattcggactgtaacctaggacccggaccaggacattagacccaaagtcgaactagactggcaccctgacctcatggcttggaactgacccgtagttagtctttggatctgggatccatacccggactcaaacccagacacggactcagaccctgaccaaaacccacacccgtaccccagacttgggtccgagtccaagactgggtttgagtctaggaactagaatatgact

SEQ ID NO: 334535 - DNA, 645 bp, Cannabis indica
catggagtgccttcaagcattgtttttgatatagatcctcgatttacatcaaggttttggaaggccttccaataagccttaggaaatgaactttacttgagtactgcccatcatcccactactaaaaaaaggggattttgcgtcgatcaacacatttggtcaaacttgttgaccgacacaaaagatcaacccacacttttttgcttcagttatccactgacacaaataattactaattagcatcggttatatatccgacgctaaaacaaaatccgaagcaaaagatgaaaatataaaaaaaattgtatacactattagcgtcaatctacaaccgacgcaaaaagtcattatatgcattattagtgtcggtgcacaaccgaagcaaaaaggcattaaaaaaaatagttatgggctttagcccattttcaaaaaaatctaaccctaaaatataaacacttctaaccctaattttcttctcagtcgcccctctctcatctatctctctctctaacctaactccctctcttcatccatcatcatcttcatcttcttcctttcttcttgacccaacccaaagcatgaactctcaaactctaactctctctttctcattttttttgcaggtggcgttggagctcatcgtcg

SEQ ID NO: 334536 - DNA, 1231 bp, Cannabis indica
attaataaaaaatatttttatattataagttattgttgagaatcatggagttccatcccaaaaccaattgggcagcggtgctggtgcagggcatgggtgggctagcaggggcgtgggggtggggcttctggtgcttattgtaggtggctgcctcctgttgatggcaattttgtgctatcagttgatgtggtagtcactccgggcaggggcttcgctggttttgggggtcattcgtggtgagggtgaggtagtgtgggtggcataggcgataggtggagctggtgagttccaggtggtggtggcggaattgttaacattgcggttggggttgatttgggcgtctaggttggatttcaatgtggtgaaagtggagacagattcttcaattgttagtaattggatcaattgtcaaggttcaaatattatgtttaaaactattattgatgagattatttctcttttagctgctgttggtggtggttcttgttgtgtcatttcacgttttgcaaatggtgtagcccacacactaactagctaagtctgttactagttcaattggagtccatgtgtggatgcttgtcctactgtaacaactgatttgatttaatatattattgtttttcctaaaaaaaatattctcattcatgagagtaaagtaatagtgttctcacctaagaagaattaagagcatctccaatagagagttataaatgtgctgtattgccattttttagaatattttgctaaaagttaactcaaattgtgatgtaaaatgtttataaaatttgactcaatctaaaaattatgtcaaatttggcacaaaagatagtattggtaaaaatactgtaaaacctaatttagccctaattaattcatgagaatcaaacaataaaatatagattagcggaagcgtaccagaatccatagaatcgattttgtaatgacctttgattggtatgatcttctaatttgcatcaaaacctttctctgaaactttttctcttggtgatggggatacaagagtaaaaagatacgatgcaaatggggaccattacctgttatattattaacagacagacctgttggtaatatttattgactatttttatttggcccctcatcaaaatagaaattttccttatagtatccacatattaaaatcatgacaatcacgcccttaagtcataaactttattccgaaatagatcacataaatttgacttatttattt

SEQ ID NO: 334537 - DNA, 818 bp, Cannabis indica
tagtaaccatttagatgttgtttattaagaaaaggggttagtaaatatttaaattagaaatagttagtaagttagggatttatctaaaagtcaccttcttcctcaccacactatctctctccctctctcgaattgtcaagaatcaacaccaagctgggatttttctcagttcaaaccagtgggtattagcaaagttggtgcttaactttaaggtatggaaccctagtttcttcctatgatatatttttttagttaaagaagggttttgatgtatggttttgggaattatggaactgtggttgcaattggtgtttgaattagagttctgaagctaagtttaaattatttaggtcgatttgagctggtttggtggtctatgttgttgatttggcaaggttgggctctaagaactcaaaccttgacctttaatggtggattgagtttctatgtttgatactgagttttattgcttgattatggtttattataatatttacaggcattctggagagtattggagagtttggggttgatttgagttaaggggtcgattttcgggttttcctgcacaaaactggttaaccggttttgtgggacctgagaaatcggtaaaccggttttgtcccttagaaaacctagtgaaccggttaaccggttgggaaaccggtttactggttagggtttttccaagaaccatagttttccctaaattgttgatttttagggtatggtcatgtctttcatcgattggattattcctagtttgattttaaagtccccgagaagtgttttagtgtgtttctcatcgagttttaaat

SEQ ID NO: 334538 - DNA, 771 bp, Cannabis indica
aaaatatttccaacaaattcaacattgtctaaagataaaagcaacgcacgaacatcttgcactaaaagaccaaaagaagatgacacagagcttttactacgaatagcttgtatgcataccaagctgtctgattccaaaattacttgtccccaattgtactgatcaatccaacttaaagcttctttgatgccaaccatctaatcaacttaaggttaaaccctccccaaatgaccccgattgaaagcctccacgacattgccatagcagtcgcgagctttgtatggaggagtatttttgaaatagaaggtctgatacaggctggggtaacccgtacgataggcacaggtgaacatattttaattttatgtgacctttggcttccacacaacacaaataactatgttatttcttcacatcctgcacttgttaatcagactataagcaaccttttcaaaatgaattcacaagagtgggatgaagaggtaattaatgtagttgattttttctatacaattgagttctactgcaatatccgactattggagctggcggttcgaacgattggggcactactcggttaagagtgcctacaagttcttacaagaagaaaaaggagcttggcctgttactggagctactggcgtttggaaggatttatggagtttcaaagttccccctaaagtcagcaacttcttatggagggcggcttcaggcttgttaccaacttgtgtccaattggaaaaaagacatgttccagttaacccaacatgc

SEQ ID NO: 334539 - DNA, 605 bp, Cannabis indica
taccatcactacccaacacacaattcatggagttcgaatccataggtacagatttcaaatccaaatacccaaacacaataattgtcaacccacgtgataaatttgaacctctacaaaatcgtatcacaatgctcaaatttgtaagttgaatccgaataacccaagccaaaacaactatcggaatccctaaccaaaaagtaatcgaaaaagacaaaacataagaggggttatcgatttaaaacccacctgaaaggagttgagcttttgggtcgacaaagagagagaagagagggtcccttggtcgatgatggtggacatcgacaaagagagaagaaagggttcaaacccttagccgacgaagagagagaagagatgagagagagaaagatagggcttgaacccttggttggttgacgatgatggctcatcaaaaccgtattgagaatagtgaggaagagagagagagagacagagaattgaggtgggatttttgggtcttggggttttctaggtatgggggagttcgtcgatggctggcagggaaggagagaaagatctgagatagatagatagatagatagatagatagatagagagagagagag

SEQ ID NO: 334540 - DNA, 509 bp, Cannabis indica
tctgaccgtcttgaggagaccatcgagcccttatctgttgaagtgaacagtcttcaggatgaaaggacatctcctcgagcagttcttcatcgggtgaaggaggaggagcttacggccgaggtgacaaagctgaaagagaaggttaatgccttggacacattcggtcttgagctcttctttgatttttggaaggctaatcctcaggccaacttcgactacttgggtgatgctaaggacaggtatctggagttctgcgcttcccaaattgcctatggtgaaactgaggctgctgcttctacctccggccagactgctgatgtacctcccattcaaacaacagatcccctagctcctgccggcccaaaagactcgaatcaagagcctgggactccaactgcttaaatacttcttcttttatctttttatttttatatatcttattcggccttggggccttttctaagacatcatgaccggccaagcgatctttaaacttggaattatttttc

SEQ ID NO: 334541 - DNA, 387 bp, Cannabis indica
tgaaaaagaaatataaaataatatgaaaaagaagagaaaaggaggaaaaagatgtatagagtgattgatgtaatacatccatcactgacgtgtcaaaatgtatgaaatgtgtgtgcatgtggtaaaaatgtaaaaaacttaagcaaaaatgtataaaagttgctttagccgtgttgtggtatatatgtaataaagttagcattttatatttttggtgtaaaaatttctttattaaattgtaagtaaagaattaatagtttttttttgaaaaataataataattatataaatgtaatccctaaacaatttaatggtttttctaaaaaaataattaaaaaataaacgtattttgtttttttttttttgctgaaaattatattttgtaat

SEQ ID NO: 334542 - DNA, 950 bp, Cannabis indica
ccatagcctcttttgtcttctcatttatgatactcttctttttctttgcataacagatattgaacatagttgcacgcgttggcgtactcgcaccacccgctttctacagatgaacataattaataagtaataaaatcatatctaatttggaaacaagattcaacttttaatgttaaatagttttcaaattttacctgtaatgctctaagttgtgcaaaacttttcctgccagttgtatgattatatttctttaatgcacgactacttttgtttctagcacttttgctctagaacaatattataaagtacaatttagttgattaaaatttctgaaaagatagtaaaaacaaagcaagttaatttaaacttcaacaaaaattacctgtgcactttctgtagcccaatacttgatcaattcttcccattgatcatcatacactcttttatctttacattttctttgctcctcaaatgataagttctccaaataataagtatttttaaggaaagatttccactctcgaagtttcttaccaaacattctaaaagtccaaatcttagcttcaagaggaatgtcaaatttttcctacaataataaaatacttattattaacaacatcatcaacaacaacaacaaataaagatcaatattaaaaatagattaatctaaactttccattaaataataattaatacctgtatgattttccacattccatatttgtatttaacaggtaccttatgccaacttttataattaattggagcattttttccatctcttactaatgtcccaataaagcttgaaagttggtcagcatttttatcacagggctgtccaaaattattacatgtaatttttatcttcacatcatcatggttcccccaaattttacacatttgtgtaggacctcgagttttcttctcactaatgtcatttgtcaacatat

SEQ ID NO: 334543 - DNA, 1243 bp, Cannabis indica
gattactaatcagattgtaaagagttttatttagggcataaaacccaacagttagtcagtgtgaccaagggcttccaacaacccttgtccaagaaacctcggatagggcttgtctaaagctcggtatcgaccgagtgactccccttcttccgtgtgcacacgtgatgcacctgatttgggatatttttatgcaaattaaaaaaaaatcataattaatttataaaaaatctaaattgaactctgtaaaagcctaaatttattaattttttatctaatttctagaaaaaatagttttagaatgaaactaaaaatatttattatcgtaaaattgcgatttccatacaatcatcagatatgcacataaaccaacatgaacacatccaaattaacacaatcattgttttaaatccatattttatgaaagtaaatcattatcatggctctaatactagttgttggggattatttatgaggatctagatttactacaatgtatgttgtttaacatcctaaatattaatttttaaaacaatggaatttaaacacatataaagtttaagaaaccttacacttgttgcaacaaaattaaatgactcattccactcagatctcttacccttgttcctttctgtcacagaatattatcaagatctgagcccgattctccttcaagtattagattcttcatagtcttacacactatgattgagtacttactttttatgtgtcggcatgtactcaatcactaagaggctataaatttttctaaagaacactcaagggctttcaaaatagaagaagaaaaaagaagaacgagttctcaaaactctctagttgtctgacaattagtaaacttggtaatgagtcattagttggatcatgagactatcctattctttttatactattttacttagggttagatttaaattatatgacattaaaaaattgttaaaaattgggaaaaatctccttaagtggctggccacatagtgggccccactaaattggaatttttgccattttgctcaattgttcatcctatatttcacaaatgccaaattttccaattttaatcctctaaatttcaaaactatatatttaataattaaaattaattatcaaataaaatttccattcaatatatctatttattagactttataaagtttcttaattaataaataaaccctaaaacctcttttcttcacaattaagccctagcttagtgaaaattcacaaa

SEQ ID NO: 334544 - DNA, 1450 bp, Cannabis indica
tatccaataccactgccaaaaaccctaaacacctatcttttaacaaatctctaactttcaaaatcgagatcactagaatttaggatccctaaactgatcccgtaaacacaaatggttcctcgcccttgggttggaagatcacaatcttctgcttacaatcaatactagtagaatacttggacaagaaattcattcaaagtatgatatcaaaatctgctaagcccaataccactaaatcagcactcgactctctaccctcaattctgatcgtcatagacctaacccaccttttaaagataacttattctccgtcaggtagtagggttccaaaccctttatcatatttatctcacggcctaccaaaccataaacataaaaaatacatttaaacataaatgacttctaatcttctattgataacaaataagattatattaaaatagcttttatttagggcataaaatctcaacagaagttgtcttttttccaattctaccagtggtacatatctggtaggatcataagcatcctcactccttctttgtgagatttgatcactgccagcatcgaaattaccatcgttccttcctgaacgtggtgtttcatatgtgttggctctttgagatcccataggttctttgccaggacgatgagttatttcttcaggttgatttttgtcgtgttgattgttatcaaccatttaatatgggtttgtatttgggtttttaaggagagatttttctgagtttttatcacgaaggctctcaatgaaagtaccaaactgttaacgcatatttttgttaactaaataaatagcattttttgcaataaatacactacagaatttaatgataataaataacaccagataatttacatagtttagtagttaaaatctacatactccacgagtccttattattagggagattttttgaaatactatacacaaatctcaatatttgaaaataataaaatttctcctattttttgtcgtccctttttccatagattttgcccttacttgtagaaatataggttggcagttatattattgggattgattcatttaaaattgttgatgaaacatggacatttctcatgtttcatttatttacacatgggacaatatctagtaactacccaattgccccttattttttattctttaaacggttatgctgattatgaaagttgcatcttgtcaaacacgagttctccttcttatcaatcttaatagggaaaacgctaagtattagaagcacttcatctcgatgtacctctttatttgtattagtgatgcgagatgatcaccacattatgaataatgcgaggtggttgagtgttgctacttgctcgtgtgggagagtatctcttctcgtatattgtactaagtttatcctgagacatatatatgtctcgtcaattctagtttaatagttattattct

SEQ ID NO: 334545 - DNA, 765 bp, Cannabis indica
ataccagagtggaaatgggaagacattgctatggacttcgtgccaggtttgcctagaaccacgggacagttttactttgtgtgggtcatagtggacaggtttacaaagtcatcgcacttcttacctattcggacgaatttctccattgactagtatgctgagttatatgtcagagaaattgttcgtcttcatggggtcccaaagtccatcatttcagatagagatttgaagtttacatcaagattctaggagagtctacattgagctatgggtactcagttaaaattcatcacaacttctcatcctaagaaggatgggtaatccgagaggattattcagattttagaggacatgcttcgggcatgtgtgcttgactttgaaggatcatgggtaaagtacctacccctgatcgagttcttttataacaacagctatcatgcaacaatcgggatggccccttacgagcttttacatggaaggaaatgcagatcaccaattcacttggatgaagtgggtgaaagaatgttcttgggtctcgaggctgttcagagaacaagtgaggcagttgacaagattagagcgcgaatgctcgcagctcagagtaggcaaaaaggttatgttgatccaaagcgtcgagatattgattttcaagtcggggacatggtgtttctccaaatatctccgatgaaaggcattaaacgatttggtaagaaaggaaagcttagcctgaggttcattggaccttttgaaatccttgagaggata

SEQ ID NO: 334546 - DNA, 1049 bp, Cannabis indica
aaaataaaataactatacctcaatcattcttttgctaatgggcacttcaatatcatcatcagaggaaacttttgacttagaaaatttacccttatcctataattttttaaaaacaaaacacaaatcaacaacaaaacaaccgtaaaaagacataaaaatcaagtacataatactaaacactaaatagtaaatactaaacaataaaacattaaatttattaaaaatctgagagtgattaacaaaattaaaaattaaaaactgtcaaggaaaatccacgaataaaaaccctaaaacaacaataaaataacatattccacatatgtaaaaaacagattgaaaacacacacacaacaaaatacataaacaacaacttgatgataaaaaaaaaaaagactattaccaacccacccgcaaaaaaataaaaaaaataaagataattacctttgtaaccttctctaactcgaaatattcatcttcttgctcaaaatcagaatctgaatcttcaatgattcctttagaacatttggatttactcatttccagagaatcacttactaactttcttttggaagaaatgggggatgcagggctagggggatcatatttataatttttcttcttaacaataccttccttacccattgccgaccttttccaagttttttgagaaactttctagggtttttttacgattggggaagaagagcaagaacgagtcacaaccattgatggtaaaataactatttataggggaacaatgatcaaataacactactacaaaacaaccttttagaggttgttttttctacaacttttataaaaagggaagctaaagggtgtaaaatactcgcctgttgaaaattgacatatagaggcagttattttataaaaatcatagctatttattaaaagcatttagaggcgattcttaattagagtaaaaaaccctctatggcgtcagttatttgaaaataatcgacgacatatggtcggttattttcaaataattgacaccatagggtgttatattatttataataatataatat

SEQ ID NO: 334547 - DNA, 555 bp, Cannabis indica
aaaaaacacccacaatacataaccagtgaaaaaattaccttcacaaatttctaataaaataataaacaacattataaaaccagttttacctgaaatacaaattagctacaaaaatagatttttaaaaattgaaaaaattaacgcaaaactacttataaaaaccactttttggatataacatctatttccattaataaccataacacagtgtgtttaacatatatccaagataacaaaagagaaacaaaaacatttaaaccgttaagtatcattgtcattactaaaaccagttatctaaatgaaataaaaaaattaacaaaaagactgctctagaacatcaacatcctcttctcaaacttctttccctttgcctttagcatttttcttctcctttagtttctttgacttctcctttctgacttgaacatcatcttcagtctgatacccaccaatctgtttcctccaagcatgagtaaataaactaacagccaaatcatctctgtaagttgcaatcctatcagccatattttgtggtatctcatttatcttcccatt

SEQ ID NO: 334548 - DNA, 691 bp, Cannabis indica
tacttggatagtggtttctctcggcacatgactggaaacaagcaaattgttagtcaattacaaagaagcaaaggagggagctgtcacttttggtgatggaaacaagggtcatattattggaaaaagaaacttggtgatgagtagagttgcacctcttactgaaatactgtatgtgaaaaggctcaaggcaaacctgataagcatcagtcaactttgtgatgcaaattacactgtaagttttgctaaaactcattgtttagtttcatctgatggatgctcagtcttaacaaggaagagatctagtgatggtagttatttgttggacaatgttgtcctatgtaatagtgcatcattggacaaatcagatgttagggattttattgctattccaaaagttttaaccaaaataaataagggtattaaatcatcaccttgtctttcaagagttcattcactattattagtgctatggtatggtcttctaaaccttatattgttgaatattgggtttaaacaaagaaaggatgatgtttttgtcctaatgtttgctggttttgatcatgttgtacatcatactccattgtttcaaaagaaatatgatatgcgcatgatatgttgtctaatgttcctcgttgcttgtttatgtatcatcatgtgtgataatgaaagttccacaaacaatcctcaaaat

SEQ ID NO: 334549 - DNA, 538 bp, Cannabis indica
aacagttgcctaaacattttgctattaacagttatttcgtttgattgaaaccttcgtctgatgcaaccttcagccaaccacccagaaactttcgtctgattgaaaccttcgtctgatgcaaccttcagtcaaccacctagcaaccaccatgtaaccatcatctgattcgtcggatgcaaccaccgtgcaaccacgcagcaaccaccctgcaaccattgtctgattgtgtaagtgatgatagtgtaagtggtattttggtaattaaaatcacataaaaggtataaatgttgtctttaccttatgaaagtatttttgtaaataaaatgtcaaattatattttttatgtaataattccttatttatttacccactttaaccaatattctacaataattatttaactaaagaaaaaatttatttgcaccctaaaattttataaatacactttattttaataatttatattgtttatataaaatatatagcttcaattataataatttttttatgttttaaatattataacaaaaattaaaat

SEQ ID NO: 334550 - DNA, 578 bp, Cannabis indica
atctaaatgtatgttttttttttacaaaactcaaatatgtgcctcatgttttttatgactcaaagagtcaagaatcacaataaaagccaaaattgaatcttttcgatcaagaagtcacacattatacattctaaaacggtcatgtgaatcaaaataccaaaaagattacaatctaacatgagaatcaaaaagtttctaaaagcttattaaaaagctcaaaacttatcaatggcaggtacaaataagagatataaaagaagaaaagatgagacgtatatagagagagaagatcaaagatctaaaagtatgccatgcagaaagccaacacttggctagacaaggcttctcgacagagactactacaaagaagacgatagctagaaagtccttatctgaccagatgttcaaacaaggacttggggggaaaatgttatcccaaatttttttcacctgacatggcatgtccacgtaagccaagacagagtacatatggaatacagtcttgccaatagcataacaaggcctccttacaaggtatggcaaaactgttgggtttggtgccctaaataaaacccatt

SEQ ID NO: 334551 - DNA, 1013 bp, Cannabis indica
aatctcctaatggagacgaggacggggcggaaaaccccctaatataaaaataaagtttttaataaaaattaaatatattaaatattaaactacataaaaattaaaatattacacattaattattatttaatatagtaattattatctaaaacccaacttaaaattcataaaaatatactaatatactaaaacaaatataaacataaattataaaatattaaacgagtccccgtcaagtcaaggagtgtcatcctcgttcccgactcgtttaacattgcctgcagcgcctcatccacatggaagaaatgtgtatccctaactgtttgtacctaaaagtaatgctaaattaaaattctatagtgtgatttttatttattttgaggatatttgcgaagaaactcttttaatatttgcattcgttacatatatggctttaataaaaagaatagcgacaatagtcttttccgtatttttgttgaacctgttagatttttgacgttaagtgatatactaatgtgtaattttttatataaaaaaaaattaaatagtttacagtgtcgaaaataaaatttaaataattatttatcacaagtgtaagaaaaataattatgtgtaatcaaatatttaactctttcgacaccctaaactatttaaaatagattccaaataactaacatgtatactgaaaaaataactacaatattctcatgaatacccaaataaataaaaaaatctacaattgtcccaaaatatatacattaacaacttaattaaaaacttaaaaaactacaataattttcaaattataatcaatctaataatatatatatatataaatatatatatatttgaatactaatcatctgtttatttgcatgatttttggtacataatttgacaagatgattgaggttgacccattaggatcccaatcatcataaatatatatatatttcttgtgaagtttttttttgtttttgtttttttttttttttttttttttgtttttcggt

SEQ ID NO: 334552 - DNA, 820 bp, Cannabis indica
tctccagaatatgagtaatttttcaaatagactcaatgattatgaacaatttcacttatgcatacaatctagaatttcaatttaattacgcccttgacacacttcaatttattttcattcagctcacaaaaccatagaacacaattgactaacaattgaaccactttacacatgccaatttcaaccatcaatccactaacccaaaattccatatgcttgcaatacttagtattctccactaatataaattaatgcacaaccaataactagaaggtctttctaggcttgtaatgttaggcttagataagggcagttgaaatggtcatttaggttttcctataccataaacttctccaatcatgtcacttaaaagaaatttttcacagacaataccaattctccttttctaattacatgagagaattttttttttccaattttttcaacaagattacaacaactttatatttatttatttattgttttttttttttgaatttgacagtggttgtcagattttttttttcttttcaagttgttgccaatcaatttttttttcatgtttctctcaatttttacatttttttttccacacacatacatacaaacttcccatccaaattctcccaaactaaggttttacttgtggtataattagggttcaatttacctattcatgggtttatctttttctaagctcaatatgtgtagaaacaaagaataggttaagtcttgtaacgtccccgcttcaagcctccattgggcccttacacccacggactaatggcacttatacgcgagtacgacactctggctgctt

SEQ ID NO: 334553 - DNA, 469 bp, Cannabis indica
cccgacaagacacttaaggcatacttaagtcgttttagaacgactgctgcaagagttagaaacttggatgatagtacacaagttaccgccctttaggcggggatctctactaatccatcaaccgttagaggcaaactctgggacgacttacagggtcgtccagtgagaaacatcactgagttcaatgaaagggctcaggtgttcgttcggaaagagaaagcccgaaaagaaatcaatttgttgaaaacaggttccagaggcaaacccagcaatgtttcgacaggtagtctcttaacgagagttgataactcgggggcttctagttcgaagagaaaagacagttctaaggaaccatcaaaggataggaagaaacacaaaaagcataacaagtacatgcagtgtttacaatttataccaagcttaatgaaactcgggaaagtattaacctcgcacatgagcaaaaggttgc

SEQ ID NO: 334554 - DNA, 654 bp, Cannabis indica
gtgatcacactaagaattcaaacacaccacacctcatttttctcacataaatgagtattaatctattttataacaattatatcatcataatttagaattccttaaatcaaattgtgtaacagtccttttattacactaattatgtgtgaccaacacaagtgttacaagtgacaataaattgtaactcgtctccaagttacaacacgtaaattacaaaatacaaattaaaactataagttacacatttatttattatacatttaatatatatggttcacacaataatatatttatctcattttaatctatacttattatattatcaaataatataccatacacgagctgaaagaacaatctcaaccgttgatgtacttttattccgccaaaaccaccgtctcgccacaccgcccaagcaatcatggcaacctcttctcgaacaccagaatgagcaacatactgctgcattaagtaggggtgttcatccaattcaatccgtactatagctcaaatctaatccaattcaatccgcaaaagtacggatttgatcgattattttggattggttacgattattttaaattggttacttttttaatattaaattatttaatatttatgaaaaaaaatattttttttttccacataactagc

SEQ ID NO: 334555 - DNA, 653 bp, Cannabis indica
taattaaactatcacgaatacaacaaagtttgagcaacacttgtcaaaagtactataagacttaaaaataaataaagaaaaaaaaatttaaagtttcaacaatacaataattagtgggcttagattgggccttcacatattaaaccaaaataaatatgaaaattggtatttttataatatgcggtgcgatgcggtttgaaccgcatattaaaaattcaaaaccgcaaaccgcaccgcaccgcgcggtttaggaaaaatccaaaccgcgaccgcaccgcaaagaatttcaaaccgtattttttttgcagtgtggtgcggtgcgggcggtttgaacggtttgagcggtttgatgaacacccctaaagtttgtatgatggctctaatactatgcagtcatcatgtaaagttgcataacaaatatcatttgaatggtagtacatttattttgaaaggtataattgaggggagctaatacaataggttgtagtttttatcttttgataggtatagtaatttatagcattgatttaattaaatgacttgaatatttttgaaagcttaaacataattaataattttttttatttatatttaattttaaatattttttttgaataaataattttaaataatattattaattagctctaact

SEQ ID NO: 334556 - DNA, 639 bp, Cannabis indica
aacaacacctcagaaatcaacccaggtgcctaaggtttcacccagcgcccaagttgaaaacccatttagggtttcagtcttcgagaccgtcttggtgtaaatggatcaaactttacactgggacataaactagacatactattaacatatttgaggcatcagaataagattcagagaactttcattttggagcactcggagcgcccactgcccaggcacctagtgcccaggttgacttctcagcgcttaagctgacataccaactagggttttagtctttggggccgtcttggtggaaatgggtcaaactttacactgggacatgaactagagatacgacaaacatatatgaagcattagaatgagagttggagaactttcatctttgagcacccaggagcactcggtgttctttgcccaggttgaaagttttccaacacgggccacttccaaccatcaaactaaaaatttgactcttgcatgcatcttcttcgtcttcatcaaaaatggggaaataagtgcttttggggaagaaacaagctaacatgggggccaaaacaagggaccagcgctcaagttggcacttggtgctggccctagcgccaaggttgacattttgtcaacctgggccaatttcga

SEQ ID NO: 334557 - DNA, 230 bp, Cannabis indica
gctacatcaggaagactatatcaacaagatcatagaaaagttttctatgaaagattcaaaggctgtttcacagccgattaccaaccaataccttatgtctaaatctatgtgccctaagaccaagttagagcaagaagagatggcgaatgttccctactctaatgcagtggggtccataatgtactaaatggtaagtactagacatgaccttgcttatgcaatcagtgtgc

SEQ ID NO: 334558 - DNA, 671 bp, Cannabis indica
aatttacaaaaaccaaaaataaaacaatgtacattataaaaatgaattgaaactacatttataccttaaaggaggatgagatacaatgttttctcaacaaaaaatggtggccggagttatatatacccactatttttgtataggttcggatgacagttatatagggaaaaaaatcaaaactttttgggtgtataggattaagtatcgaaaatagaagattttgcaacagaaatgggctaaaatggttgagatatggaggagaaaatggctggcggaggggtggttggcgagggttttctcttctctctgtggtggctgagctctctggtttttcgcgtgaggggaatgaggaagacgacatagggtttgtttatataaccctatgccgtcggttattatagaataaccgacggcatagggtacacgtgtcaaattcacgtccctatgccgtcggttattatataccaactgatggcatagggttatataatctaaccctatgtcgtttatttccaaaccgcctctaaatgggatacgccaattttatacctacggtttttataaaaaaactgcctctaaaggtaaattttcaataggcgggtattttcagaccctttagcttccctttttataaaatgggttcaaaaaagggaagctaaagccttgttttg

SEQ ID NO: 334559 - DNA, 711 bp, Cannabis indica
cttaccctttttcttgatttgttgatttaactcaaatgttcttaatgaacccatgagcttttcaaccttcattttgccaaaatcttttgcctcttccattgctagcaattttgtgtcaaacctgtcaagaagcacgcgaacaatttttcaaacaaagacagattcatctaattttttcacaaggtaaaaaactcattataaatatcagataatctttcataaaaatcagacaaagtttcagtttttgacattctcaattcatcaaatccagtttgcaacatggtaaaacatgatctttttacatcagtggtaccctcaaactgagtttgaaggatttctcacgtgtcctttacagatttactagatgaaatgaatttaataaagccttcaccgaaaccattaaaatagcatgtaaagccttattgttataaccagataatttttcatcttcagtagtccaactgagttcaggttttaccttagtatgacctttatcatcactttcagtagattacgaccaacctgtaagtatggctctccaagccttctcttcttgtgacttgatgaatgctctcattctgaccttccaataaggataattcaaatcattcaacatagtgttgggttttatgccctaaataaaactcatttcaatataatcagatttacttgttaatatagatcagaaataacatttaatgttgcatggtt

SEQ ID NO: 334560 - DNA, 334 bp, Cannabis indica
gggaccatgggcctatataactgagctcccaataagcagatctagaatttaccaattaaattctctaacttattaattcctcgttaaaccactatagaacttggaattgcactctcagttacatagaacgctctatatgtccacgatatagatatgctattaattatccaatattacggtaaatttatcatacctaatccaagttcaatatcgatcccttctaatgcatactccatacatccaacccaagcttactttaaccaatgccctgaaaaggacatagcacttatccaaggtgcaagtaaactacgttgaagattatcatatcagttaa

SEQ ID NO: 334561 - DNA, 598 bp, Cannabis indica
tagtgaactttctaataattatatgtttttatatggatatatgatgttagcttatcttttatatatggacaaaataatattagtttatttgtgattttttttaatgtgtggaaagttttatcgtaaaaaatattttgtgtacacctcctaagtgtcatattaaaactgacggaaaaaaacacttgttgcgtcggttaaagattgacgcatagcttgttgcgtcactttaaaactgacgcaaaatgcttcaaattttttttgtgttttgcgtcggttataaaatgacgaaaataaattttttgtgtcattttataaccgacgcaaataaattactatttgcgtctacggcttatacgtcggttttttaaaccgacgcaaaatctttattagtcacttaaaaactgacgaaaatactcctttttgtagtagtgattaaatcttgcgttcgaagaacaaaggcgtatgtttgctgagtggagagacagagagatggaggcgttaagggctcatcatacagagattgaaaatcataatcggcaagctaccgtgctgatcaaaaagcctacaaaactgtaggttagcaacctccgaatgtcat

SEQ ID NO: 334562 - DNA, 1109 bp, Cannabis indica
tcacattcctccgtccactcgaactacttgtttcctcataggatattgaagaatgggacacacttatctgttgattttgaaacaaacctgctgagtgcagcaatccgaccactcaaactttgcacttccttggttttagttggcgacttcatatccaggagggcttgaatcttctctggattggcttcaattcctcaggcattgacgatgaaacccagaaacttcctcgagctgaccccaaaggaacactttgagggatttagtttcatgttgtattttctgtggactttgaagtattcgtccaggtcgtctatgtgccccccagccttcctggatttgacgagcatatcatccacgtacacttcaatattttgtccgatctggtctttaaacatttttttcaccaatctttggtatgtagctccaacgttttttagaccaaacaacattactttgtagcaatatagacccatatctgttcagaaacttgtatgttcttagtctggtggatgcattttgatttgattgtagcctaaataagcgtgcatgaagcttattatttcatgccctgctgttgcatctacgagctgatcgatccttggaagtggaaaacagtcttgagggcatgctttgttgaggtctgtgaaatcaatacatactcgccatttcttgttcggcttgggctccaatacaggatttgcaacccaagctgggtagaaagcttcaattataaagttgttgttgtgtagcttttctacttcttccttcagggatgctgcttgttctttgtccagtagtcttcgctttcattggactagctggaagttgggatcaatattcagaacgtgcgaaatgatagaaggatcaattctgattttacttcgagtaacaaaccctttccgatctttagctttctggtcaggatatctggatcaatctcgatctcttctaactcttccacaggtccaacattgctgcttgggtccccaagtcgaggatcgatatcttcatccccgccttgggaagttccctacttgggaatgtttttcccttgtttgtgctctgactggaggatacttccttcttagccttggccactgcaaggttgt

SEQ ID NO: 334563 - DNA, 1378 bp, Cannabis indica
taacataaactcagcaaagactcacaaatcttctggactaatagatggagaaacgccttgtgattgagcctgactttgagttcgggaatttgttaccgatttgtctttcaatttataacccactcctctttgatagtccgaccgattcccaagaactttactcagtttgaaattgcttgtatttggtagaagatccattgctagaatcattttctgttcccgtcatgctggcaacctcttcaagcatttgctcctgatcaaataaaatattagaaacacaatattaccttcattcaataattttaaaaatattataaaacttaacaaaaatttgaaacttacatgtatttctctgcatgtcacgctaatccaagtgtcctccgttcttttttaaggtggcctttttttccaagtatgaattgcatagtcttcacggacgtcttgttcaaaaataaagttagtttgtgtaatttgtaaaaaaaattacaaatagaaagttaataattttacttacaaattcattacgagacgatgccatcgattttgtgccttgcgtggacaaatacttcatttcttttctatttttcttattttgattagatcgagcaataaactttgggcttagaaataattcaataatttgcttccagctctctgtagagcagtgatcaggtacaacattgataacactttcaaaatcatctggatccccagaataatgttcctaagagtgagtgtgcctgatattctttctctcagaagaccttctcttcatctcatgataaagagtttgcatcaccttttcaggctttggatgaccatcaatatcgtacaaatactacgaataaatagtatttgttaaagaattttgtattcattgaaattaaaaatttacaacattaaacttgttaatgtgttttaccttcattttttgtacaatctggtctttaaagtgttgaggtacatctttaagattcaagtagtgtcctagcaatgtcattgtgacttcaacacccatttgacgtacaaaagcttggttctccgtaccaaccactttgcctgtcacttcatcaagttttagtggtaatggttttcctgcatcccacattcgttgttcaacattaaggttagtagcaaggtcacgtccctttcttcttggcggtggagttgactcacatgtcgacggtaccctactagggtctggtggatctggtaccacaccacgtctccaccatgataagttgatacgtcagctgacataactatttattaaaaaatatatatactgtttattagcaatagtagaaataatttaaaattaataatgttaacttgaaatagaaaatattaacttgaaattaataattgtatgtattac

SEQ ID NO: 334564 - DNA, 759 bp, Cannabis indica
tgaattgattatttggcattttatttgacatgtgttaatcttaaattcatttggtaatatttgagtgtgaaatggcatttatgcccttgaaaatgtttatgcttgttttatagccctaagggcaaaatggtcatttgaccataagtgatttacttgaactaaaatttatttctgaagaaaaatcaaaggaaaattctgcttgtgtgtagctctcaccgaaccctctcaccctctcttacccttttgatgttatcaacttgatttgtcaaattgaggcttaattgttgagggaaaagctttcttttggcttgagtttggagaagagacctttgctcttgctttattgtgaatcaaggtagctttttataatttttaatcttgtttagttgctgaatttctatgtttgggaagcatgttcttgatgaatttgataatgggttgcatgttaggtaaattggtgctatcttggattgattttgagtttgatttgttatatgcttgttattgaaattgggctgagattatatggtgattctaggttggaatttcaggtgttaatctagtgtttattgctggaattgatttgaagagcttggttttgcagttcttgagtttgagcttaggttttgttaatcttaagcatgatttagaaatgattatgtagtttggattttgagagttgttgttgttttaactctctgttgtgaggatttttatctgtaagaaattaattttgggtatggtttggttaaggttcga

SEQ ID NO: 334565 - DNA, 1077 bp, Cannabis indica
gtttttggtgtttcttgcattgaatcggtcgaccggttcaggggggacctataggaaccggtgaccagttggtccctaggaaaccccacaaatcaaaatttcggttggggaaccggtctaccagttgggacattttagggaatcttaatttttccaatttttacgatatttagagtattgccatgttatccatcaatagggaaacttttaatttcaagttttagtccccgaaaagtgatttagcgtgtcactcaccagttttacgaataatgtgatttaggggcctgtaaatcatcgagcagctgttccacttaggttgactggcacacctgaacccgaaaatgaggtaagataatgatatgcatatgtgtttacatgtttagcgtacatgcttgttaagcctgttagattacattgatagcggtatcagtatacatagagttatattggatactgatagatgtaagtttggctcagatactgatcgatgctatcacatcagtgtggctagagtatgactagcatactaagtataggctgatattatggtcgatagtattgttgtacgaatgttctagactcagtattgtgttggacacggggatagggttatggttgggtgtatgggcgcctggctataatccgggttattactatgttattgattatgcttttcttattaagtatgtcgactcacaaatattgttttcgtgtgtaggtaagggcaaggctaaggttgagcagctgtgagagcgagcatatgaagattgtacatgccggggcggttaggcctagagcgtacggtctttgggacagctgggtgttaatttatttagtcgctagtcgacaactttcgtactatgaactatgaaaatttagtaagtagtttgtaaaacgagatcctggtttaatgttattttgatagttaaatgaaatttttaaatattcacgatttttaataaactcgttgattagcaacaagatgcacaattaagttaaaaatcacgttaacacgcctaaactagtagggtgttacaattatgtatcagagcttccaggttgtctttcgaagatcgt

SEQ ID NO: 334566 - DNA, 966 bp, Cannabis indica
tcagtccagtttgggggactgccatctgaagacccaaacatgcacctcgccaacttcgaagagctttgccagacatttaaggtgaatggagttagcgatgacgccatcaggctaaggctgttcattctcactaagggagcgagccaagagttggttggtatctttgccatccaactctatcaacacttgggaggaattggccctgaaattcctttccaaatactttcctcctgcgaagattgtcaagctgagagctgaaatcaagaactttacccagcatgacaacaaatctcttatgaagcttgggagagatttaaggatttattgagaaactgtccaaacaatgggattgaaaagtggttacaagtgcataacttctatactagattactgaacaacacgtgaacactgatagatgccccagctggtggggcttttatgaggaaaagtgctaatgaggcctttgaattacttgaagagatggccataactaatcaacaatggtcaacagagagagacccaactaaaaaggttgcaagaatgcatgaagtcgatgccataaccaagttgacagcccaggtggaggcattaacaagctagtgactgcacaagccaagcaagctcaagtctgccagctgtgtggaggaacccatactactgacacatgccctatagatgtaaacagtttgccaatggagcaagcccatgccattgaaaactatcagaataattatggtcatcagtagaacttctagaagcagtttcatcctcagcaaaatcaatctcaacaaagccaacagtttccacaacaacaacaagcctcgagtggagagtctaatcctcaattagacacgttactgcaattcatgacgaagattaagtcttccattaaggtcttggaaaccgaggtggggcagttggcttctcaaaacactaacaggtttcaaggtaacttgcctagcacta

SEQ ID NO: 334567 - DNA, 508 bp, Cannabis indica
gcggtttgatgaacacccctacacccatctaagcacattgatgcaatttttatttttatctattttagtattctgaaaaattataaatataatcgtacacattataaataaacgatataattatttaacatatgttatgaaattttaaaaaatttataataatttacaaaaaaaaaattaatattcaaagtataatttatttcacacataaaatctattctatataaagtgtgcctatataactaaattcttggtttatgaaaaattcatgactttttatttatatttaataaaataataaaataaaaatttaatctgatatttaatatttgaactaatattatttatatatatacaatattatatattgttctcatgtgtatattatttaaatcataaaatttactatcctattttgtaatttaataaaaaatctaatttctaaattttctctattactatacattttgaatttaattaactaacaataaaatatatgtacgtatat

SEQ ID NO: 334568 - DNA, 1223 bp, Cannabis indica
gagaagtgtttaaacagctggagtcccaggctcttggttctgttcttctgagccaactggagcaggaggatctgttgttcgagcaggagaagcatcagcatcctggccaaaagcttggacgaaagttgaagcagccgcctctttcccaccataagcaacttgggttgcgtagtactcaaggtacatgtctttagcatcgcctaagtagtcaaaatgggcctgaggattagccttccagaaattgaagaagagctcgaggccggcagtctccaaagcattgaccttctccttcaattggtccgcctcgatcaccttggcgtccctttcctccttcagccgaagaagaacttgtcgtagagaactcctctcatcctgaagactgttaacttcagcagataagatctctatggtctcctcaaagtgatcagcagcttccaggtcctttgttagcatagagatcttcttctcggcagaaaatagcttcttgttggcttcgcccagctcaagccgaacagctctagtttctgccctggcctcctcagcttccttcttggccaagtccgcctccgccctcaaggtgtcggacagagccgcactcttggaagtagcagatttagctcgggagtaagtgtaagccaacttcaaaccggcctgcacaaaggaaaaagttagcatatggagctaagtgtgaaaaattaaaagggaagtatcaaaaaaagacttatcttggtgagctccttcaagactccacccaccaacacatccagagatgagtcactatcagcaccatccagctgctcactgacctcaggaaccagccggttcatatagtgggccagcatctccttgcccttcttggcctctggcagcacgggcacaggtggagttggtgcctgcacccgctcaggaatgctcctgaccagttcagacccagtcgtcggtggtccagactccttggacttggaagatttgggggtagaagtgtttgcagcagtcagctcctcagaaaggtcaataacctctctagaaggtctcttctctgaggacccctctccgcccttaagcttcttggccggaggagaggcgctagagcttccgcccatcctcttccatagagcatcaagcatctaccgagacatgtctgcacagagcaaaaacagtgtggttagaaaacagccatcaaaaaatacaaggcatgaaagtcaagaagctcaaaaaagaag

SEQ ID NO: 334569 - DNA, 584 bp, Cannabis indica
ttgatatagataagtttgatggttcaggtgattatcgtatttggaggaagaagattagggctctatcggctcaacacgagctgttgaaggttcttaaagatccggtggaatggtcagctgatacaactaaagaccagcaagaagagttgctggaaacagcaaccggattgatcattttcaacctctctgatgctataatcagattggttgacaaggaagatacacctgctaagatttggaacaagttggaagaacaatttcaaaagaaatcattgatcaacaagatttacttgaaggagagaatctttggttttaaaatgagtccatctaaatctctagaacaaaacttggatgagtttttgagattgcacattgagttagcaaactcgggggaaaatgaggccttaagtgatgagaatcaagcaattataattctcaattcactaccggaatcctacagggaggttaagacagccattaagtatgggagaactgagatcactcttgaagaagtaatctcagctttgaaatcaaaagatttggaaatgaaggttgaaagaccggggcatactaatggggatgtt

SEQ ID NO: 334570 - DNA, 635 bp, Cannabis indica
ttcttgttgcctcgtaaaatattgaaaaatggatggcatttatttattgacttggaaatgaaactactgagcgctgccattcttcctgtcaaagcctgaacttcttttggctttgttggtgaaggcatctcgatcaaggcctttattatttttgaattggcttcaattcctctcgcattaactatgaaacctagaaatttttctgaggaaaccccaaaagaacatttcttaggattcagtttcatgttgtattttctgagaatgttaaaacattctgcgaggccctttgtgtgatcctcacttttgactaacttcactagcatatcatcgatatagacttccatattctgtctaatctggttttcgaacatactgttgaccgaggttttcggcaaccaatataataataatatttaagaaagctgtaagaagttaatgcaagagatttttacgtggttggggcattaatgagccttagtccacgagtctgtgtatttatgagaatatttattacagagaatgttcttggtgagttttcctctctagttcttatggaacccagaattctcgacccctgccttaatgtagtttggggggtatttatagtgtttttgtggggtgatccctagaattga

SEQ ID NO: 334571 - DNA, 658 bp, Cannabis indica
tatctcataatatcatgttttgaattatgtgatatatatacatatatatattcttcagtcgactaatttggcttcagacatctctttttttgattgatgtaagcgtggcttcagatcaattgtttttttagtattgggcttatgggcggctgcttcttgatgtggtcatattattataaatatatatatatgtataacctgttatgtgatcttttgcaagaccgtaggttatacgtacatacatttatatattattttgtcatatatgccagatgttatatacatatttcagttcggtttactattatatatgctacggtaaatttattttaattaagatattttggaaacaattaaattcaaattttggtgttggtttatgactaatatttgagtaaattaattgaaacaatatgtcgccaaagtgacctcttttgtgtagattaatttatttaaatattaggatggttgtgtgtttgtaattgatgcttatattgactagcccaaaggtaagtgaatattttgctagatttcaaacatacctgtggcgataaatgtgtgacaattataaggtattttgtgtgagcaatacgttagtccaaagattaacctattgtttgacacagttttattgtcaatatttgattgctacaccaag

SEQ ID NO: 334572 - DNA, 1345 bp, Cannabis indica
ttcagcggacaggtcctgcaggaccttcatgacttcgtcaatgcccccaaattcggacaagacgaagccatgattaattatgattttggaaaggcggccggcctctgcagtaatctggaaaaggaagtaagagtgagtgaaggccttaagtaaaataatgaggaaagaaataaatcacaaagtacttaccgcagccaaggcatggctgatgtcctgaacctggtagacagagttcaaggatgcacaagcagcgtaccgtttaggcgcgcaccgagtcagctgggagacgtactcactggtcatctcggaggcaaaaggggccaaggtgggcccgaggaaacggttgaaccagtccgtcagggggtccatgttcagatcccacggattctggtagttctcctcgttaagagagttttgcacctcctctcgcaaaaccctcctcaaggcctccacctcagcgtgcccccgggtgtactcgtcaagggcataattatacttggcaatccgaagctcttgcctctcctcatctccggggaccggagtcagcacaatgccatgaggcactgtaaactcctccgcctcgggagggatcccggagtcatgactcggggccggagtgtccaccctccgcggccgtttagaagactcctctgctaccatcttgcctttgcgcttgcgcactagagcaacctcttgctcttcttcactttcttgaacttcccaagcaagagccccttgctcttcttcaccttcttcagcttcctcaagaagtacctcctcctcatccactaagttaatagtgttcggaggggcactagaagaagctttcctgggggtgaccatctaggaagaagtaggggaggggaagcatcaggactgtgggcttcagcaagggtggccaggatcgcatcgatgggatcagctgctgcaacaagagaaaagaatcaagtgttagaatgtctgtgaaagcagtgaacacttaaaaagcagtcaagctagtcctaccctgactctctaattcggccctagcaaagtcccgaatcttaacactgctgcatcatccctgaggtagttttccgagggacggaaccagctagaagacagataggctgaaggatccaagggaacgggcaccggaggccccgaactcatccggaaatggcctaaataatcacctaagttggagaagtaatactcctttgcatgatccccccaccgagtagagggcatcccaaacctaaggagacgttcatcgaaccctataggcctaaggctagcatattcacgaacaggagggacgtaatgtatcattaaaggggacttaccagaaccagaagtgctggca

SEQ ID NO: 334573 - DNA, 840 bp, Cannabis indica
cataaatatattttggccatcactgactacttctccaaatgggctgaagccgtaccactaaaagaagtacgggcagaagatgtcgctgattttataaggacgcacgtaatttattgatacggggttccttaaaaaattatctttgacaatgccctttatttcaaatgtaaggcgatggttaagttgatgaacaagtacaaattaaagcacagtttctcggctagttacaacccgtcttcaaatggtcaagcaaaagcatttaacaaagtgttatgcaaaatcatgaagaagacagcgacaaagaataagagggattggcatgaacgcctcctagaagctttgcgggcttatagaaccacagtacggaccgcggctggttgcacaccttataacttggtgtttgggtctaaggcagtgtgacctttggaggtacaaataccttcattaagaattgctactcaactaacaaacccagatgaaaatgtgcaagtccgtctagccgagcttgaagcattagatgaaaagcggcttgctattcaacaaaagctcgaaatttaccaagcccaggtagctggggcattcaacaagaaggttaaatttcgatctttttcagtcggggatctagtgcttactgtgaaaagaccaattgtcataactagaaggatgaaaggcaaatttgaagcaaaatgggaaggaccttatgttgtcactaaggtcttcctaagaggggcatatgaactttcaaattcagaaggtcgacgcatttatccgtgtgttaatgggaagttcatcaaaaagttctacacttaaacaaaaaggtatttacccatggtgtagaca

SEQ ID NO: 334574 - DNA, 3192 bp, Cannabis indica
aatctagatcctggtgaaacatattccaatagacacgtgtctgcaattctctacattcggctcgagagatatttcgaaaagacctcagccatgcatctacacgaacaaagtctgcctaaccgagcaaggcaagggcagatgatctggacagcaagaaaagtcatttctctgagcagtgtatcaagacttagctacttaagttttgataccgtcaagcacacaagcaatccctacaataatgggatcctatcaaagggatatggaaagctgtccgaagccctcattttgtgtattctaaatatgtaatgtatgttcataccaattatagatattgtaagcaaaagggaaacctttcctcatgcatttagccatataaatagtgatccattctcactgtaaatggggtcgaaagaattgcttaagagagatctaagagaaaacactcagagattttattgtgatagctttgagagaggaaacactgtattctttgttcatgagttaatacaatctaaggggagtaggctattaccgaactaaaggggccaaacctctttaaattcttgtgttctttattgcttactgatttttgctctatattaattacgtttcttattgcttattaattgactcactatcgttgattaaaagtgaggtcaacattttggtgctttcaatgacattaaaaattcaagtttgctcttttccttaagttttatcagacacacaaaatggtggtccaaactcgcagaggcgtggttgatcaaagtgacccactgttaacagatcctgcattgtagactcctaggaatacaagggtcccaccaggaaccaatcttgaacaaccaaacatgcagccacctactgtgagccaaggtgtgatgtcccctctggctaggatcacacctggtgtgtaagagactgggaacaccagatcagcagccgattagagtactcccagcactgaaatcccatccataactaatgctcagacaataataggggatgatactgagtttcaaaacctctgcaatgcgcttggactcatgcaaggtcacactaatacctctcattaagaccaagaagagctctgtgctgcaatgaaccttgcattcgaagagcagaggtgttagttcatcgaatggagggatagggagatggaaacattgaaggctcaacaggtagccatcgatgacagaacaagacatgccaccgtactgatacacaaagcctatcaagttgctaatcagcaaccagctgctacgtccagtatcccgctaggcggcacaaaaaaaaaattttgctgggcatatcgcccaaactcatagcggttagccatccaatccctagtcaagggttccacctgtgggccaagtggtagccgaccagaccttatccgataattccttaggtggagttatacctaataactccatccaaactgacaattctgtccaacagaccggccaaaccaaccaatcattgagacaggtacagcccacgatctgagggatgatttgaatagaaggaggggtctggacgaacaatatgtcaactgactgctcaacccagtatccgtgtccaataccgaactctaagagatcctgatgtgacacaagtcggctaagaggctgagctagttcacccatctgtgcaagcacattcagatgatttaaaaaatattttccaaggcctggcttgccaaaaactcactgatctcgagttggtcagagctcgcggatcaaccttcaatcctgagatcaacgttttggagctacccctcaagctcaagatgtcaacctggaagatgtacatagggaaggaggatcccttgtcacatcttaagtatttgaaatgcaaatagatttacaaggggtacgaggtgatatgcggtgtagagtattcccttctacactttcagaagccgcacattagttgtattttaagttaccactaagaaggtttaattcatggaaagttttctcctcagagttccatgcacagttctcttcttctcaccaactcccattacatctagaagacctggtcgaagtgaaacaaagaccaggagagcctctttgagcatatataagcaaattcatgacagaagctacgaaagtagcctggttaattgaagaagggaggatggccgcaatactgggggcattgaagtacttggagagctgtggaaggatatcaagaaaagtggccctgtaggatctatggttgattttttggaccaagctcgaggaggccattcatcgggtagatggcgaacctaggtcgggcaaaccacaggtccccttggtaggagcatctaatcagaactcacagtatcctagcagcttagcttcgagagacaaaagatccaacaataatggcatacaaggcaatggaaagaagcgaaagttcgcaggcaaagccgaatcaacccctagagaaaatccttccaagtttactaccttttttgtcctaatcaacgatctagaaacaatctacatggcaacctaatttgtagtcccgtacaaaaaagctactcccatgaaaaatgacataagcaaaagggacatgtcaaaattttgcctttttatggggaatatggccatgacactaatgagtgtaacaacctgtagcatgacattgaattcctaataaggaagaataacccgcacgtgtagaaatacgtcaaggccgaccaaaatcaacgggccgcccaagcagacaacaaccaaggcctactaatgcctccaccagtggacgggcatttacaggtccttattggccagagtttggacaagggaaaaagcattgccaaatagggagccacccaaggcagggacgaagatgtggatcattgacttggggaaccaaatacaaatgttgggccagtggaagaattggaagagatagaaatcgacccaaatatcccaaccaggaaactaaaaatttgcaacggtttgttgtttaaagtaaaattagctttgataaaatttctaagtgcaaacctataaatttttgcctagtcacatgatgacatggtcggtatcgatccttttataattttacatgccctaaacatcgatccgaacttccatcccgttcagtaagaaagaagattgttggacaaagaaagggcacaagcattaaaagaggaggtagaaaagctccgcaataacaacttcattattgagg

SEQ ID NO: 334575 - DNA, 1154 bp, Cannabis indica
acattttgagttttctagaaatacgttgtctaatggttgtttttatgttgttttatggttgttttatgaacacctggaactagtttttgaaaacgatcataaacatacataaattaattgagcatgtttccagttctcttgtccaacgtttttatccgattaaactccaattaaagtgttggtaacagccatgtgatgaaaggatttgatcttcaaatgtgatcctcaaaacactataaagagaggtcttgagttcactttggggtgaacaagtttctatcaagagagcgcattgttagaaacactataggcttgataaatctagaaagctatttccattcttttctttttcctaagtgcttgtggtagggggaaataagcttttggacaaatgtgtaaaaccttattcaagtttggtgcttcccttattatacacttgtggtgtatgtggtgtttagatttctctaacatctcttttatatatatgctatttatatattgtgtttcatgtgtagcttattggtttgagttgtaatccctctcttcatctctattccctattttatgtgtatattttgtttagtgttgtaacattatttaatctatgattttgtcctttgtattatttttcatagagttgtattcttgttggtttggtatttctattggagcacaacagttttccaacatcttaaacatgtaattaaacacaaatatggataaattcacaatcaagaaatgagaaatagcaattatcattaacctaagaaataatgtcaatcaacattcatcatctccccaaataagagtttagttcataatctccatagtcaaatccataattaaaattgaaacacaaattaacataaagacataaaaaggagaagaaagaactagttggtgatcttgctccgggtcgccataattgcttcctttgcctccttcttcagttctagggtttaatttttgagtcttttgcttctaaaatacgaaactcatatatagaaaataatgcagatatcttcgaatagtgaaattacaaaactgccaaaaaatcttgtctttagcacatagttgcgactacctacaacctagtcgcgaccatagactaatttcaaaaaacaagctttttgcccaaactccatagtcgcgac

SEQ ID NO: 334576 - DNA, 776 bp, Cannabis indica
cacgagtggaactcatgaccggggaatggacggctgatcattggttgactgggaggcattcatcgtcgggtcatcgtccgtttctcccaagggaacgacgttcggcatttgctggcctacagtctggtaggctcttcgtatcagccaggtagcttgccgactacgatcttcaatctctgcatggtgagcccttaatgcctccatctctttgtctctccattcagcgaacatacgcctctgttcgtcaaacgcgagatttactgcggcacagagttcatcctgatcatgatacagggtgttgctatgaccctgcatgggtccgagcgcagcacgtagattttgtaattcagttgcgtctctgatggtcgtttgggcgttggttcctggcagaatagtcgtgttatgaatcccctggctgtgtgtagaattgttattcccagtctcttgcacaccaggcgcagtttcagtaataggagttgtttcaccattcaccacgcttcccgtctgtacaggattgacagcaggtggaacccttgactccttaggtcctacaatgtcggatctagcaatcgtgaatttgctgggtcagacaggcctctacgagtttgcaccatcgtgttgaatatcgaaaagagcgatctacgatccttctctcaatgaaagcaccaaaatgttgacttcgctattagccaacgacaatgagtctttttgataagcgataaacaatatgtcgtaatgaatatataataaagcaataataagatacaggaatttta

SEQ ID NO: 334577 - DNA, 1083 bp, Cannabis indica
ttatcaaaacaaaatttaattatgatccgatctaaaagtgttataacaaaattgtttatattttctgtatctgtttgtattaggaattgttttcaagttgattatataaaaaaaaaataagttgtcaaaaattaagctcagggtcctatttttactattttggaaaatacagggtccattttttcatttaataaaatacagggtccaatcggtaacttttgcaaaacacatggtccaaaatggtatttacccagaagaattttttagtctaattttttttttcatattcatgtatatcatagctatttaagatatcctacaaaattttaagaaatttagaataatttaccatataaaaaataatattcaaatagtttattttacacgtgtataaaataaaataatcatgtgtgcaatctgtttgaatgtaatttttgacatgttaaacttttttgaattctttaaaattttacaaaatatcttaaataattataatttacatgaccatgagaaaaaatttaactaaaaaattatttcgaatataaaagagatagatatgtatgagtacatttcttttgaggggtgcattgtagaattttcttttaatatatatcctaatatttagctataataattttttagcttcaattttttattaaaaaaaataaataacatcaatatcacaacataagtaacattcatataaatttctaaaatgatatatttttttatctaataatataacattttaatattttgtcacatactatattgggtgattctaaagagatgtattgatacaccattgacttatttcggcattcagaaaaaaaattagtctaattttttttcatattcatgtacgttataactattcaaaataacctacaaaattttgagaaattccgaataatttataatatagaaaataatgttcaaacagtctattttacacatgtgtaaaataaaatagtcacgcgtgtaatatactgtttgaatatagtttttggcgtattaaggtgacgtttggtaacacttttttaatcagttttttgttttaaaagtagaaaagtgaaaatattt

SEQ ID NO: 334578 - DNA, 513 bp, Cannabis indica
tagttctagtgtcggtgaacttcttctagttttggttcaaattttgggtcacagggtacgggttcggttccacttttgggtttggcactgggttcaggtgcgggagtgggttcgagtccttgtcagggttcgggtcaagggctgggtcccaaatccatacaccgactacgagttttgtccaagccctgggtccagatctggatcccaatctcgggtcccagtctgtttccatttctagtgccaagtcacgagttgggtcctaggttcaagtttgggtctaggtccggcactaggtcccggtcctagttttgtttcccaagtccctatcctggttctgggtccgggtcccggttattgtgtgggtttgggtaccggtctaggttcggattcgagtcctagtctccgtactggtttaagtctctatttgggttttggtctgggtttggctttgggtttaggtccttgtcctggtcctagtcctagttcggttctagttccatttgcgattctgag

SEQ ID NO: 334579 - DNA, 623 bp, Cannabis indica
ggccccagcagatccatctaccccactaccagctgcatcacccccactagaagaggaggaggtcttccctgacgggtacgatccttatgagggagctccagcgactcccatcgatacaggtgttatccatgtacatgacagcgagtcccagggtgacattctgtcgatagaggcacaacctgcagtggttaagagtcggaagaggaagagaaatcctcctgtatggttccgtgactacacggagacgaagaagagacagaggccttcttcgacgtttgatcccctggcgccaccggatcagcaattgttagatactttccgaaagtggtgtggtggactcattccgaaccaccgacttcgggatttgagaagtggtgattacggtccatcattcttttggaagctgctgacaccacaggaatggcttacagatgacgtaagtaaagtattttataatattacttcactttacaactttatgtgcaattaatatattttgttgtctaactgacatttccctttatatgcagcatatagatgcagcaatgcatatgctgaggaggcgacgcgccgactatccactgacattcctcagaagggtatcattctctccacattcgtga

SEQ ID NO: 334580 - DNA, 902 bp, Cannabis indica
cttattagttcctcattagaccactatagaacttcgaattgcactcttagtcatatagaacgctctatatgtaccacgatataaatacgttatgattatctattgctacaatcctaatagtcaaggatcctctatagattatctacactaaatagggaaaaatttaccgttctacccttcaatgtattttatccttaaaacacttagctacctataaatgatatttcagtaaactgatataattactgaaatgagatctcaatcatttatctctatttagccaagctcgaagaaaaccatcgtttaacttctacgttcagatagaagctatagattccatatctatgattagcactcccactcaattgtactatcatgttcctaaaatgtacgtatcacccagaccaaaaggtaggcttaactaacaaattaaagaacacaaataatcttgagatcgaacctaaccatgtcaggattaagatccatacacaaataacactctttagtgctaattgttcatttctatattatgacttcaaattatttttatactatcttacttatattcctttataattttgtagtgcgcattggacgctagaggtcgttacgccaaaaaatgttttttatttagaccctgtacgtggccgcccaattctcgaagaaattactcaaatgatcggaaggtaataatttaatgacttcttatgtaacaaatttaaattaactaacgaattgaaatgctaatataagtttttaaaacagtgcattcagatatataggggacgcacacatgagtatcttggcccgtggcaaagaatttcactagcaaattgtccaagacaacctaaaagccaagaatgtggtttttatgttttgaaatacatgactaacatcgtcgc

SEQ ID NO: 334581 - DNA, 572 bp, Cannabis indica
ttttgtgtgaagaaaaatcgtgtttcataaattaatttggccatgattatgttcattttatttgtttaaatctgtatttctatagttcacttacattataacgggttccatgttttttatttttatacttgtaatcagaaaatccatgtcttatggtaacaaaacaaaatttattcgaccaaaatatatataatttctgctcattttttctcaatcctttcacttttttgggacacttatctaaaattattactaaacagcttttcaaaaataattccatacagaacaccaaatagaaagaatataattttacttaactgtatcaccatattattatttttaatttttaagataagaattaaagatttaaatttatttttcttaagatgtctaagtagggggagagaaagaaaaaaggataaagaattttttatttcacattcgtatgtattattattattattattattattattatgtgtgatttatatatatttctattattgtttcttttaaaacaataaaaagaaaagtatttatgtttttaataaattactattgtgatgtcgtta

SEQ ID NO: 334582 - DNA, 606 bp, Cannabis indica
tgaaccagtcgaccggtttagtatggacttgtaggaactgaaattttagtttatccccatgtagaccccacagaaccggtcttctgattgggaatcggtctaccagttaggccattttagggcaccctagattttcctatttttaaaatatttagggtatttttatgttatccattgatagggaaacttttagttttgattttaagttcccaaaaagtgatttagcgtgtcactctccagtgttacaaatattgtgacttaggggtctgtaaatcgtcaagcaacagttctactcaggttgaccagcacacctgaattcagaaatgtggtaagattaggataatgatatacatatatgattacatatttagcatgcatgtttataaagcctgttagattacattgatagcgatatcaatattcgtagagttgaattggatacggataaatgtatgtttggctcaagtactgattggcgctatcacatctgcacgactagagtcccaattataggtcgatcttatgatccgtagtactttcatacaaatattctagactcagtactacatttgatgcggggataggattgttgggttttgtgcccta

SEQ ID NO: 334583 - DNA, 603 bp, Cannabis indica
catccatcgcattttccgtgtcgcgagcaaaaattgtaaaaataacataattcatttataatacaaataatactcctagagtttaataaagtctccggaatagagaaattataactctaatgcctacttttgataatggggctcacaattaaataaattcacaaataattataaaaatatcgataattaatgctaattttctttactaatccatattataaatgcggtcattacaattatccccccgttaaagggatttctccctcgaaatctaacctgaatagctctgggtattgagtcctcatttcagactctaactcccaggtggcttcctccaccttgctattccttcagagcactttgaccagggttatggtcttgttccgaagaactttttcctttctatcaaggatctgaactggttgttcttcttaggataagtttggctatagttcaagggtttcgtaactcaagacatgagtccggtctgaaacatatttcctcaacattgaaatatgaaatgcattatggacagccgataatgctggtggtaaggctagccgatatgctacttgcccgaccttctcgagtatctgaaatggc

SEQ ID NO: 334584 - DNA, 637 bp, Cannabis indica
gtaggtcgagcagatagtaatgaagcctaaagtcttacatagatggtaggatgtccgaacaagatcatgggtagatatccgaccagctctatcagatagatagcttgcatgcacctattgggaatattttaccaggatctagatgttgggctttgtgccctaaataaaactctatttcaatgatcttttctattcaattatcaataaagaaacagatctaatttcattacttgtttaatgtgttttttggttcatgtgatcatttatttacttatttgattaattgttgtgatattttgcacacgtaagtgcacatatcgtgacaagtagtaaacttactaagtgaggtcgatcccacaaggattgtagttaagtacgttaatattaaacttcttcttctatttggttaaataaaaattaagaaaagattgaaattaaaatagtgcaagaataagcaattaaattgaataggaaattaatggttaataagaaatagggtttcgacttcaattgtttctattgattatggcctaatatgattatctccctattattaatttctatgcaatagcagatttactaaggtaatttgtagtcttctcagatatataaacctcaattacatgcaaactttcta

SEQ ID NO: 334585 - DNA, 515 bp, Cannabis indica
aataaaatttttattattttgacaaaattatcttttacttttcaaaaattatatttgttttattaaattaccattatttttataaattgaacaaaaaaataatatttttaacaaaaaaatatatttatcatgtgaaggaaatgtgcacattcttaaacctaattatttaaaaataaaataataaaattacatataaatattaaataattagtaatatgatggtaaggtgagaagtagagaaggattgatagggtaaaatagacttttgttagtatggaattagcttcaaatgattttatagtggaaaagcaaattcctagttcaggtgaattgtaattcctttggaatggggtttcaagttctaataaagaaaccaaacacttgattgtagggctgtacaaaaaaatttgtaaaccgcccaaaccgaaccaaaaaaatcgataaaaattacaaaccgaaataacccgaaaaaattacaaaccgcccaatctgttaattgggcgggttgaaaatag

SEQ ID NO: 334586 - DNA, 1034 bp, Cannabis indica
catccaaaaaagttcaagacttcgttgtgaagaacataatttactggttcggattgccgtagaaaattgttttcgacaatggcagccagtccttcactgatttttgtgtgaaccatggtatcatcaaaagttttctccgcagtggcgcatccccaaggaaatgatgaagttgaagcagtcaacaagtccctgaaggatacactaaagaaaagactcgaggatgctaaaggaaactggtcggaggaacttcttgaagttctatggccgtaccgaacgattgagaaaacggcaaccagatagactccatttgccatgacatatggatatgaagcaatgctgctcgtagaactcgaaccaccatcccacagaagattgacgtacaaccaagaagcaaatcacgtacccctggccgaatcacttgatgaaatcaaagagaagcgaaccacaacaaacttaaagttgatagaccatcaacaaaaagtagctcggtatttcaacaaaaaaagtgaaggctcagaaattctttgtgggagatatggtcctaagaagagtatttctgaacaccaaggatagtacgttaggtgtacccggacctaactgggaaggaccatatcaggtggtcgaagttctcaaatcaggagcataaaaattgggtaagtatgataaaaaaaatgcaacttgttctagtaccaaggtattggaatgggaaaaattaagaaaatactaccaatagaagtaccaaatcagatgaccacctcaagtactaaacaaaaagaacatttactcttaagtgaatggccttttgggcagaccacgcccaaaggttcggataaaattacaaagtactcaggtcgaattaccataatttaaagtacaatttttaatttctgcaatttgttttattttatgttaaactaaaagatgagatttgataaaatagctttaatgtaagttactactgtaacaaacacattttcgatcaataaatgaataaagatgtttatttcaaaattcaaattgagtcgaattcacta

SEQ ID NO: 334587 - DNA, 475 bp, Cannabis indica
cgaaatgactagttacctcagtctggaaaatttggagaaagcttgagcaagtagattggttccttattcgaactttctcaaacacacacgttaagcctttccacccatttttcccactctctggtccaaacatgggatgagtacaaagcacatctgactcttcaggaagcacctaataagcaaatacaaacacgccttgtgttatgtaaaaactaaaaagcattttgtttttactatggagtgtttttttatgggagtcaatttagcttacttgcagtagaaatgtttttggatactctttaacagagagtacatctacgaaaagggttggcctttttagacaatgaaatggcattgacttgacaacctcagataaggacataatcgaggtgcatatcaaaacgacgtcgttttccgcttcaagaaacgcttctatatccctgttaaatactcaagtaattttttttacttttag

SEQ ID NO: 334588 - DNA, 627 bp, Cannabis indica
aaactaagcggtctttacagcgcctactcaggtctttctccggagggcccaggtctttgcatttgacgaccgggcggaacttgacgtcgggggcctagtcacgacggagaattgccggaaggccaagctcatattgccgcaccaatcagtggaggactctaacctttctaaggttatttgtctgaaggtgagggtgcctgccgcggagaagaccttctgggacgaaatcatcgccaccgccgagaagaagtaccaggaatatctctaccggaaggcccaggagaaggcttattccaaggcccaggcaacttctgggaggcccctttgcgtggggagcccggtcgagaggagaagccaagcgatcgctaggaaaccccttcgcattggggactcggctgaaaggagggctcccaggccgaagccttcgattcaggagccgaacactggggctcctagcgccagtactttcgggtcgggtaagtctcctttagcagtacattacgttccttccgttggaaaatatgccaatgttagaactgtagggttcgatgagcgtctccataggtttaggatgccctcgacccggtggggagaccatatgaaggaatattatttttccaacttagg

SEQ ID NO: 334589 - DNA, 1067 bp, Cannabis indica
ctttatcgtcgcatagctagacgttgatcgagatcttcatagtggcgccagaatcatggcggacttggtttgatcaaattgacctcccaagtagagctttaaccgctgcccattcactttgaaagtattagggccttcaccttttagttccaccgctccataaggaaacaccttgatcactgtaaatggccctgaccaccttgactttaatttaccaggaaacaactttagtcttgagttgaagagtagaacttgttgcccaggttgaaactcctttctgactaaatttcggtcatgccacctcttagttctttccttgtaaatcttagcgttctcataagcttcgtttcgaaattcctccaactcatccagctgtagtagtcttttctgcccagcagcctttaaatccatgttcagagttttcattgcccaataagctttgtgttctaactccaccggtaaatgacaagcctttccaaacaccaaccgatatggtgacatcccgattggcgttttgaacgctgttctataggcccacaatgcgtcatccaactttcttgaccaatctttccttgatctctgcaccgttttctccagaatcgtctttatttcccggttagaaatctcagcttggccattactttgcggatgataaggtagagcagttctatgacgaacaccatatttcgaaaggagtgcttcgaactgtttgttgcagaagtgactcccttcatcgcttatgattgctcggggagtaccaaaccgcgtgaatatattcttttgaaggaaccgaagaactgtttttccatcattagctggtgttgctgcagcttccacccattttgatacataatccacagctaatagaatgtatagattgctaaacgatgaaggaaaaggacccataaagtctatcccccatacatcaaacaattctacttccaagattcctgtcaaaggcatttcgtttctccttgagatgtttcctgtacgctgacaacgatcacatgccttcacaaaagtactagcgtctttgaaaagtgttggccaaaagaatccactttgca

SEQ ID NO: 334590 - DNA, 494 bp, Cannabis indica
actcaggctgatgcagaagccagcccttcacgtggtgacaggtcagctctcagttaacaactccttttactcagtattattttattttgggaccacacattcttatgtagtagctagaatctttagtaaattggatagaacgcatgatagatacgaatcagggtttggaaccctattactggcagagagttagttatctccaaaaggtggattaggcctatgccgatcagaattgacagtagggagttaagtgctgacttcatagaaatgagcctagtagattttcatattagtctaggaagggatttcctatctaaatactcaggcagtattgactgcaagaggaagatggtaatcttccaaccggaaagtgaagaaccatttgtatttgttggttcagttcagggatctcagatcccggtgatttcggccatgtcagctagggagttactgcatgtcagctagggagtttctggccgtggtgatggacacca

SEQ ID NO: 334591 - DNA, 688 bp, Cannabis indica
tccaaacaaacttcagattctttcgagtcagctccattaagggtgtagcaatctttgaaaaaccctcaacgaaacgacaatggtaactagctatacccaaaaagcttctaactttagtagctgattttagtgttagccaatcccgaacaactttgatcttggccggaataaccatgatcccatctttatccactgtgtgccctaggaaagagacacgtgataatcagaactcacacttcttgcacttagcgtaaagcttatgatcacataatcgttgcaatactgatctaagatgcagttcatgtacttcttctgattcagaataaaccaaaatatcatcaataaacactatcacacacttgtctaggtaatccttgaatacccgattcataaggtccataaatgctgccggagcattgatgagtccgacagacatcaccaaaagctcataatgtccatactgaatatggaacgcaatcttcgggatatcttcttgacgaattctcagttgatggtaacctgagcgaaggttgatctttgaaaagaccgcctttccctttagttgatcaaataggtcatcaatttggggtagcgaatatttattcttgatagtgagcttattcagttcccaatagtcgatacacattcagagtgacccatctttctttttcacaaataacactggagc

SEQ ID NO: 334592 - DNA, 612 bp, Cannabis indica
ttctaaacaaaagattcttttctttgaataaattaaatggttgcctccattggctactcatgtcctatattctacttaggtataccaacaaatttaactcatattatcatttccctaatttgtctaccttgtcagatgagttaccactaactaacatacatgcacagtccattcagatcttttgatgtcccctcattgagtgtacaatgtttaatattgatatcaattgaaacagcaattataatattgcccataaaattctaacccgagtcggtcgaaggaacgatacttgagtcctcttgagtcataacgacacttgtacaggaaccatacactcttctcctttaacatcattctttgttaattgtgggcaggctctttttaggtgaaccactactccacaataaaaacaaaatctggctctacatcggcctaaatggcatcttttacatcttgaacactcaagataaggtcaccatttcttgttctcaccttgaccgctatcctggttacgctggaactttttactctgtccataattggtggtttatttagttattgcttcctaatctgctcgtaagttagttccataagtttcaccacatccagtgg

SEQ ID NO: 334593 - DNA, 506 bp, Cannabis indica
tagttccataagtttcaccacatccagtggtacaccaggaagtgtcggtggtacaggaaaagacataagatgagcttgttgttctctcagatctcgaatttgtttccccttgttatctaatcatatcttgcatggcagaatttacatgttcctaccgttgcagcaataaaggattctcttccttaccgtttgccccgagcctagacagctcactaatcagaccgattgcccttacacttactgcataacgtatcacacattttgtccgcatcttccaagcatttagaagtcagacaaatatcaatatcaatatgcatataccatacacatattcttatcataatcatcactatactactttttccaacatactttataatagtctaggtaggtaatccaataacaaataatataaacacttactagaccatgagtcgacctttcttcacagtaaatgtacatatttgactagtcttcaacacctttaaaaccatgactgctctgat

SEQ ID NO: 334594 - DNA, 706 bp, Cannabis indica
ggtttagaacctaggtgtcgcggcatggcttttgcatgccgcagcgcacccctttggttgagacctggcaattcgtcccaggtgctgggcagattcaagtgcaaactttgaatatacataactttgtgatccaaactccgttttgggagttctatatatcgttggaaagctcgttccgagctctatatgattatctatattttaaatgccatgtatataatgtatgaatgtgaaattatgggttaaccctatttttgtaaattccagaattgtaactaggattaccgacacccggtcaggagcacttggggatttggaatctctactattgcgggacatcaggtaagacagtagttagcacgtagagttatgcgcggtggcgcttatattggaaatgatatgtgtgagtaactagtaaccgggattagggttatcaccctaaaatcagtggtttaattacctagggttattaccctagtgatatgtgctgtgtaaatgctatgccatgttatatatatgattatattgagattcagggttatgtgttcaaggcataaccgggttggactcggtaactagaactgagatgaaccgttctaaggccttattgtagttagacgtgtgagcacaatatgtaggtctatgttacatagacataaataggcatgtgagcgtgacatgcaggtttgtgtcacacaagcgtata

SEQ ID NO: 334595 - DNA, 760 bp, Cannabis indica
ttttgcttcttttgcttccaatcgactactctctgagcggctcgagtatttggagggtgagactcacaaattagtatcccaatgaaaggttgtgtgtgagcaacaagacaacgcccaacaggagattaacctcctcaagcaagaagccaagaaggcgaatgaggaagtagagaaagcaaagaaagaagccgagaaggcaaaagaggaagccaagaagatgaaggaggaggccaagaagaccatcaaagtccaagctgatgagttcgaggagaagcttcctagaaaacttgctaagaaagaaatcgagactgtagaacggtgcgataaagttggttttcgtactgtagatcaggcctagctttggaaccttaacatggatactagctacttggcggagaatgaagaggaaactttagctctttgcaagaagaccaagatggaggaagaagacggtgaggtcaaggaagaagaagaagatttgtccaagtctcccagcatgtagacttggtttatttatctgccttttttcttttaggagatggccttttggccgagacaatggttttgcccctagtggcacttttttgtaaagacagatttacaaggttggacggccaactttgctttataatgcctcgcacttttaagtgtaaactttattatggggacgttttcttgcattttattcacaatataaactatcacatgcataaagtttattaggggtttgttgggttttatgccctaaataaaactcttt

SEQ ID NO: 334596 - DNA, 453 bp, Cannabis indica
tacagagtaataaccagatgttactactctagaatgatagaattgagatcgggtgtacttgcattcccaatcctaaaaacagaacaataaaaacactgctaaaacaccataaaacactacaaaataacaataaaaaaaacaatgaaaaaaaacagagaacagaatgcataacatcacaaacctcaacaatcctattaacagaaatttcctcagccacacctgatgatggcaacaccttgacaggggatttacccttgccctaaaataaaacgaaacaacaccaacaaaacaacaaataaaaatcacaaaaaaacacataaataaattaaacaagatatggaaaacatatacaaatacagagacaaaaacaaacagatacccagttatatgaacttgaaaaatcgaatttaacaaaaaaaaaatcaaaaacaacaaaagataaatagtaaaata

SEQ ID NO: 334597 - DNA, 579 bp, Cannabis indica
attcctatgttgtgactaaaagtattaattacaaaaatcacaatttgttgtgactaaatgtatttttagtcacaatacttgtcgtgactaaaactaaattggtaacagtttgtatctaaatactatattttagtcacaagtaatttaatcacaaaaaatttatattataactaaaaaattatcactgatgtatatatatatattttgtagggagagctttatcaacgagtgatgaatggagaaatgactcctatttatagccttaacttctaaccacgcgtccacgccatgaccctatacgcttaacttggggtgttcatcaaaccgctcaaaccgtccgcaccacaccgcaccgcaaaaacaatgcggtttgaaattctttgcggtgcggtcgcggtttgaatttttcctaaaccgcgtggtgcgctgcggtttgcgattttgaattgttaatatgcggttcaaaccgcaccgcaccgcacattataaaaatatcaatttttatatttatttaggtccaatatgtgaatgtccaacccaaagtccactaattattgtattgttgaaacttaatttttt

SEQ ID NO: 334598 - DNA, 882 bp, Cannabis indica
gggaattcaataccccgatcatcgatgtatggcctaacatttagcctcatgaaccggatttgtgtcgcctcacttacaaaccgggttcaatcaaaatttgtaggtggcgggtttgatgatgttgccccttattcaatgtgtcttgttctgttaggacccataatatctcaatgacgattatttttacaaaaaataaattaggctcaatctcaagaggccattttgggaacacggtagtgctggaggttgaagatgaagaacaatggtattttcggatttggggtgaaattgatgatgttttggtgtgatttttggtggaaagtgaagattgatgagtgaaattaagttttgggatgaattgggattgagaaatttttgtggagatgaaaagaattgaagaatgggtagtttgggggtggttttcggctgagaagagggtggaaacgggtgagaatggtttttgtaggtttaggtataatggggtgaaaattggtgttttctatagaaatttgtcagctggtcgcgactagcccatcccagccgcgactagcttgaatttcgaatttcaaaggtctctggaaactgccctagtcgcgaccatggtcgcgaccatgaaaaagggtcgcgacgagcatatgccctggtcgcgactactggagctgaaaaattcctgggtttctgtaattgcccaggtcgcgaccacagaaaagggtcgcgacccaggaacaccatggtcgcgaccactgggttccgaatcctgaaaaaaaaattaatttgttattttttttaaagtttttcacgattcaattggaaaaatataatgtctggtactttaccaaaaatttaaaatactaaaaacactaaaacaaaaattaaaaacaa

SEQ ID NO: 334599 - DNA, 594 bp, Cannabis indica
taaaaaaaaaaatataataattagaaaataatatcattcattagaattttttgatgaaaatttatcaacggttaatagaaggtatgtatttgatatttactctttattcattatatgtatctatattgtttattatttttaattttatatctgtatttttgttatatatctaatatgtatttgttgtaaatttacccttgtttaatactatcaattaattatatttttgtaaactttttttattgagattaattgttaattgttatttagttaattattgtttatgtacatttacttattctaaaaatatcattgcataaatcaaaaaatcaattttaaatgagcattgggcaattggtgactgtgatttttctcaatttgaagttttaaactttgaaaacggaatcagcagcgaatatcaggttttttgtccctttttgaacttccaaattaataattatttattatcttattgctttttgaaatattatattagttgttgttattatttttttttactatctctcctaaaattaaaaaatatgagtttgggtatgaaaagtgtaagaaaaagaaaaaaaattgaggagttaa

SEQ ID NO: 334600 - DNA, 570 bp, Cannabis indica
aatttgtatttttcatgtaataactcttatttttcttttattaattataatttatatataaataaaactaataaatatatcaaatctcaactacacttctgtcaaaaaaaaaaaaaatactcaactagcccttttaataaaataaaataaaattacaccccttcaaatttatttaccactcctaatatttcctcgccaatgttagttaaattgtttaaatctgaagatagaagaccaagtaaatgatacatgtattaattaatttttatagtattgtaagtaaattgtaaaaatcgagtaaagtccaaacttttaattgagattagggagcataatctaaacatttttttttttgatgtgataatcaaaatatttttatatgaagaagtacattataaacttgaaaaattgagagaacaggggcatgcttggcatgcatactaagaaacagttttttgtgttttaaagcaaaaaaaaaaatatttttaaaaacaaggtacatgtgttggccaagtgttttaaatttaattttttaaaaatagttaaaaaaaacaaaaattataaaaacac

SEQ ID NO: 334601 - DNA, 818 bp, Cannabis indica
gttggtaactatattggaattgtttcttgaatcagacccaaggaatttggagagaatatctacggattagagtgaaaattcgtattgatttgcctttaatgtaaagactgcttcatttcagcatgagaattagcagataattagagtttaatttggaatttagacttttaattatgatctataaatttatggtgatatatttgaattctaggtgtgctatctatgttatatataaaatttcatatttttcatattttatgtccagtaaaagtagaacatgacgtttggctaataaagtcactttttttgtatggtttagtaattttagtaatagtggggcaacttagatagacattgggaatgtcaggaatattcgaggtattaagtttgaccaaaatgcccctagctggtaagaatgctttttggcttaggcaagggcaaattagtcttttgccataagattttatttgtccttcaatgatttataattgaattagttaatctgaaattaagttaatgaaatgttagataaacattaggttttatcctttttatttaaaatagaaaattagaaaaaaaaaacaactttctctctctccgttcaactctctctcttgacctctgaggaaacgaatatcaatttaaggtttcttcatctcaattcagggtattctagcaagatcttagtgattcaatccaaggtaaacatcatagctcccttctgtttgttttcttaagttcaaagctaggttatatgcatggagttagggttctataagtttgaattgttgttgttcctattttcagaagtgattttg

SEQ ID NO: 334602 - DNA, 1084 bp, Cannabis indica
tgagggaagcgcaccgtcttggcgtcttcttctgtgaacgtgatgggttgatccatcagccggggcctttgagctgggagttgagtaacttcccaaaccctattgtgttttacggcctccgcgtaccgcttcaattctttgcgggtggttccctcccaatatgggggtcctcctgagatcatggccactctcccattgggtctaggtggcaaatcggggatgtgttgggcatcttcggtgggagcaactggagccagtactcctgctgcaccccccggtgctccctgcggtacaacccctgtcgcctgacccgaattaaggtgaggcagctgattcttgatccactcatagaggtgccccaatcggataaggttttcaatctcatccttgagatttttgcattcattggtgttctgcccaatgtcgttgtggtactcgcatcttttgttgggatccctccgggagctatccttgtacaaaggaggtggtctccagtagtgcgtattttgcctagtggcaaagtacacatgctcttgggagtccgtcagctccgtgtactgggtgtactatggagtgtaccccctattttggtgtttctcctccgtccgggtgctccctttggaggatcctttactcctcgagccttgggaggggcctgccaggtaggcggttggagcggagtacgagggagcttctccatttattcccgagggatttccaaaatgagacgatgtgggggccaaggcctggccctgactgtatttgggagtagcagagaactgtatgccgctcattggtggagccgcggtcgggacagtaaccgagggcggtgctccgcgcatataccctgttatcccagtggggtagtatcctccataggccactatttgggcctcttcaaggttgatgtacttttggacttttttctggaagtcctgaaggcttgcagctccttcctgttgtagttcgttccagaatggagtacctgtgcggatgcctgcctagagaagggaaagttgttgtcagtcatcaactttctttgtctttgaggcttcctcgcggaacctctttatatagtttttca

SEQ ID NO: 334603 - DNA, 695 bp, Cannabis indica
aaaagccccaaccggcaaaccggtttcaaaccggaactccggttcctggcaccaaccggtcgaccggttgcagcaggcccccaggaaccggaattccggttctaagctgggaacccgaaaatccttccccttaattcaaatcaatcccaaatcctcccaaaacttccagaatacctgtaaacaatatactaaaccaaacccaaacaacagaactcaacaattcaaccaaaatcccaaaccaccattagagctccaacctaagctcttgaactctaatttccaaccaaacaccaaaatagccaaccaattcagcttaaaacaacaaagactaccattatctaacctcagattaagaacccaaactaaacacacacacacaactcctaatttaagcctaaatccataaagctcaattcaaaggttaagtaaaattcaaatagaaatgttagggagatttaccttgattcaaagtgttaagaaacttgctagaatctacaaattccagcaaagaacacctcccttcctgctgggtttggtgattcgaaagaaagagagggagagatgaagaatgatattcaatttctaggttagctcacaaggaaaatcccttatttcctttttcccaattaattcactatcaacatagataaactatggctgcttctagtatccactacaagccaaaatgataaaag

SEQ ID NO: 334604 - DNA, 709 bp, Cannabis indica
tgactcagggtgcttcttggtgcaggtaaaaagattaacaattttgttcggctatgggtcagaggtctcccagcaatatacatatcaaccgtgttgtcttggcttctgggcagcagggtcgaccacttttctcttatgtatgaaagtgtaactttattttttttatattaacggttttgcaacttgttataaagaaattttataaacaggggatccctatattttagttgtgttcataaagaaggtttattttaaaattgaatcaaaagttttaattaaaccacaccctttccaaaagtttatagattagtaataataagtttataaaagcacacacgtggcgtccctgatagttagggcgttacactagtggtgaagacggctcgtcaaacggacaccggaggtgaccggaaaatccgttcaaagtttgaatcgcaaaactttgacttgcgatccagagctaatggcagtgaaagaagcggccccgcttgggggcttgaggtcaccggcacctggggattcgaatggtccggggcatggggttggttggtggtcggaggtgggttgccgaagagtggtggtggcgatggtggcttgtgggtttctttttgtgttttgaagagagagaaatgagagattgagtgaggaagaggacaaaatgggtggtataaatcttattttgatttttatatatatgcatatatatata

SEQ ID NO: 334605 - DNA, 858 bp, Cannabis indica
taatcaaagttcaatatctgtccctaccaatgtatactccatacatccgatactggtaaactttgccaatgccctggaaaggacataacacatatccaaggtgtaagtatatctatcgctgattatcatgccagtctaaatccagtgaactgacaaatcagggaattaaactttcgaaaatataatcaagattatattccacagtgttgacaacactataatcataaacaaatacatatgttctggacctaatatgtaaagaccgcatatgattaatgctttgaattattaaataattagggtttatatatgagatttaattaaaatgcatgttgtggaaatataattaagttcatatatatatttattatgctatttatgaaaattgctcaatttctgtgattgtgttcggaagctatggaaagcggcgttgggcatttagagagtcgtattttataatctagtgttatatcggggtgttattgtcgggtattggaggtgttggaatttttgggatttgaaatggcatatttacccttgttagtcatggtaggtttattttaatcaagaggggcatttaggtcttttgctaaaggctttttgtcctttgtgaattttatttttagaattaatattattaatttaggtttgtttttaattgagagagatttaattttagctgaagaaaaaaaaaaacctagaattctctaattgctctctctctctctttcgaaaaccaaagggaaccagctgggtttttagctgtgtttaattcaattctgtgtaatcttgtttgtttagaggatctcaattcaaggtataactctctctctctctctcttgtcttcatgaattttt

SEQ ID NO: 334606 - DNA, 576 bp, Cannabis indica
attataaataaaataacaaataaaaaaaattattcatatttcactccaatcgtcttcttctccgattggaaaaaacccaaacatatctcttaagtctatccttttatacttacttaaaataaaatcatcatctcctcttcattcttgtgtctttctttctttctttttggtataaaatattctgcattctttgataaatctaacaaaataaacaaacccttaaatcaagattcaaatcgcaaacccagaaattatcgaccacctcaagattacgtccattcgtttgggtctgtcggagttgagcggcagagcttcgactttgtgtttgggtctgtcggagttgagcggtagagcttcgactttgcatttggatctgtcgatgtttgccgagatgtggagcttcgagtatggcgttggaatccgtcggagtatgggttcgcctgatggtggaggagcttcaagttcgtcgtttgggatccggagttgagaggcagatctcctcctttacattctattctttattttttttttgttcttgattgaaattgaaatctgaaactgaaatttttttaaact

SEQ ID NO: 334607 - DNA, 1007 bp, Cannabis indica
aaaaacaaaaaaacaaaaacagagaagggatttttaggtggatatttttcagtttatatttgtgcagtagtttgacaataaaatttgagtttttagcggctaaactttctcaactatcgtttaacttacacttgacctttcaagctcaaattttggtagtaaaaccttccaaactattgaactgttagcaagttattatcttaagattttaacttgtgatttgctggtattatctcaagagcgaatacaattaaaagaggagtaagtcatttcctgttcatcaagggggccgaactttcataaatttgtgtgctatttttactatttattattcttctatacacgtgatcataatcaacaattaataaggctccactgttagttggttaaatttaaagttgacaataattgttgacctaaaatttggtcaattgacagcggagctttctttgttatcaataattaccacgtgtaaattataatagcaaataataaaagtaacacaataatttatagaggttcgactcccttatttagccggtaatgacctactcccctttttgttgtatttattctggagataatattacgcagattacagacttaaaccttgtaatttctagctatgactctcttgaatagtacattagtgagaactgagtattacatatttagaacaagtgagatttaatgaggaacataggctaaatgtctaatgaaaaaagtgaggaggcgtgagagagagaagctcaaggcgtagggcttaaataacttagttctcgtttggtacgtcatataagggtcgtattgtattaaataataaataacactatgtttggataaaacaatgtattgtattaattattacgaccaaattttttaatacaatgtatgttgtattatttaatacataataaatggtacgtattagcttgtattataatatttacaaaagatttggggtcaacaccagtctccgactcggacctgagacccgggaactggga

SEQ ID NO: 334608 - DNA, 892 bp, Cannabis indica
ataaacttagaacaaccggttacaaaaaaatattaaaaaaaaataaagtacgtaagacccaccatacagtacaacggaatacaatccgtaattttacaagatgggcacaaaatcggttgcctaaatatataatgtatattctaatactattataaatttccatattatattcaagcaataaatacaataaaatattaataattattaactcaaatccaaccttattaacttggtaaaatgggaccacctccgatttattatgaagtttgattgacttgacatgaatgtttgtcatagaagacactttgatttaagactaaccaattaattaatgcttcttaaaacacactacattttcccctttcaaataactaaaaaacattacatttcttagtatggtgggacaacattggcaataatctactatcaaggactctatatacccctttttcttttttgggttggaatttaaagcaagaaagccattaattccattttgagttttgggcaaagtgtatttatcaataaaagaatatttattacaggagatcttatttgttatagaatacataatattcttagggcaaacatatttattcgtgcaagaatttagaaagttaggtgatgtttcacattcatcaatttccttgaaagaaaaaacattaacaacataaactttctttttcaaaaattaaaaaaaatacccttattttagttgtaaggttattcatccaattaaatatatactatttaatttagtgtacattcaatccgaatttcatattttggtatccaattaaatttcatataataacttaaatttaaatctaatctaatttgtaaaaaatacaaatttaattagttattttaaaattgaattatttttttaata

SEQ ID NO: 334609 - DNA, 527 bp, Cannabis indica
tccctcccaataacatcttcttttcgcacatagaaatcagcatctctcacccttctagcagttagagtagtttcttgacgtccttgctccaaaaagaagcttttatcattggaaatggaagccaattttttcttgatgccttgtattctacgactcatcttgaaacgaaaagcaagctggttggagctggaaaagaaggtgcacacctgtggtggagttgtataaatttatttcattttcttagaaataatttaaattgaattcttcttatgttagttaaatgacttattttcatattatgacataaactcattcagaccaaatcccaaacacagatctggacccgaacttagactgccagaccccgaacccatcccaggacctgttaggctaaaattagtctaagtttcgggtcatatttgcggttagttttcactctttgtttctagttttagggctatattacgcttgattcttttgtttcaggtcctcgggcatttaaagaaagtatgtacaagaattgagga

SEQ ID NO: 334610 - DNA, 480 bp, Cannabis indica
ggttcttcgattgggttctgtcctagtctgagtcccatatctgacaccgactactgatctgttctggtctgttccaggccttgttaccgaaatcccgagtcaagatctggatcactgtcacgggtctcgatctggttttggttcaggtcctaggtcccatttctgagtttgagtttgggatcgagactgggctgcggttctagctcccgaccctggttctgtgacgctagtcttgttccatgtttgggtctgacttcaggtttgcaacctgagtccatgttttaattgggatctaggttttcctcctaattcgggtctaggtctaatttagagtccgggtgctggtccggttacggttctggatctaggtcaaattttagttaggagtccaagtccaagtcctaattccagtccgaatcaacttccggtttcggttccaattttgggtcagagggtacgggttcgggtccacttttgggt

SEQ ID NO: 334611 - DNA, 1735 bp, Cannabis indica
cttgtgttgtataatttgccgccttggtcggtaataaagaggaagttcactatgcttacattgttgatatcaggccctccacaacctggtaataactgctagagtattagctgtatattaggtgtaaaagaattagagtaacttgtatttagtagtttcctattttttagtctcctagctttgtatataaatatgtactattctatgaaatacacacataattcgattcactattttctacatggtatcagagcattatgattcaaaatttgaaatttgaaattagggttcttaaaaaaaaagaaaaaaaaattagggtttgagtttagggttgttttttgaaaaccctatttggagtgaaatttttttctcaccacccacataggaggactgcccagctgccggactgcaaaaccccaaactccagcgtccagattcaccgcgtgtgggccccacgcgccgccgtttgccgctgcccagaatcccacgcgccggcgcgtgagggcgcgtccggcatcatctccggtgacggtcgacgcccgtcacactcctgcccctttctcgtcctccttgcatcggttttcggcggttcttggcattttgtggtttgatacttttgcctctttgtgtttgggtatctattcttttgagtttgctctcttctttttctctgtcatttgtttttgcttttgagattatggcagagataagatcagattcaaaatcagttgttgtttctgatgttgttcccgtgatgtctaaaatcacggaccataagttgattggttcgaattatttggaatggagtaagacgattcgactgtatttgaggagtattgacaaagatgatcacttgactgacgatcctcctgaagaaacaaacgattcaaggaaaatatggctccgtgaggatgctcgcttgttccttcaaattcgaaattctatcgataatgaggtaattagtttgattaatcattgtgaattggttaaagaactaatgggttacttggagtttttgtattctggcaaagacaacatatctcgcatatatgatgtttgcaaagctttttatcgcgcggagaaacaagataagtctcttatgaattattttatggctttcaagaaaacatatgaagaacttaatgtgctattaccctttagtcctgatgtaaaagttcaacagcgccaacgagaacagatggctattatgagttttcttgcaggactctcatctgaatttgactctgcaaagtcacaagttctctctggttctgatgtctcctctttacaagatgtgtttactcgtgttcttcgcacagagactacctcttcaactcctcttaatagcgccttggtgagtcgtaataattctgcaccggaaagaaactctactccaagtggatttaaaggaggtaattcacaaggacctgataaccgcacaccaaattctgggagcatcatgtgcaattattgtaagaaaccaggccacaccaagtttgagtgtaggaagttacaatttaagaatcgacaacaacactctgccaatattgcaagcactagtgatgcatctgacaaatcggtccttatttctgctgatgaatttgccaagttctcaaggtatcaggaaacacttaagtcttcatcttcttctgtcactgcgattgctgattcaggtaactctaatgcatgccttctttccaaatcctcaaaatgggtcattgattctggtgccaca

SEQ ID NO: 334612 - DNA, 771 bp, Cannabis indica
ttttattttttaatttttttggtttcttaagaattaaattattttttgggtttgttgtgtttacctctgttattttgttgggacagttttctgtacgtcttgttcttcaattctgattccttttcaaaaaactcttcgccggatttaatggttttttcttggtgatttccgtctccggcgtctcctcacacacgaacaaggttgtttcccgtgtgttttactgttcacagtagaaatgaaatgatgttgggcttgggcagtacaaaagtaatgaaattgggctggggcagtataaatgttgtttttgccgtgtcccagtataaatgtaaagttttggtccaaaagcagtatttttgtaaaattcccaaatctaattacataaaataactaaataaaaaatttgatcacttaaaataactaaattaattacggttacttgaaacaactaaataaaaaactaattgaacaactaaaataaaataaacctatattatatataaaaaaataagaaattagactctatactctaggggtgttcataaaatagccgatccaatccaatccgtacgatccaatccgcaaagtgcgaatatctgcacttgtgcggattgaattagattagaaaattcaaaatccgtatttgtgcggattggatgttgattgacatgcaaaagtaaccgatccaatccaatgcaatccacacatatttataaaaaaaattaaaaaattaatatatacaataacatttaatgtaaagaaaatagtaattta

SEQ ID NO: 334613 - DNA, 589 bp, Cannabis indica
aggattgagcggggttatagaatgtgaccattttacccctagcttttaaaataccctagttttatgagtaagggcattttggtcatttggttaaatagtgtattaggtggctgcccaactttgtgacaccttgcaactattttctcagccaaggttaagtgaattatcctttaaccatttagaaaaaaaaaaaaagagaaacattaaggaaaaataccaaaattggagaagctgtctcctttctctctttctcttcgaaaccagcaagaagaagggggatagctgctgatttgtggagatttcagcaaggaaatcttgggagaatcaagctaaggtaagccctagtagaaccctcctttagtttttaagtttttgcttggcttgagtttatgattttgaattatagtggctgttaggtttaggtaggtttagggttcgaattttagggttcttttgagttgattttaactcctagcagctggttttagtgtgtgttgttggttttgtgcaagcttgagttttaaactcaaagctttgatcattaatggcaagttgagtttctttgagtttttttgtgaaatactggctg

SEQ ID NO: 334614 - DNA, 510 bp, Cannabis indica
gttgccttttgtagccctgaggactatctagcaaaataaaatggaacgtttaataaataataataaataaggggtgttatttatttattttcttctaaaaacattatgcctacattattaacagcatctgcatctccaacatatattataatagagtacctagtaaatatctcgcgcttcgcggggtgaatatataaaatattttaaattatatataaaacataaattgtgtattttaattaataataattacttagtaaaattattgtaacaccctaattagaataggtgtgttgacgtgattttaaacgtactgtgcagctcgttgttaatcaacgaggttaatgaaaatcatgattaattaaaattttgctatttaattaaaacttataatattacatacaaaatatttcgggatcccgtttagaaaatactttacaaaagtttgctattcaatacaaaatatttgtcgcctatcgactaactacaaaagcactgttgtcccgagga

SEQ ID NO: 334615 - DNA, 1570 bp, Cannabis indica
ttcttcttcaaaaaaaaaaaggaagaaattaattcttagagaaaaaaaatgatgttggattcgaaattagaaattcttagtattttaaaattttctttgggtaaattttgaaaaaaaaaatggataattgcgggtatttgtttggtatattttgcttatggtataatagagcctaaataactttttatccaccttttacctaagtcatatcattacaacttagaatgaccttttgattccgagcattggttattgacattagtggagacaggtaggttatgcaagcatattgaatattggactgtgaaaagttagtaagagtagaatgtttgtgatattttccaaatattgacatgttattagcatctatacattgtttttcaaagaaggcattcgagttaattattagagtttttggattgaaattctagttaaacatattggttgaagtttcacaggtggcagcagtagtttaattatgtggaggctttattatctgtttgtttctttgtttgtctgtttgctttttttttagtttttagtcttactcgaggttgagtaagaatctagtttggggaatttgttaggctatttttagcctacgttttgagttactttttatagttgttttccatctttgttgttctttttgaaatagaattacgcttgttttattttgtttcaggtttcacacttggaatatgtcaattgatcaaatttggaaagcaacaatctatagaatagagaaaattttgcaagaaaataaagctgaaactttaagccttaatttgactatgttcttgtcatattttggaaaaagtcaaaacatagaagttttatatttatttttgttctttccaacacatcttgaatcaacccatttggagttggtatgtgaaagttatgcatattttattgaaagatgctgaagctgtcattttgcttcagtagtcgcgaccacaatttttcatggtcccgaccctttttcatggttgcgactatagttgcgactatggagtaggcagagagcttgatttttgtgttttgcctatggtcgcgactaggctttatgtagtcgcgactatgaacaaaacacgagaatttttggtggtttttgactttcaccattcaaaggtagcaaccctaatttctatttaaggggctcgtgttttagaacgaaaggaggcagaaattggacccaaaagtgaaagaaggagacagaggaagtaattgtggcgatctggagcacaatcaccaactagttctttcttaaactcttgatttctatgttaatttctgttttaaatttgattatggatgttattatggattttatgaactaaaatcctatttgggaagatgatgatgttgattgattttatggcatgagttaatgttaattgttatttcttctttcttgattgtgtatttattcatgtttgtgcttaattctatttttgagattgatcacgttaggcatgctttatgatcttaatacaaaatctaaaaagttagcattgagaatgctaaaattgaataaactaggttttgttgtgaaacgaaagtattt

SEQ ID NO: 334616 - DNA, 920 bp, Cannabis indica
aatcaagttttaggcgaataccaggcaattggtttaaaaatggcaaaatacttagagaaggtttggaagaacttcaaaaagtttgattattttaaaatcgaacaaattccaagagaacaaaactctaatgtcgatgccttggcaaaactggccttgcaaaatgaacttgatagcttgaatttggtaccagtggaagtgttaagcaaaccaagtatatgtgaaaagcaagaagttgagatgattgacagctcgcctacatggatgacacccatagttaattatcttctcaacggacaacttccaacagacaaaaacgaggcacgaaaacttttgtattcagtgtcttgctacacgatagtagaaggcaatttatatcgaatgggttattcaatgcctctcctatggtgtgttctccccacagaatcaagagagataatcaaagaaatctacaaaggcttttgtggagaccatgcaggttggcaaagcttgtcaaacaaaataattcgacaaggatattactggccaactatagatcaagacacacacgaatttgtcaaaaagtgcaataagtgtcaaatatttttacatatacctcgcgtaccaccaacataactaagaatgatgacctcaccatacccatttgcaatatgggggattgattcgactggggcactcctcacagggcgaggaggagcaaagtacgtagtggtagctgtcaactccttttcaaagtggatagaggttgaacctctagtttccataacttgcaagaaagttctcaattttgtcgtcaagaacataatttgcagattcagaatgcccattaagatagtatttgataatggaactcagtttgatggtgagttattcactgagttttgcgagaggaacaagatcattaagagcttctcatcagtctc

SEQ ID NO: 334617 - DNA, 612 bp, Cannabis indica
agtgacacccctgctgtcactaatttttcaggtaaaaatcatgattttccttacaatttttggattatagatagcggagcaactcaccatgtttgttatgatagccgatgctttcattcatttcaaacacacaagcacaatcactttgtcactttacctgatggcacacctattaaaattgctaaaataggtactgttattatcaataaacacataactcttaccaatgttctctatgtgccacagtttcgatttaatttgctctctgttaatgctctcttaaaaacctgctccaataccatgatttttaccactaacaattgtttaattcaggggcattctccgacattgaggattgggattgctaataatatcaacaacctctattacatacagcaggaaacaagttctacaaacaaagtttttactttctgcaatgtttcatgtaataaaaaccaatggcattctcgccttgggcacccttctgtattgattaccaataagatcaataaaatgttcaatttacctattcatcattctcatcattttcattgtcaaacttgccactttgcaaaacaaaaaaagcttccatttatttctcaaaataatatg

SEQ ID NO: 334618 - DNA, 654 bp, Cannabis indica
gactctttgtcgttggctaaaagagatgtcaacatccctaaaaaacaaatttgtaacattagaagcatcatcaattttatgacagtggataaaatgagccatcttagaaaaatagtctaccaccacaaagattgaatcctgcccatgcttacttctagtaaaacccaacaaaaaatccattgaaataataacccatggtgaactaggaataggtatgggtgtgtaaaaaccatttggctgaactctaaattttgcttgcctataagtaacacatctaccacaaattcgctcaacatctcttttcatgtggggccgaaagaagtgttcttgtaacgcaactagggtcttagcaactccaaaatgtcccatcaaccctcctctatgggattccttaactaacagatcttgtaaagaacaattaggcacactcaacctatgctccctaaacaagaaaccctcatgcctataaaacttgccctcagcagatttttcacaagcaccataaatctccccaaaatcatggtcaacgggataaagttccttaatgtgttcaaaaccaagtaacttagcatcaagagtagagattaaggcatacctacatgaaaggacatcagcaaccacattctctttaccttgtttatatcgaatgacata

SEQ ID NO: 334619 - DNA, 858 bp, Cannabis indica
gtccgagagtgctgcacagggtttttagagatgtttatggcgcttgtactgtcacaaaagatggtcagtgtgtgttgaggatacccataatcagtaagcattttattcagccatatcaattgagtgcagcagctgccagctgcaatatattctgcttctgcagtggaaagggagatggactgctgttttttgctataccacgagactaggttattcccaatgtaaaagcaaccccctgaagtgcttttcctatcatctatacaccctgcccaatcagagtcactatatcctaccaaagaggtattcgtgtcacaactataccaaagaccatagttaactgtcccagctagatatttgaaaattcttttgactgcagagagatgagactgtttaggattggcttgatacctggcacataaacctacactaaaggatatatcaggacgactcgctgtgagatacagtaagccacctatcatacttctgtatagagtggggtctacagggtcaccagactcatctcgtgacaatttggatgtggtgcctattggtgtgtgtgcatgcttgacctgagagaatccaaacttatctaacatagacttgacatatttagactgtgaaatgaatgtgccatgatctagttgttttatttggagtcctagaaagaaagtaaggtcacctattaaactcatttcaaactcattagtcattaaagtgacaaatgtttggacttcactatcacaagttgagccaaaaatgatgtcatcaacatatatttgggcaacaaaaattcctttgtcaatatgtttaatgaatagagtgctatctgcagtacctcgagtgaagccatgagagatg

SEQ ID NO: 334620 - DNA, 634 bp, Cannabis indica
gctaaacctagaaaccataaaaatcataagatttataataatgatgaaacatatctatggaatttatgacttggtcatataggatatgatagacttcacaggttaaccgaaggtggtccattgaaaatgtcaccttgggtgaattaccagtttgtgaatcttgcctaaaaggtaaaatgactaagcattctttttctacaaagggagagtgtgccaaagaacctctagggttagtgcattcagatgtctgtggacctctaaatgtaaaggccagaggaggttatgagtactttgtcactttcattgacgattactctagataaagtttccttttacctaatgcaaaagaaatctaaaacgtttgagaagtttcgggaatttcatgctttggctcaaaaccaattagctaaaacattaaagatcttgcaaactgatgggggtggatagtatatggatattaagttcaaatatcatttaattgaacttggaattgaatcgcaatatagagcccctgacactccatagaataatggagtagcagagagaaaaaatcgcacacttttggaaatcgttaggtctatgctgagctattcaactctgtcaatgtccttttggggatatgctattcagatgg

SEQ ID NO: 334621 - DNA, 609 bp, Cannabis indica
gttaaaattctgcatagtccatgcgtcaatcttatttacatttttgattgttttctcaggtcctcttttgtatgaatttatccgtcccttttttgatctttcttgccactatatataatcacatagtgggcagttaattacaaagttgagtgtaatctttttacaacgatcatcccctaaaatcatggggtttgattacatatcatgtagtgtaaatgcggttatgatttgaaaatcatatagctgtgattttcccgattttaccgggtcaaaataatcgtgtacttaaacacgtctttaatcgttatatctagggatgtctcgatagaagcttggttccagtgatcataatagcgacctggggctatttttccttctaaggtcgatgatgcacgtcttgtgatgatcgttgttcttatttacaaagagatcttcgaagcttgtttgaatgttaactcatgactcgtcaggattgtaagcctcactgaagttaactaggtgaagttacaggaagccttaccatagcgagataggcacctcacttactaggtcttgagccaacccaactgttacacttagtttgtacattatacactaagggcttttgca

SEQ ID NO: 334622 - DNA, 1369 bp, Cannabis indica
ttttctttctgtttaatataaaagtttaaattctgcgctattttgattagtaatttcggttaggggattagggtttcataagtattttgggtagcgtgcctaattatttagggcgttacacccagggttgaggagctttcaaccaatccaaaccaggggaaccccgtgacctgccatggtcgatcctaacaagtgatcccagagggtacaaatcttgtgagagatctcaaagatcctccccgggctggtgaagaattccagaggaagattggcatggtttgaggtgggaaggaagttggcgtggtttgcatcagagaatccagccaactcaagaccctaaactgtgccaggagatctttgcgtcaacctctttgcagtgtcaagaaatttcctgaagctgggaagtagatctcggcttcaggaaatggaatcttccgatgatgaggggaatgaggcatgtgtagagatcaaggctctctacgtgtagtcggtctttctcaagctatgtgtagtcagtcttttttcgagctacgcgtagacggtctattccaagctatatgaagacggtctttctcgagttcatcaacttcccctctcatcctttgcttaggagaatgacttaatggtttggccctagtggcatttttgtaaagacaagtttgtaaccagtcttaggtttttcttatcttaaatgcattgtactgtttttattcgaacttaatacaattgtatttgcttgcgttaatattcacaatgtaaacaactatattttgatcgaatatcgagcacttttgggtatctcctttacttgtaatcctcttgtttaagtagttaataatttacaaaactttatgattttcgagcggttgtcaatactgcctcgcaattgcagttataatctgccttgagcaaacttaaatatactttaaggattttatcactttgtatactttaattttctcccatgaataattatattatctatctattttctaggttcaagtactttacataggcgtcgtgatacctcatttcgtactttcctagctcgcgagaaccgtaaacattcagttttgtacgcgagttataatttttgattttccactcccgtcagatagattataaataaaaaataatagttgtttgtgttggaaatattttaccaggatctagatttacttgttggaatttattttgccaggatcttagatctactcacaagtatgttggtttaacaacctaaatatgaacttctaaaacgataaattaaacatataaaaagttaagagaccttacagtgggtgcagcggaataatgtgtctccttccactcatgtaatatcccagaaaataaataatatttaaatgga

SEQ ID NO: 334623 - DNA, 1540 bp, Cannabis indica
tggtatacacatgtagacctcttcattgaggtctccattaaggaaggcattgtttatatcgatttgtaaaatatgccaatttttgatagtagagacagctaaaagcaatttaagggtaaccattttagcgacaggagaaaaagtataaaagaaatctagcccttcttgttgcgtgtacccttgagcaacaagccgagcttttaacctttcaacgctgccatcgctattatacttaatcttgtatacccatcgacatcctatggctcttttatttggtggtaatggaactatagtccatgttttgttgtcggtgagagccttaagttcacattgcatagcttttagccaacccacaatttgaatagcttcaaagtatgatcttggctctttgacagaagacactgcaaggataaaatctttgtatgtgttagacaaattcgaatatgatagaaatttattgataggatgtggtgttgaagaagtgtcctgaatgagtgaataacactcaaaatctcttaggtgagatggtggccttgtttgtctttgagatcttctaggtgcctcttgtgaagagccttgtgttgctgtattattttgagcagcagtgtcccgagtttctgcagcagcagtggtctgattgtgagcagcagtatctcgggtttctgcaacagtagttgttgtgggatttggttgttcttccaaattctgttcatacagattgtgcacatgtgggatagctggtgaatgtttggtagaatctgtaggatactcacacatagaggtgtcattaattgtagaatgtggcagaacaatttgtgtaaaaggatcaatattgctgtcattagtgttaagtttatgaaaaggaaaaatattttcatgaaacacaacatttcttaaaataaaaaattgattggtatttaaatcaaaaagcttatacactttgacaccttgagagtatcctgtaaaaacacatactcgggctctaggagaaaatttagtcctatgagccattaaagtagaagcaaaagcaagacaaccaaaggatcgaagatgatgataatctggttcttttccaaataaaatttcatatggagttttattttccaataggggtgttggtgttctatttatcaaatatgctgaagtaaggatgcattcggaccaaaatttagttggcatcttggcttgaaagaacaaagctcgggcaacatttaataaatgctgatgttttctctcagcgatggcattttgttcgggagtttcaacacatgtgaaatcatgcaagatgccatgcttagagaaaagatctttgaaaaataactccggggcattgtcagatctgaaagttttaaaaacaacattaaactgagttttaacatatgataaaaattgaggaatgataaaagatacatcagatttatgttgcattaaaaaaatccaagtaaatctagatttatcatcaaccaaagtaagaaaatatttgaaattagagtgagatgtaatgtgatatggtccccaaatgtcacaatgaattagatca

SEQ ID NO: 334624 - DNA, 558 bp, Cannabis indica
accctctccctctcttactatcttgagtttgcaacttggaaattgaggaaaaagcttgggattttgggcttgaaacttggatttttcttgatttggcttggatttggaagtgaggtagagttcttactgatttttaattgtatttgcttgctgaatattgttgtagaacatgtttaggtttgttgattttggttatgcatgggttaggttgttcttgctacatgttgggtgaattggtgctatcttggaatggatttgagtttaacttgttgtatgtttgttattgaatttgggctgagattatatggtgattctaggatggaatttcaggtgtgaacttagtgtttaattgctggaatttgtttgggtaggctgaaattaagctcaagcttgaaagcttgaatgttgtggatttgagcatgatttttaggtcaagtttggagcttgaaagttgtatatggttaaatctgattttggttgtggatttatgcatgaattttgtgtttttatcctctgttttggttgaggttcgaagttatggaaaattaacatgtttaa

SEQ ID NO: 334625 - DNA, 696 bp, Cannabis indica
tccaaagaagtgaccgacctccaagaagtaacggaggttcttcgaactatattccgcaggttggaagcagagaagaagtccaaggaggaggagcttaacactgaagtagagaggctcaaagggaaggtgaatgccttagagatagctagtctcgagattttctatgacttttggaaggctaaccctcatgcgaatttctattacttgggcgatgccaaagacatgtatctcgagtactatgcttcccaggtggcctatggagagtccgaggaaaccacttctacttccggtctgagccttgacatgccccctgcccagacaacagatcctcgagctcctaccggcccagaagacccatacaaggagcctgggactccagccgtcttaacacttctcttcgtcgttatgcggaaatctaattttgacagcatcttcgtcgttgaatgttatggcgggctctcctgcccgtgggattttaggcttcctctcttttatggcaaggattacttcttcttgctcgtgctatactgttcgggcatacctctcccgagctttgcttgaatctccagctatgtgcagacctcctataatgacttgtagatgcccatctactagtggaggcagcaagtctttgttgttatcacccgtctaattccgatcggccttgacatacttctatacgtgcgggttattttt

SEQ ID NO: 334626 - DNA, 491 bp, Cannabis indica
ccccctgcgctcctccagcaaggcatcaagcctcttcttcttctcccagaagcgaacaaggacttcctcaggcttgggataaaagtcgagcttgaggttttggccattagtctaccatgccatgaaaacgttgtcatcaaagtgcttagtgcaatgcttgcagatgacaggggctaggagctcatctcttttagccttcttcagggcctgatttttaaaatccctgagctccttcacctcaacagtcaaattggttgtcgactgcaagtccgcctaatgcagctcctccatagacttcagcctgacatcagatccttgacctcttccttggcctccctcagctcgcgcctcgccttggccacgacctcatctcgggtcttcagctcatctgccttggcctgtaacacctcctgatgcctcctctctgcttgtgcctccctctattgggcttcctcccaaaacactttcctttaagccgctaggtctctcag

SEQ ID NO: 334627 - DNA, 552 bp, Cannabis indica
ccggcactttgcctcagcaagggcctccctttgttgagcctcctcctggaacgcccgccttttggcagacaagtcccataggatcctcacggcctcgtttatgcccccgaattcgcacatgacgaacccatgatcgatcagggtcttagaaatgcggccggtctcggcagtaatctgaaaaaaaaaaaggaacaagaatgagctcagatgccttagacaaaatatcaaaggagggaataaattacaaatactcaccgcggccaaggcagagctgatgtcttggacctggtaaacggatttcaaggaggcacaagctgcatatatcttggccggaaactgagtcaggtgggagacaaactggctggtcatctccgaggcgaagggagctagggtgggcccgacaaagcggttgaatcaatccgtcaaagggtccatgttcaggtcctaaggatttcggaaggcgtcctcgtgcaaagtgttctgctgctcctcccgcagaatcttctttaaggcctccacctcagcgtgcccccgactgtactcgtccagggc

SEQ ID NO: 334628 - DNA, 1641 bp, Cannabis indica
gatatgaccataaaacttcaggaagttcatgcggccaatttcctttggcatcttcgagtcttttctttagtgtacccttcaaggtcttgttgactgcttcaacttgaccattcgcttaaggatgtgccactgcggagaagcttttgatgatgtcatggttcgcataaaaatcaatgaaggattggctgtcaaactgcttgccattgtccgaaactattttgtacggcaatccgaaacgacagattatgttcttcccaataaagtcttgaactttctttgatgtaataatttcgagtggttcggcctcagtccacttagtgaagtaatcaaccgctaccactgcatactgcactcctcctttgcctttgggtaatcgtctaatcaggtcaattccccaaatggaaaagggccatggacttggatctgagttaactcgttgggcggagctcaaggtatctttgaaaatctctggcatttgtcacatttcttaacataggcctttgaatcttcaatcatcgttggccagaaataaccttgccttagaattttctttgataaactctacccagcagtatgatttccacagaatcagtcgtccagcttcttcttgaggaacacatctgagcaacgacatagagaatcctcttttgtacataattccctctactatgatattatgtgcagccttccttcttatctttcgagcttcattctcattatctgagagttccctagtgttgaggtaggcggctatcggtgtcatccagtttggggaagtatcaatcatttcgatcgcttccgtgccagtgatgctaggctcttcgaggaacttgataggagccaagttcgccttatcacttacattactgcttgccaatcgagccaacgcgtctgcagttgtgttttcttcccttggaatttgtctaagccgtagcttttgaattatgcgagcaagtcatgtattttgctcagatatgctatcatcttttctccctgatcctcgtattctccgaatatatgatttaccacaagctgtgaatcactgcagatttcaatgtgttcgactctcatctcgcgggctaactttaggccagcgattagagcttcatactcgacttcgttagtagatgccttaaatccaaacttttttgcagcgtgtaggtgttaccccaggtgtgacaagggcaattcctgcaccagataactaatgtgtagccgacccgtccacgtgtagtttccaagtcgggttgtcttcattgttactttgctgaggtatttgtaccggctcggggttgctttctggtatgctttcttctctgcctgtgcattctccaacaaagtctgcaaaggcttggcctttgattactgttcggggttggaatgaaatttcgtactgatccaactccactgcccacttgagaagccgtccagagccgtccggcttttgcaatatttggtgtaatggctggtcagtgtacactggaacaggatgagcttgaaaatagggccgtaactttcttgttgctagaataaggtagtaagccagtttctctatcaatggataccggccttcggcctcaatgagtcttttattgatgcaatagaccgggtgttgtatgctgttttcttctctgatcagca

SEQ ID NO: 334629 - DNA, 1229 bp, Cannabis indica
tcgtagaggcctgtctgacctagaaaattcacagacgctggatctgtcattgcaggacctacggaattcaagggttccacctgctgtcaatcctggacagacgggaagtgtggtgaatggtgaaacagctcctgttactgaaactgggcctggtgtgcaggagactgggaataacagtttcgcacacagccagggcatttataacacgattgttctgcctggaaccaatgcccagacgaccatcggagatgcaacagaattgcaaaatctccgtgctgcgctcagactcatgcagagtcatagcaacactctgcatcatgatcaggatgaactgcgtgctacagtgaatctcgcatttcacgaacagaggcgtatgttcgctgaatggagagacaaagagatgatggcgttaagggatcaccatgtagagatcgaagatcgtagtcggcaagctaccgtgctgatatgaagagcctaccagactgtaggtcagcaaacgccgaacgtcattcccctgggagaaacggaggatgacccgacaatgaatacctcccaaacaaccaatggtcagccgtccaatccccggttacgagttccactcttgggcctagaggtaggcgggtagaccttgtccgggaattcatcaggaggagccatacctgaccgatccaactagaataatggtattattccacctgtcaaccaagcaaatcaatcgctaaggcagccaagctcttctgtgttaaataggttgggaacaacccatgacctaagaaacgatctaaacagaagaaggggaacagacgagcagaatactacaacgatcgtgcagcccggagcccatactcaaatccccgctcagaaagacgctgacgtaatccaaatcgaccaaaatgccgagcaagtcagcccagccgtacaggcccagcttgacgagttgaagaatatgtttcatggcatggccagacagcgtaataatgatcttgagttagaccgtgctcgcggaactcccttctcaccagagatcaatctcctgccactgcctcacaagttcaaaatgccaacgtggaagatgtatactgggagagaagatcctctttcccatctcaagtattttgagatgcaaatggatttacaaggagtacgaggggacgtatgctgcagaatcttccccgccactctgtcggaagccgcacagcaatggtatttcaagttggctcctggaaagt

SEQ ID NO: 334630 - DNA, 949 bp, Cannabis indica
cgggcagtccaccaccataaatgtgtagtatttgaaagtgctttggggtgtgtccgggcacaaggtgactgggagcctcacttttcccattgggataagtgttgttccattaaaccccgtgagctgggaatcgctcggtgaaatatgtcggtccgttaggcctattgtagtgaaggcctctttgaataataaatgcacagttctcccgttgtcaatcaagactctggccatgatcttattggtaatggagtctctatgaccaaggggtcatggtgaggaaaacgcactgtcttagcgttttcttctgtgaatgtaatgggctagtccattagccggggcctttgagctgggagttgagtaacctcccaaatctcatcgtgtttcacggcccctgcgtatcgtttgagctccttacgggtagttcctccgatgtgaggtcctcccgaaatcatggccactctcccgttgggtcttggtggtaggccaggaatatgctgggcatctccggggggagcaactggggccaatgctcctgctacaccccttggtgctcgttcaaaggcctcctggggcgaaatatggaggtatacgtggacgacatgctggtcaagtcaaaggcgtgcactagccacgcgaatgacctagaagaatgcttcgaagtagtctagagatacggaatgaaactcaacccaaagaagtgcacttttggggttaagtcaggaaattttctgggcttcatcgttagtcagtggggaattgaggcaaatccggaaaaaatccaagccctcctgagcatgccttcccccaagaagcacaaagatgtccagagcttaaccggaaaggttgccgccctgagccgttttatctcccagtccacagacaaatgcattcccttcttcaacatcttgaagaaattacaaaaattggaatggtccgacgagtgcgagga

SEQ ID NO: 334631 - DNA, 975 bp, Cannabis indica
aattccaacagccgcctccctttccatctcagcgttttgttgtttgcctcagccagatgttgccagagttgattattttccaactcgaccaaaggtatatatctagtggggtcataggcaccctcactcataggcgtagaaccgccgacatttgtgttgtgttcttcattccaagtttttgggttttgatcatcatcatgttggcttcttcttgaatgtgttgttcatgaattgggtggcctccgtgagcccattggatctcttccaggacgacaagtagtctcttcaagatgagtgttgtaattttccccattattagcgatggggaagaaattccttcttttgttaggagggatttttctgagcttttgtcacgtaggctctcaatgtaagcaccaaactgttaacgcatatttttcattaacgattatgagcttattttcgtaatagatttggcacagaaattataagagatctaagaaaaatgatagaaataaaaataacaccgggtttttacgtggttttgcagctaactttgcatagtccacgagtctatcttatttagatatttttgaatacagaagtcgggtttttgacaaacagtatgctccattttctctcaaagatttttttgtccccttttttgtataatctgtcgttatttatagtaatataggttagcagttaattacattaaaatttgaataccataacaatattccccgaaattgtgggctttaattacgctccacttaaatacgtgcggttaatattaggaaatcacacagctataattcaaactgtttgtaaggagatcaacgctgatgtaaattaggacacgctaccaaatgtacctcgctgaggcatctcgcctagtacataagtgaatgacttaagttgcttgtattccaacagtggcatgagttccagtgtactgagcaaacttaagaactgctctttgaccataaggccttg

SEQ ID NO: 334632 - DNA, 701 bp, Cannabis indica
ttttggatcagatcggatccatccaatattttaggtccaatatgtattggattagactggatccatccaatctaagaaaaaaagagtaaaattttaatgttaatttttatgtatacatatatattttacgtataacattataaaatctaattactcatccaaactaaataaaaatactaattagtttaattggatgttggatgtattggatttttagacactccatccaacatccgatccgatccaattggatattcaaaaataacatccaatccgatccgatcacaattgaatatccaatgtttggcggtcggttgtgattggatcggtcggttgtcattggattggatcgatttatgcacacccctagtatttatctattcaattaaaacaaatataatactaataataaaattaaagaataataataacttaatttatgttaatctacttaaccaaaacttggcaaatttatcattttgcccccaacacaccgttacactaaaataatctctaggggtaaattagtcattgataaataactcacttaattctaaaatccccaatatcaaaaataacctcccgataccacaataatacccattaatactgttgtgacatctctagccagtcaaccgagttttcactgttgtcggacctaaaatattttatttcaaaatgtattttacccacatagtaca

SEQ ID NO: 334633 - DNA, 1800 bp, Cannabis indica
agcagattcgtttcaaaatcaatagacaaatatgtttcgttcttcaacatcctctgaggtaataaaaagttcaaatggacgaaggaatgcgagagcactttccaagaattaagaagataacttgcaaaacctctcgtactctcaaaacccctagacagagaagaattgtgaatatacctggctaatgactcgttgaagctgaaggtaattatcctgataagagaagaaaataacgtccaaaatccagtctactatatcagcaaatgactcgttgaagctgaaggtcattatcctctgatagaaaaactcactaattgcctaatcttagccacatggaagttgagaccctatttccaagctcaccctgtttaggtatacaccaaccaacctttgggcaaagtattgcaaaagtcagatgcctctgggcgattattcaagcgggtgatagagttgggaaagtatgagataatcttccaacctcgtacaatagttaaagggcaggccttggaactttgtagttgagtgcacagggaaagaagagagcaacagaagggacaacccgaagcctgtgtaagaatccctaccaaaatgaagatagacctacctagaaattacatgtggaaagatcagctacagaccaagtttctggtgcaggaatttccctcatcacacctgggggcagcacccgcacggagcaatcaaatttgggttcaaggcctcaaacaacaaagcagagtatgaagcactcatagctgggctaaaacttgcttgggaggtacacgccaaatcaagtctcaggagagtacatggcccatggagagaaaatgatggcctatctaagcaagatacaagacctgctcccacaatttaagggttgcaccctcaagcagattctaagagaagaaaatacaattgctgacgccttggcatggctcgcgagtagcatagtaacttatcaggcaaacttagtcccaatccaattcttagaagaacccaacatcaactatgtggaagaggtcaaaatgatagacacaacaccaaattggatgacacccatagcagcctatctcaatactggagaaatttccaaaccacaagaacaaggctcagaaaatgatgagtgaggttgcacggtatatcatagttgaaagtgtaatgtatagaagaggtttctccatgccattacttagatgtataatagaagaagaggtagcacgactcctgtctgaggtacatgacggattctgtggtaaccacgtaacgagaccaagtttatcaaagaaaatactaaggcaaagatatttctggtcgaccatgatggaagattcaccggcctatgtaaagaaatgtgataaatgctagagattttcaaagatccctcgtgcaccccctaatgagttaatacagatgcaaagtccttggccttttgccatatgggaaatagatctgatcggatagttccccaaaggcaagggcggagtacaatacgtatttgtcgcattggattatttcacaaagtggacaaaggccgagcccttaggaacgatcacagctaaagaagtgttggacttcgtagtaaaaaacaacatacattggttcgaacttctgcataaaatctaggggtgagcaacggtcggtttagtcagttttttacacaaaaaaaatctgaaattcagttttcgattttcatggttataatccgaaaaccgaccgaccattatacaaatgtaaaagaaaaaactaaccgttttaatccacggtttggtcggtttaaaccgaccaaaccaaacttcatttttt

SEQ ID NO: 334634 - DNA, 765 bp, Cannabis indica
ttccctttttcccattcccttgtattattgttggaccgtttaccacttgagcttgaattgcttcggtaatgggggagctggacggatgtcccagtagaaggagcttttgactggctaggtttttgttcaccctctgctcactgaatggcttcttcaagtttgataaaaccttctgcacggtcaagaaaatcactcatcgagtctactggtccgttcttccttatggccttccaaagttcgccaaggacttcaattccccccagtatcgcagacaacttttcgtcttcggttacccgtgcaaccttagtcgcctctgtcatgaatctgctgatgtaggctcagagaggctctcctggtctttgctttacttcgactagatctcctaggtgcaacggaagttggcgagaggaggagaattgtgcatggaactccgaggagaaagccttccatgagttgaactttccgggcgctaacttgaaatacctttgttgggcggcttttgagagggtggcagaaactctgcaacatacatctcctcgtactccttgcaggtccatttgcatctcaaaatacttaaggtgggataagggatcttccttcccagtatacatcttccaggttggcatcttaaacttgtggggcaattccaggatattaatcatgggggagaaaggagttccacgtgctcagtctaacccaagatcgttgttcctttgactggccaggccttggaacatacttttagttcgtccaactgtgcctgca

SEQ ID NO: 334635 - DNA, 563 bp, Cannabis indica
ttttatttagggcccaaaacccaacaccgtcttgctccttaagactttttctcttctatcaaatatccgcaccggttattcctcgtatgacaagtctggttgaagtcctaacgcttcataacttcgaatatgggacgagtctgagacatacttccgaagcattgaaacttggaacacatcatgtacagctgccagtgctgggggcatagccaacctgtgcactacatgccctatcctctcaaggatttcaaaaggtccaatgaaccttggactaagctttcctttcctaccaaagcgtataatgtctttcatcggagatattcagagaaataccatgtctccgacctggaaatcaatatcccaacgctttggatcagcataacccttatgtctactttgagccgcgagcattcgcgctctaatcttctcaactacctcacttgttctctgaacagcctcgggaccaaagaactttttttcacccacttcatcccagtgaacaggtgatctgcatttccttccatataaaagctcataaggggccatcccgattgttgcctggt

SEQ ID NO: 334636 - DNA, 857 bp, Cannabis indica
ttctggatgcaaatccactatataccttttggatttaggtctcctagccttgctaaaatggttgctgatgatattggagatctcatagaaatccataaaaatactctactggaaatttctggtcctttcctacgcattcgggttctcttagatatctctaagcctattcgaagggggatgcaggtgttctttcgaagccttggtaggaccaaatggcttatgttcaaatatgagggccttcagaattattgctatttttgtggaaaaattgatcatatcttttctaagtgtggctcttttctgcaaagttgtgatgatggatgttaccctcctgttctgccttttaaggaaaatattagagctcctcttaaatctcagttcaagcgtgacccttttgatttggctaactctattccattttgaggagatgaatcttcgatccttggtccaaaatcatgatcttcaagattctgttaatcagtttcttcctcaagcgagcttaccttgttctcaggtttctcctactactttggttcctactgatcaccaggttcattcctcgtctcctatgtcctctcaagatgttgtgacttctgattcccagttcagtgggcttcagagtcttctctgtgctgtttctcaggcttttttgaatgagccatccactattgttcatactgacaaaggaaaagggattcaagcttctgactcctttgttcctccttttcctcctcgagctttatctattggtggtggttcgggtaccaagagatcttttgttaagaggtggctgttggttcttctgtttgtggtatgttgaagagggccatggccaatggtgctgatgttatggttct

SEQ ID NO: 334637 - DNA, 658 bp, Cannabis indica
aagtaatctgatgggtttgatgtcgacatttgattttatatttagtctacattttatgaaagcattgttgggcataacaaatgaattgtcaaaagcactacagagaaaagatcaagatattgcaaatgccatgaaattagtggaaatttgcaagaaacgattgcaagcaatgagagacaatggttgggattcctttcttattcaagtctcaacattttgtgctaaatataatgtatatgttcctactatggatgatatatatgttgtacaaggtcgatcacgacgtaatgctcaagaaatgacaaatttacatcactttcgtgtggaattcttttatgctgttattgatatgcaacttcaagagctaaatgaacgtttcaacgaggtaaacactgaattacttctctctttagcttccttgtgccctagtgattcatttgaagcttttgataaagaaaggttgatccgatttgctgagtattaccctagagatttttctacttttgagcttaccatgctcgataatcaacttgaaacttacattcttgatgtaagttccactgaaaatttcttgggtttcaaaagtattggcgatctcgctgaaaaaatggttgagacaaagaagtatattgtttatcctctagtgtatcgactaatt

SEQ ID NO: 334638 - DNA, 617 bp, Cannabis indica
aaagcgtttgaaactactgatataaaaggtgattcttataataattttgacaaactgattagggagagtctctgctatgataagtaggaaccagaaaataatattcgggtttgtgatttagtttcactagattgtgttgaataaaaagatatattcattaaattgaatgtatgatttatatgaattactattctatgctatttgtatacaactataatatgaagaaaaaaaaaattgcgatgcctttcagaaattgaggcaatgatcattaccctaaaatgatctttttgcatcagttaacttccaaaagcgacgcaattatacattttcaaaattttgtgtcgattttgactgttaggattttgcgttaatgtttaactaactgttgaatcgtttttttaaaaaaaaaatctattttatccctttattaataaaactagtaaagagaataaaaaaattagaaagaatcggtcgaaaaaaaaaagagaaaatatatattattattattaataaataataatatagatttacttttctctctaacttcccacttcctactcttatcacttttcacataacgtaatcagaatcggaataaattaatggagaaatgtaac

SEQ ID NO: 334639 - DNA, 676 bp, Cannabis indica
ttgagtaactgatcaacatagaaattttagaaatttggattaacagttaaatttgaattgagcgtactgtgtagcatcataaaccattgtcaacaagttgaaggtgattgagactctaaatatcttacgcaagatttgttgattgctttcacttcgatgacgtctcttacttagttccctagtttgagtgtgggtgacgaagcatgtcatagtcaaactctcacacaggaaccaggaaccattgggaggtgtagcctcgtgatcctcaaattgttgacttgataagttgtacttggaaaggtagtcgatggcagagccgtcgactctccgatgcttaagtcagtagagtgattaagataaaagaaattgaaaaagcgtaaagtgtcgaatacattacaattttttttttcgtgacctagcttcctcatgatttgatttgagtctgatagtctactggacccatggattgattagtgctcacgacttgtgcgcttatgattaggaatgatcgctagtttgtcaattatagatttcgaaggatttcctcatctgtgtgattgggagggagtcgacgacaatgctaagtcagtatattattcatagaaaatataatacaaaaagaaaaggttgagttaaaaatgatactgttttagatgagtggcattccagctgttgc

SEQ ID NO: 334640 - DNA, 504 bp, Cannabis indica
taacattacctccgagccaaatgctagcgagaatggagtatgtcccattactgtcttcttagtagttctatgagcccatagtacttgaggtagttcatcgacccaactacctttgggagcatctaatttcttcttgatagtatctttgaagattttgttaacagcttccacttgttcattcgcctggggcctagatactgatgaaaagctcttaattattttattcctcttgcagaacccagtggataagtcaccatcgaactgagttctgttatcggatactatcttcattggaatttcaaacctgcagacaatgtttttgacaataaagtcgaggactttcttggaggttatggagacgagaggtgcagcctctatccatttagtgaagaaatcaactgccaccactgtgtatttggctcctccccctgtgggaagtgccccaatcaagtcaaccccccatatagcaaaagggtgaggcgaggtctgttggaaattatttta

SEQ ID NO: 334641 - DNA, 747 bp, Cannabis indica
aaattgagaaatgaaaggcccggggaaccctgccaaaatcggctagccggtttttgtggctctgcaaaccggctagctggtttgcaggtttcccaaaacctttcattcattgctcaattctcaaccaaatgcaatgaaaccttccagagtacttaataatggcataaacaatacattccaacaagtatttcacagaaaaactcaaggaaactcaacttgccattagagatcaaagctttgaacccaaagctcaaacttgcataaaaccaacaacacccattaaaaccagctgctaggagttaaaatcaactcaaaagaaccctaaaattcaaaccctaaacctacctaaacctaacagccactgcatcacaaattcaccatttcaaactaagtcaaaatttgaaaactagagaagggttccattagagcttaccttaggttgattcccccttgaattccttgatgaaaacaccacaaatcaacagcaaaaccgcctggtttgcttcagccgaaagagagaaagagagaaagagcttattcttttatttttttttgacttttcctttattttccaaaaatgagtaaatgaatttctcaacctaagcttggctgaaaaattaaaaggccatgtgtcacacacctaggcagccacccaatcccctatttaaaattactattttgccctttaggttataacttaggtatttctaaagctaggggtaaaatggtcaaaatccataaccccgc

SEQ ID NO: 334642 - DNA, 1045 bp, Cannabis indica
aaaaaaattaaaaaaaaaaaataccttacacaaattagaggaggtggggcttggggtggtctgcggtggtggcggacggtagcggacggtggtggttgccgatggtggtgattttttttctaaaaaaaataaaaaattttgagagggattaagagagattgagtgagattgagtgagaatgagtgagattgagagagagggctgaaggagagtttgagaggaaaaaaaaattgagaaaaaaaaagagaaatggggtctgctgctcgaaggggcaggttatatgaacacttttaccggcgcattgaattgcgctggtaaaagtggtcatataaccctaaatgaaaacgccccgtttcgttacacacttttaccggtgcattaatgcgccagtaaaagtaatcccacctaccaccactttccacgcgagattttttcccctcaaaatttcacgtgggcggtcaagattcccaccaaaaatttgctagcttttaccggcgcaattatgcgccaacaaaagccttagagaagtgaaaatgtgctcgcgccatttggcggttcattattgatttttcaccggtacatatgtaataatacgccggtattgagtaccttttgccgatgcaaaattgcgccggtaaaagttattggaatcgaattagaagttcagtatttcatttattctgacaacttttaccggcgcaattgaccaattgcgccagtaaaactaggttttcttgtagtgtaaaggcatggcacaatggaaagaggtccgatcatcaccaaggcaccctccactaccaacatcgcaaaatcccggtaccttgcgaaattgccctagaaaggagaagcaagctaattctatgagcccaaaatcctaaactcgccaatatgaagaaaaaataaatgatttttgttggaataaccaaaggctagaaattacggtggccggcatgcaaagctagaggtcgttatgagtgctttgtcactttcattgacgattactctaccttatgcataagaaatctgaaacgtttgaaaagtttca

SEQ ID NO: 334643 - DNA, 715 bp, Cannabis indica
atgttgaaaacattcacctctagagtcatgttcccaaaagagattttcatgagaccattcctacaattgatgagtgcatttgctgttgcgaggaatggtcgtccgagaatgatgggaattttggactctaagttgacttcagattgagtgtccaagatgagaaaatccacagggtaatagaatttatcaatttgaatcaagacatcttcaactattccccgaggtttcttaactgatcgatcggccaattgtagcaccacagatgtgggcttaagttctcctaggcctagttgcaagtatatggaataaggcatgagatttacacttgcacctaagtccaggagggcttggccaaattcctgttcccctatttgacatgaaatggtgggacaaccaggatctttgtatttaagcggtgtcttgcagtcgatcaccgcactagcttgttctgccaagaatgcagttttcttgacatggtgcttccttttgatagtgcatagatccttgataactttggcataagccggtacttgcttgattacatgaagtaatggcaagttaaccttacttgtgtcaaaaagtcaaggatttcactatgactttccagtaccttcccagtggatttcaagcctgaggaaagggcacctttactggaaggttctgtggcacatcagcatctggagcgggcattggtacactagtggtcttaggtaat

SEQ ID NO: 334644 - DNA, 1298 bp, Cannabis indica
agaaagaaatataacttaatgatagagtgtcaccttaacgtggtaaaagtcatcagttcaagggacttcaaccctcattttgcttactacatctacatgtcctaaaaattgtttacaagctacttcaagtgtacatttggttggatttaacactccacagtagtgtacactactattaagtgttgtaacactaatgatataattcaatattgaatcccacatgttttattttagtaataattataaaaaattgttaactatttataaggtatcactttaagtagtgtgaagcatcgtgatatttaatagtaacaatctttttatttatttatttaactaaaacatgaaaatatcctcttgaactaaattttaaatggcacatgtagtataaatatgctaattacacatcaatcatatggatattttgttaaacatatgaaactaaaaccttacaaaagtcatatgtatttcaacaatatgtatttcaacattaacattatgaatagttcaatgaaaatttttaatcaacaaaaggttaaggaaatttaattttgtagttataatttgtaatagtacggggtaaaaattctatataatattttctaagtaattttttttctcatatgttacataattttttaaaaaaataaaaagattaaagattttaaaatgaattatttttttttaataaaatgactaaaattaaaagaaaaatttacataataaactaaaatattgtatttttttttttacaaaaatacatcaatactgatttttttacgctacttttttatttacaaaaatgcatcttcataaaaaacaatacaccatttgtttagttgttttatagtttatttatagttgtcatgatattactttcttagttgtgtataagcttatttatagttgatttataattgtcgtgaggttgatttattattgtctttttagttattttttactttttgctgaataacgtatatttttgcaatttcaaaatattacaagcatatttttgtaaatatcaatcttaaattgtaaaattgtaaataaaacataaaaaaaatagtatttttgaaaattccccaaattaaaatacatatttttagtaatgagtaatttgggacgtaaatatatgagtttaactcttggatgcagataaatatttaagtttagttttttacgacattgcaataatacttaaattatatttttagaacttttataggtacttaaccattaagtgtcaagtcattatccacgtgatatttttttattggtatatttaaattattttt

SEQ ID NO: 334645 - DNA, 720 bp, Cannabis indica
tggcgcaaggagaaattaataagttaggaaatttacttggtgaattctagatttgtttattggaagctcggttatataagcccatggtcccttcactagttgagataatactgctttcaggctcagataattaattttaattaatcaattataattctaaaattagactatgtcttattgatgaatttttctaagcaatgacttagttgtgaagaaaagaagttttggggttaatttcttaattaagagagtttgtatggtctaattaatgaataatataaatgaaaattttatttgataattaattataattattaaataaataattttggcatttataggtttgatattagaaaatatggtattattgaaagaaaaacaactcattaaaataaagtggcaaaattgtaactagagattggtccttaagtggccaccgactctagtgaatttttgcccaatattttattcttctttaatccatataatttaaacttaagccctagttcaaatactataaaaagaacatgatgctctcatcacatctaagggtgttcatcagatccactccgcacttttttggtcaaacaacatccaatccgcactaagtgcggatttcatattttggatccaatctgatccgcgtaacattttaaatccaatccaatctaatccgcaatagtgcagattagatcggttattttggatcggttgtttttt

SEQ ID NO: 334646 - DNA, 567 bp, Cannabis indica
ttgttacagatctacatttcatgaatccggatttcgatattagggggagttgttttgatcgaataaaaccgaaaataattgtgtaattttagtttcttcccagtttttctggttttttttcgtaaatttctatttagatcattgcaggtcttcttttccagttgatttcgccggaattaatggttgtattttcttcgttttggtttcattttagttgttttgcggttttgaaacgatcaaggtatgtcagcttcattgttcgctccgtgcagctaaaggtttagtgcatgtggtatttttgtaaatatttgtatgtggactgtataaatgtttaatgggccggcccatagtatttttgtaattttttttccttttttgtatttttctgtttttttccctaataattatatagtgattattttacaggattatatatggccatttttccaagaaaattattattaggtgagacacattatattattcgtatatataataggtgccgtttggtaacacttttgttttttaattttttaatcatatgaatatttttgaaaaacaaaaatg

SEQ ID NO: 334647 - DNA, 965 bp, Cannabis indica
acaaagagactgcaagaacaggaagctaacacaagaaggtagatgctgaatcatagaactattgctctttttgaatcagaagctagaatggcatggataaaggaaggagatgaaaattttgcacttttttacttcagtatccgagagagaaggaatcaaaacaagatttatcagtgattaatgttgatggtatccgactggaagactctaatggtattacagcagcctttcttgcctattatcaacaattgttgggatcaagcatggatgggagatcaaaagtttcaaccaaagtaatggagagtggaccgatcatcactaatacacatacagagatccttttagctcagttcacaagagaatatgttaagcagacagtttttagcattccaggaggcaaggctccaggtccagatggatatagtagttacttttatcaagacaattgggagcttgtgggagatgaagtttccgatgcagtcctggacttccttcactctgggcacttactaaaaaagatcaactctacaatccttactcttattcctaagagtaaatgtccaaacttggtaagtgattatcgcccaatttcttgttgcaatgtactttataaagtagctactaagcttatctgtagtagacttgaaagtatattgccagatttagtagcttcaaatcaaggcggattcattcaaggaagattcatagctcacaatatcatgatctgtcaagatctcataaggcactatggaaggaaatcaaacaaggccaattgtatgattaaattggatcttcaaaaggcatatgataccatgagttgggactttcttgaagaagttttgacagcattcaaattcccaccgaagtttatagctactgtcatgacttgtattacaacaccaagattctcgcttatgcttaatggttctataaatggttacttccaagcaagaggggattaagac

SEQ ID NO: 334648 - DNA, 350 bp, Cannabis indica
aaaactctttgaaataatctttgagggggacacctactcctaccattatgtgttcgatgctccaaaccacaatcttagaaggctaactagtgtctcagccctcgtcttttaatacatgttcaggtggcaaacagctaacttccccctaggcgactgagcggatgcaaaatctgttatagtgagatttctctcacctagaaactcgagaccagacccctatttagaggacacgtatactcagatttccaatgaaagctgagatgtccatgagggactcctcaaagttttaaacctcgcttaagatagaatcagcgagaagcagcgagcatgaccatgttggaaattatttt

SEQ ID NO: 334649 - DNA, 847 bp, Cannabis indica
atttcgtcctcaaaatttacctaaataatttaggatattactcccgtattcacgattctaactctcaagttacttcttccatcttcctgtttctctacagcactttcttaactagtggaattgctcattccatattactttctttttccagtttaaaacctagacaagatatttttcccatatagtaaatttgtctgaagcttaacatcgtcacaactcagaatatgggtcgagtctgatacatattttctcaacatggagatatgaaacacattatgcactccgaacaatgcaagagtcaaggctagctgataggctacttggcctacttactccagtattaaaaaacctaatgaatttagggtttaactacctctctatgtatctctttcataggacatacttggagaaaaacaaaaaatctcttatttggaactcgatattcctacactttaaattagtgtagctttttgtgtactcaatgaagcgatcatacaactcgaattcactctatgatttttataagttttgtggatctttttggtccattattattcttttctcacctgtattactccagtgaacatgtgtctagtaattctcttgtaccacacttatttaagtacataactaatggtatatttaattatcacccttagacaaacactccatcagtggaagagattattccaagataatctaacctttatcaaatatgcccactacatgtttctaatattccattgatcctcccaaattacccatctttcaagaataaaatatcatactattttcgctttaatctccataattctcaataactttctttaactcttaacatcatagc

SEQ ID NO: 334650 - DNA, 997 bp, Cannabis indica
ggtagatcatttacgaagtctgcacattttttaccggtaaaaacaacctttattgtgaattagtatgctgagttatacgtgaaagagataatgaggttacatgacgctccgaagtccattatatcaaatagagatctgaagtttactttaaaattctggcagagtcttcagcgggctatgggtaccaaactgaagttcagtacaactttccatcctcagactgatggacagtccgaaagaacaatttagatactagaagatatgttacaagcctgtttaatggattttgaaggcttctagagcaagtacctgccactgatatagtttttgtacaacaacaacagttataatagtactgtagggatagctccttacgagatgttatatggcaggaagtgcaaatctgctattcattgggatgaaatgggagaaaggaaatacctaggttcgaaatcagtgcaacggactaatgaggctatagaaaagatcaaggccaaaaagcttgcgtctcagagtagacaaaagagttatgcagatccgaaacatagaaatgtagaatttcaggtaggagatcatgtgttcctacgggtgtctctgatgaaggggatcagacgttttgggaaaaaggggcaagttatgccctaggtttacagggcctttctagaatcttgaacttcagtaagatttattgtacgaagaataaccagttcagatcttagacagaaaagataaagtccttcagaacaagaccataactttggtcaaggtactctggagaaataatatggtggaggaagccatgagggagttagagtctgacatgagggctcaatatccaaagttgttcaggttagattttgaggacaaaattcttttaacagggggataattgtaaagaccgcttaattttaatttagaattagcagataattaagacttaattatgaaactagagtattaattatgatttatcattttatagagatttatttgaatt

SEQ ID NO: 334651 - DNA, 647 bp, Cannabis indica
gatggtgtttactcttgggggtggaccagtggtttggagaagtgctaaacaaaccgcaatttcagactctaccatggaggcagaatacatagctgctgcagaggctgcaaaagaacttgtctggcttagaaaattcttctcaggacttggtgttgttcctggaatggaaaaaccaatggttttgctttgtgataacacttgagccatagccaacagtaaagagcctcgaagccacaagcgaagaaaacatatagaaaggaaataccatatcaatagagagtatgtggcaagaggggatgtaatggtggataaaatggacacagaggacaacctagctgatccattcaccaaagttttggcaggaactacatttgaaaagcaccgtcaaaatctatgattaattgaaatgtactgattgttttatattagtgcaagtcggagtttgttgggctttatgccctaaataaaactttatttcaacataatctcgatcatttgaatatcaataaagagacagaagtattttcatcacttttttaatgtgtcacttggttcatgttattatttataagtttatttgatttataaattcatcgaaacccttatcacatcaatattcttgtttattgtgtcgtcagcacagtgga

SEQ ID NO: 334652 - DNA, 1469 bp, Cannabis indica
tttttttttttgaaggaacatcgcattcaataactaaaaaagatagatgggaatcacaaagagaaatttcctcctcttgaaaagtatcagcaacaacacggttagaaattctaacactttttgctaagttgtccacaaaagataaactactacgcttgacaaagaaaaaactacaataagaaaaactcttaattaagtctaaaattaacaaagacaaatttaaaaagttccgattaagaatatatttacgttgatccaaagcttgaaccactacctttgtgtctgataacacatgaacatcctcccatttgttctgaatcgccctagacaaggccaattggatagcttttgcctctacttccaaggctgaggtagttgtagaatgcatatcttgaaagcccaagaaccatcagatgagtttatcattatgacaactgctacagcaatcccctcagactatgaagcatcagtaagcagaataattttagcagtttctgttatgcttttaaccactaatagtttctcaatgattacatcattactatcaccactattagataactcaacccatagctcatgagttttattttgcagcctcgacaagctaataactcctccctcaaagagaagattatttctctagttccaaactactgaataaacatcccatataattaatgatagaaactctatcactaccagggaaggtggaaattaagttttctgcaaaatccatcatagaatgaccaagaatattactactgtaaatatggtactcgcccactagccataaggctttaatcgcatgaagacatgaagacaagtctctaaatcatcaccacacaacacacattttgttagaataattttaccaggatctaatgactcattccgttcagatctttagcccttgattcctttctgtagcagagcattatcaagatctaaacctagatctctttctctccttcttgtgaattgaattcttcacagtcttacatgctatgattgaagaccaacttgattaggggtgcacacgggtcgggttttcggcttttcgaggtttcgggttcgggttttcgggcttcgggttttggaagtgcacaaccgaacccggtgttcgagtgtgcgggtgcgccaggtatcgggtcgggttttttgggttgggtgtagtcgggttcgggtcctattgggctgagccagtcgaagaagagaacaggtgccgtcgccgactggtgggtggacacgggacgccgaactgagccgacaagggagccagtcgtcgtcgtggttgggtgcctacgtgcgtgggtgggtgtcgagtcgactggtcactggtgtgagtgagttgacggtgacgacaagtcgactggtacggtgatactggtttaagagtgtatacacacatttgatttcattgaaaattgactcaatagtactggcctgtaacaccctaactatcttaggcg

SEQ ID NO: 334653 - DNA, 942 bp, Cannabis indica
gcagatttatatgtcaaggagatgataagattacatggtattccaaagtctataatttcatatagggatccgaagttcacttctaaattctggcaaagtcttcaacgggctatgggtaccaaactgaaattcagtacaactttccatcctcaaactgatggacagtccgaaaggacaattcagatactagaagatatgttacgagcccgtgttatggattttgagtgctcttggagtaaatacctaccactgatagacttctcgtataataacaattattaaagtacaatagggatgactccctatgaattgttgtatgacagaaagtgtagatctcccattcactgagatgaaacggcagagaaaaaatatctgggtctggaatctgtacaatggactaatgaagcaatataaaagattaaagccagaatgcttgcctttcaaagtaggcagaagagttatgcagatccgaaacacagaaatgtagagtttcaagtaggggatcatgtgtttctacgggtgtctccaatgaaggggatcaagcatttcgagaacataggcaaattatgccctagatttacaagaccttttaagattctcgagaaggttggacaagtggcatatcgtttagctttgcctccagctctttcagcagttcacaatgtattccatgtttccatgctatggaaatacgtttcagaccctgctcatgtaatgagttatgaaaatcttgagctgcaaccagacttgtcatatgaagaacagccagttcagatcctagaaaaaaaggataaggtccttcagaacaagaccatagcttggtcaggtacgtctggagaacagcaaggtgaggaagccacctgggagttagagtacgacatgagggctcgatatccagagttgttcaagttagatttcgagtacaaaatcctttaaaggggg

SEQ ID NO: 334654 - DNA, 697 bp, Cannabis indica
tgtatttgagatggatgtacccaatggaacggtacatgaaaatcctaaagggttatgtaagaaatagaagcaggccagagggttcaattgttgaatcctacatcgttgaagaggttgtagaattttattcaaactacttgtcaaatgtagcaagtgttgggtcgtgtcttcctcagattgatgatgaaattagtaaagagggtcgtggtgtttctgtttgcgacgtaagtcgagctgatcgagatgaagcacaccgactcattttgcaaaatgttgatgaggttcaaccgtacatttagtaagtttaatttagtttttaatattcaattcaaatcgaaagtgtactaataagaataatatataactacatcttgatggaaacattttgattggatcaagactacttatcctagtaagtcgaggaactataaataggtgcaagatgaacattgtcaaaattttagtacatggtttaaataaaaggtattttgcaataccgagtgatttgaaattggtatttttctcttaatcattttatgtaactactaattaatttcatttatgctaggtgattgtggaaatgagtgattcccccagcaatgtatctcaattgctactttcgatatcgcattttctttcatttagtgtactaaagtatcaatcatactacataaatagtactcaatttaacacgaaa

SEQ ID NO: 334655 - DNA, 1038 bp, Cannabis indica
accgttggtttcctagttaactcggataacggcattgcgatcttagaaaagccttccacaaaacaccgataataacccgctaaaccgagaaaactccgaacttcagtaactgtttttgctctaggccaattcttcactacttcaatcttccttgggtctaccataatcccgtcttttccaacaatataccccagaaaagatacttgtgatagccaaaactcacacttttttagagtttatgatctctgagtcgttgcagaaccatacgaagatgttgttcgtgttttgcttctgactgagagttcacaagaatatcatcaataaatacaattataaaattatcgagaaaatccttgaatactctattcatgagatccataaaggctgctggagcatttgttaacccaaatgacataactaggaactcataatgcccgtacctagtacgaaaggctgtcttcggaatatcttcctctcggattctcagctgatgatatccagacctcaagtcaatcttagaaaatattgtcttgccctgaagttgatcgaacaaatcatcaattttaggcaaagggtatttgttcttaatggttaacttgttcagctcccgataatcaatacacattcgaagagttccatctttcttctttacatacagaaccggagctccccaaggtgacacacttggtcaagtgaaccctaaatcgagcattccttgaagttgtatcttcaattcttttagttctgcaggtgccattcggtaaggtgcttttgaaacaggctatgccccaggtattaagtcgataataaaatctatctcacgttgaggtggcaaccctggtaattcttcaggaaacacatccagaaactccttaaccactttaacctcttcaggtccaagtaactcaggtttactgaaatcaactacaaccgctaggaatcctacacaccgactgcgtaataaatccctagctttcaacactgagattcttggaacacgagaaccatgaactacaccaacaaagacaaatggttcct

SEQ ID NO: 334656 - DNA, 837 bp, Cannabis indica
atgacagctgtaattattttattttatctgattaatggtgccacgtcacgaaacccttcgattttcgtgtaggtgtgcccatggctgaccgttggatgagatgaccttaggcattcctgctgccacgtgtctcaatcccaatttatgagggctatcagtatttaagccccatgatacgaagcaactcttttattttccctcaaatttccaactcctcttttaaccttctctctggaatttcaaaagacttacgcccttcatccatatctccatcttttcttcttgaatctcttaagtttcagaagtaatcgagaccaatcacagggagaatcgtcaaaactaaaggttagttttacgaatcttcttctgaatttggtttctgggtttgagaaaaaaccttgcttttctgaatgttttgaattttggaaaagaggttgaaaatgcatgtttagttgtagggaataaacatagggttttattcccttgttagaactgggtaatccccaagagaaaacagacctgtaattggcataactgccaatttaggaagaatattttgaatattcgcatctttttgattgcttatctcttgaatactcgcgggtatttcgatgagcatctctaatactcgcgtatatgcttcctttaggaattctggagactttatcacttttccggttgtttagaacttagggatttctttatattctctgtatattttgttgtggggatactggttaagtctttcaaatggtgggtgtgtcgccgtattcctatgctcatgcgtgcgatcgcatattccttgaggtactgcgatacacccagccatttgcaaca

SEQ ID NO: 334657 - DNA, 604 bp, Cannabis indica
tcaacctgggcgcagggcccaatcccaagtgtcaacctggacgttgggtccctcttctaccccttcggaagttctgtttggtccctagaaatagttgattctcaatattttctgaagatggagatgatgctcgtaataattttgggaaaactccattttttttggcccaggttgataaattgtcaacttggacggagggccaaccccaagtgtcaacctgggcgctgggccctattttttatgcctatgaattgttgttattcctctaaaaggacctatttacctattttttatgaagacagatttgatgcaaaagttggatctttgatcagatgcttggaaggcatccaaattgacaaattatcaacctcggggttgggtgctcggggcctcgggtgctcaaaaatcaacttattccaaatctcattctgatgcctcaaacatgttcgtggtatgtcaagttaatgcctaatgcaatttttggccactttgcactaagacggtcccagaaactgaaaccctagttgaggatgttaacttgggcaccaggtgaaaaccctaggtgcccaggttggcttctgggttgcaagttcgtgtaatttca

SEQ ID NO: 334658 - DNA, 1020 bp, Cannabis indica
gtattctatgatggggaccatccagttgggttcttgcccaaccgttgctattgcctcttttattttgatgcttggctctgccaagcgttccacgggtactacccctagtccttcaatttcactgtccgaagctaacttagccaggcagtccgcgtgagcgttcttttctcgggggattctttctactttataatctgtgaactcgtggagcagttctcggactatcgttacatatgtggccattctttcgccgcgcgtctgatattctcatgatatctagttcacgaccaattgggagtcgctgtagacctttactattttggctcccacagcctttgctagtctcaggcccgctatcaaggcttcatactcggcttcgttgtttgaagctgagaagtcgaaccgtagggctgcctggagtcgaagttcgctcggggatatcattgcaacccctgctccggatccattttcgttggaggctccatccacaaatactttccatgtggggaccgaaggtaccggcacgttcgcggtttcctcggcttcagtacactcgatgatgaagtctgccaacgcctgtccctttatggagattcagggtatgtagtgtaagtcgaattgacttaactccatcacccatttgaggagctttccggacgcttctggcttttgtaggacttgctggagtgggttattggtcaacaccttgattgggtgagcttggaaataaggcctcaactttcttgaggccattaggaggcaaaaaaccagtttttcgatgacggggtaccgcgtctccgccccgatcatgcgcttgctgacgtagttcacgagatgttgagttttctcttcttcccggactaaggccgcgcttaccgtgtgttcagatacggccaagtacaggaataagtcctctctgagaacgggttttgagaggattggagacttggccatgtgctcttccaattttttgaatgcctcctcgcactcgtcagaccattcaaacttttggcacttctt

SEQ ID NO: 334659 - DNA, 1832 bp, Cannabis indica
aaaataatgaacacaagaaatatagtggttcagtcagatctcagtctgcttagtccactgttgcaaggattctgtgtcctttatttcacagcagatcactcctttatatacaaagtaagtgtcctatcatttacacaaggattgcattcattatcaatccgtttatacattgatttacaataattaagctaaaaaaacgtaaacataataaatgaaggacagtttccagtttcattcactaaatacagcaacgtacgcaacttctatagtgcgagttggctattcatattcttgcataagctcgcaggcttaagatgcattcgagattagttgagtccaagatgtctgcgtccttgtaaagtcgcttttatggacatcatataacgagctgatagaaccaagacatgcaagtccatatcgatttgggtcatcgggaccagctcgcaaaatagataatcgacctctatgttttcgcaggaggatcgcgaggatactcgcatatatcttgatatatgcgggctaaagtcgttcattggtcctacataatgcgagtcatacgaatgcgattagacttggtcatattcacatcatctggctgagtctggttcaggcaaggttcatactcgaggagtctctcgttgacatctcagctttcctcggggaaattgagtacacgtgtcctttaaataggagtctggtctcgagtttctaggtgagaaaaatctcactataacaaaatgattaaatttctgtaaatataaaacttcaagaaaatttttcacatagtgtatattttagaagataaaattaatagtgtcaaaatttttgaggcaacctgacttattattcaaaaaaatctgcatatgaatattattatattaaatctataaaaatatgcaacaaatgtataaaaatatggagagatagatagaattatacgactatatttttcttttctttattaaatccataaatatgtatgcgatatatattttttatttattttctacattttttaatttattaataaattaactaaattgtatgtaccaatccaaaatatatcagaatgaatattgttaaatttaaaatatttcataaccatggtttcaagaatcaatattaaaaataatactgttagaaagaagtatgtgaataattaaaatttagagtatctctagtagagtatagagtgccaaataaatgttttatgctatatttttatttttttccagaaaaagaaaaaaaaaactctgaaatggtatggttgtgtcaagtttagcctatactatagaaaaaacttactttcaaagataactttttagtcacagtataatttttttgtgactgattgtgatttttagttagaacaaaaatgttacttgtgactaaaacataatatttagatataagttgttactaatttaattttagtcacaacaattattgtaacaaaaaatacatttagacaacaaattgtgatttttttgactaatacctttagccaaagaccttttagttataacatagtaatagtaatttataataatcataattttttttacttttaatcacaaattttattatgactaaaaataagatttttatatagtgataagctaacaacacacaatcgcatattatttattgggattgtttcacaaatacacaaaaataacaaaaaaattacaaaaatgcggtttcacggaatttgaaatatttttacgaatttttttattttatttacagaaaatacggtgtttttatgttataatcttgttaatttgttattgaatttttgttatctgtatcttattttttgttgttatttt

SEQ ID NO: 334660 - DNA, 392 bp, Cannabis indica
tatctttttttttttattatatatatatatatggtgggacactcatatatatatatacatattctatataaagttgtggctatataaaataatttttggtttaacgatgatttgtgagtttctataataactttataatagaatatctaattacttaacaaaatattttttttattaattttataatattattatatatatttaaatatgaaaattatataaatattttatataaaatacttaaaatattattgatatttttaactatattttaaaatttattggcttaactttaaattaaaataaaaaaaattatcttctatacaataaaggtacctgctaaaaaatgtaattttttgttttctatacaataggatcgtctgtcttttcac

SEQ ID NO: 334661 - DNA, 675 bp, Cannabis indica
aatgcaacgtagggctaaaagtttcccaactcaaacctaacatactagcaaaaattaaagatataaaggaatgtgatgcattagtatcaaacaacacatgagcccaagagtgtgagataagaaccataccatcaacaactccttggtctgcactgccatgtatatcatcaaccccaagagcataggcttgagcggacgactttgcttttgcttttccctttccctgactaggatggcttgtactagcaccagaccctccaccttgattataccttatttgactcccactaggagcagaagtttggaaaccttgtgagtaccccatgttgaatcctgaaccttgtggcctaaacggatgttgatactgagacagctggcccgattggggtgtaaaaccgtaggatgaagactgagactggtttatcttgggctgtccatgaaaaggagtagactctacatagctccctatgggtcctccgtgagatgcttgaaatctttgttgtcgttgtgggcaatctttcttcttatgaccttattgactacaactgaaacactcatacggtccactacgagtctttcaagatgaaccactactagtggtacccccactaaattgttgtccttgggatcactgttcttgattcttcttggtcatctttcagtcatttccttttc

SEQ ID NO: 334662 - DNA, 751 bp, Cannabis indica
catctttcagtcatttccttttcatctgctcgtgttcttcttctcattcccttctacatgacccttagtttgcaaggctgctgtcacacactcagttaggttgttaaaggtcaaaagagccattggaccacgtatcgcaggcctccaacgacgcatgaatagttcaatcaccaagggttggtcaacaacaccagggtatgcataagaggatagctatacaaacttcatgtaaaattcattcatagtcatatccccttgtcttaaaccattaaatactctaattagagccctcttgtcagatggactaaaatattgctccctgaaaacttcctcaaaatctcgccaagtcatcccatcagtttccattgtcctggataaggtctcccaccaatctgctgcaccaccctctaacttggacacaacaaaagttacttgatattcctcaggcgttcctattgtgttgacatttttcttcatcagcctcaaccacctttcagctaccatgggatcttgtccaccctcaaactcaggcacttggatccgatgaaagatctgaaaatgataactctatcgagcggcaagatccatctgttgagcgggaactgctcttaaggcttcgagaagggcgttcatagggaattcagcttgtggaggttggacattagcttgagggatgtcttttccaaccgttctccgtgtcttcatttcttttagaggcattttcttaggtctgagaaccaaaagctaatca

SEQ ID NO: 334663 - DNA, 1235 bp, Cannabis indica
acgtggatgtggtcgaggacaaccaaaagaaggaaggggtggctataataacaataatttcaacaatagagaacgaagtcaaaattcacaagcaccaagagggcgcagaagaggcaactcattgtcaaggagtgaaaaatctcacatcaagtgctacaattgcaacaagtacggtcattatgcctccgaatgtagataaaggagggtcaaagaaagagccaattttaccgaagataaagatggagaagaaggaactttgttgcttgcctacaaagacaaagatgaaggtcaagaaaataaatgtatcttgacaccagtgctagtaatcacatgtgcagagaaagaagaatgtttgtggagctcaatcaatggtaaaagagaatgtctcttttggagatgaatcaaaaatactcgtggaaggcaaagggaagattcttatacacttgaaaaatggaggccatcaattcatcctaaatgtttactatgtacccaacataaaaaattatattaagagtttgggtcaattactagagaaaggttatgatgttcacttaaaagaaaataacattttcttaagagatgataaaagtaatttgatcacccaagttcccatgacaaagaatagaatatttctcttgaatattcaacgtgatgttctgaagtgtttaaaggcctactacaatgagtcatcgtggctttggcatctacgctttggacatctcaatttaggcaggcttaaactcttagagaagaaggagatggtgagaggccttccatgtatcaactaaccagatcaactttatgaaggatgtttgcttggaaagcaatcttgaagaagttttccaaaggagtcactatcaaaagccacaaaggcgcttgagctcgtacacactgatgtatgtggcccaattaaaccaaactcatttggtaagagtaaatacttcctcctctttatggatgatttttcaagaaaagcatgggcttatttcttgaaggagaaataagaagtgttcgagaactttaagaaattcaaagctctagttgaaaaggaaagcggtcttcctattaaggccatgagatctgatcggggaggagatttcatattaaatgagttcaacaaatactatgaggatcatggaattcgtcattcattaacaatgccaagatctcccccccccccaccaacaaaatggagtggcatagaggaagaatcgaaccatactcaacatggctcg

SEQ ID NO: 334664 - DNA, 569 bp, Cannabis indica
tctcaggagagaaaggggttccacgtgcacggtccaacttgagatcactgtttctctgcccggccataccttggaacatactctttagttcgtctagctgtgcgtgcacaagtggactaacctgttcggcattttggccaatttgagtcacgtcagtatcattctgagcgggaatttgagcacgggttctgggctgtacgatcgtcatgctaggttgatcgtctactcctctccttctattgagatcgtttttgggatcatgagttgtcgccaatctttcgaatacagaaaagcctggctgtctcagtggttgattaacttaattgacaggtggaacgacatcgttggcctaattggaaccaacaagtacgacttctccttatgaattactagacaaggtatgcccacctactacttggcccacaggcggaacctgtgaccggagatttagtggctaaccatttatagtctgggaagtattcatcgttggatcttcatctgtttcacctagggggatgacagtcgggggttgctgtccgacagtttggtaagcttttcgtatcagcaca

SEQ ID NO: 334665 - DNA, 839 bp, Cannabis indica
gaccaaggtaacatgtgtggcaaaataccaccaagtctgccaacgcttttatcatgtcccatttgatactgtgcgaacagtctccctcgtcgctaaaggactcccatgttggaattattttaccaggatctagattcactaacaagtatgttaataacatcctaaacatgaagttctaaaatgatatgaaataaacacatataaagtattaggaaccttacagtggttgcagcagaatataatgtctccttccactaagatctctaacccttgtatcctttttgtagcagagtatcaccaagatctaagtccgaatctccttctcttgaaactggattcttcacagccttacacactatgattgagtaccacttgatgtgtgtgggcactcactctttttactatgaggcttcggttttgaagagaggaagagagataggatttcagctagggtagtgagggaggctagaaatttttaatgaaggaatgagatgcatcatcttttccctttagccatcactacctatttataggaaaccacttagggttaggtttgatttaattaccattaaaataatggaaaaataaagtggaaaaaacccttgtgaagtggccggccatggattgtgggccccactttgcaattttgctatttttctcatttttcatcttattttctcgaaaataccgttttccaatttagccacttaaatgccaattctaattatttaataacaaaaattaattattaagtaatattgccatttaatatatttattacttagacttaacaaagtctcgtaattaacaaataaaccctagaatatcttttcttcaca

SEQ ID NO: 334666 - DNA, 1076 bp, Cannabis indica
aattgtctttgtaattgttgatactttataaattgatttcattctctgggcgtggccccatggactaggagtgttcgaaaaaatactgataccacgtacaaatctcttatatcaagttatttaattttctgcaaatatttttactttctgcttgttctgttttgtcgttgcaaaactggtttctgcagtaacagaattacattctacttctgcagacgtatacaattttatatttttgtatttattattgacacttgcaaaaactcggtttttcattgtcatttatttcaatgtcgaattctttgagcagaagcacccaccgaatcaaccttggttttgcatccttcttggtcataatgtactttattgctgaatggtttatataaactatcatcttattcccaattaaatatggccaaaacttatcacaagtaaacacaattgccaacatctccttctccgtggtggcatagttcagctgagcatcattcagggttctactagcatagtagatggtgtgaaacaccctgtcaacttgtcgtccaaagactgctcgaattgcgtagtcacttgcatcacacatcaactcgaatggcaattcccaatttggtgaagtgactataggtgccaatatcaatttctccttaagaactcgaaagctttcaagcattcttcccaaaactcaaaaggaaccccgttaacaagcagattggacagcggtttcgagattttcgagaagtccttaataaatctcaagtagaatccagcatggcccagaatactccttactccttttacgagacaggacgggtaaattctctattgttgacaccttagctttatccacctcgatgcctccctttgagatcttatgtcccagaactatcccctctgttacaataaaatggcactttttcgagttaagtaccaagtttgactcctcacaactgattagaactttctccaagtcctccaaacagtgatcaaatgaagaaccaaaaattgagaaatcatccataaagatctatacatgttgtaatcaagtctgaaaagattgccatcatacacctttgaaa

SEQ ID NO: 334667 - DNA, 1220 bp, Cannabis indica
gtcacgtatatcaatataatcaaaatgacatagatcaatcatggatgcgtagcatagaaattacatgcaaatatgatcttagcatgcctatttccaattggtcctccttaattgagatcattccttcattaattctttttgccttatacttaaatcccaatagaaagaaaacacttagagtactcaaaacttaagtcaatactttatctgcagaatcaaaccataaatatgtgttagcttgatagaacattctaaatacaaacttccactaaaccagcataattttaaataataccacatccatatatgagcaacaagcttctgaaaaatattaagtggtatatccttaatgattcggatcacacaaaatatagagtttgtccttattatgttctatagacaccttattactctgaattttatacaattagttcaaagtcaatgtgcctttgaccttatagatttcatgttgttactaaaatgcaacttgattgatttattgttacaacatatatctttaatagctttcaataccattcttaattttagccatatgtgacaaaaaatttcacaactaaaaactttataagatcagaatcataaatcttaatgatctccaaaattttctgttttttgatttctgataagtgaacatatagtattttgttctctttaaatttcttatagcttatttggctgcataccgaaagttccttatatggttacttaaatatctatccaacatttatgtatattaagtacaaatatatacattcttgagcataaattagattccaatatatattaagaattttctatatttcttgaattctaaggtttctttaaggacaatgacttagacaatttattttctttagctacaaacctttcttctggtatagtatctttcatgccaaaagttttgaatactttattgatatacttcttttcttataattcaagaatatctcaagaataatttcaacatatcttgaactcttaatacaaaattagtatatcatcaatggcaagttattttttaccaatatataataccaggatcatattcttacttccactgaacttgtgatgtatacacaatcatcaaaagcttctatctcaaaatcaaatgagaatacttaataaaattgtgttattgttacgagaagcttacttgagtctatacaatggatttttctaatttgtaaactatattcttt

SEQ ID NO: 334668 - DNA, 812 bp, Cannabis indica
taagcttttcgtatcagcacagtagcttgccgactacgattgtcaatctctgcatgatgagcccttaatgcttccatctctctgtccctccattcagcaaacatgcgtctttgttcctcgaacgcaagatttaccgcagcgcggagttcctcctgatcatgatgtaaagtgttggtatgaccttgccagagtccaagagcagcgcggaggttttggatctcagtatcatctccaatagtcgtccgaacgttggtggcagcggaacggctgtgttatgaatgccttggttgagtgctaaactggtattcccagtctcttgcacaccaggcgcgatttcatccacaagagtcgtcacaccatgacccgcgttcgacggctgttcaggattaacaattggcggaaccctagtgtttcctagattctgaaattttggatctaccgcctatggatttgcgagatcaaccatacccttacgagtttgtaccaccatcgtacttgtgattagatttagaatgaagagcgattcttgattctgctctcaatgaaagcaccaaaatgttgacctcgctttgagccaacgacaatgagtctaatttgataagcgacaagtagtttataacgattgaaagataataaagcaatataaagacacaagaattttatagaggttcagccccgaacagttcggtagtagcctaatccttgctccactatagatttggaattgaatgcaatctcagttatatagaactctctgtatgtaccacgatatagatacgttatgattatccattgttacaatcctaatagtc

SEQ ID NO: 334669 - DNA, 544 bp, Cannabis indica
ccatccttacgtaacagaaataaaaatcgaccccttaaatgaaaaacgtcattaacgttcggactaagctttaaaaagttccaaactcgatttctaactcaaaatcacctcaaattcaacaagtaaacatataaactagtcccatagttaccaaagaacaattctacgaaatcagaatctccataacctttttaaatcataaagcccttatataaaaccaatcgtttttagcttaaaacgtaattaaaccataccttaagcttttcctctttaaggatttgctatcctgctactaccagagcttaggtcgctaagtttcaagttgaaaattgaagaaaatgaatatagagagagaaggttttgtgaaaggaggaagaacaagagtttcgttcttcgtttttctctactgttatatcttaaaatttaatatatatatatatattaaatgaactgaaagttttgttttatatatatatatatataataataataatacaatattaataataatatattaacaacataataatataataatataata

SEQ ID NO: 334670 - DNA, 540 bp, Cannabis indica
ttccattgttataaaatctctaacatcaagatcttcgtctctttctttcaatcacacgttgtccatcaaacttgacgaaaacaatttccttccatggcgacacccaaatttctcgatccaacggcagggccacccaaattcgcgacagcagcagatgaagtaggaaatcgaatttctgaggagtttcttgaatgggacgttcaagacagtcttcttgtctcgcggcttctctcttctatgacagagaagattctcactcgcatggtgggatgtaacagtgctgctcagatctggtctacacttgaggagtattactctgctcaaaatcgagccaaggttagtcaattcagaactcagcttcgtcgcacaaaactcactggaaatctgaatgactacttgctcaaaatcaaacatattgttgaatattctcttgcctccataggccgtactctttctcctcaagatcatattgaagccatctttaatggccttacacgagattactctgtttttgtaacatctttgtgttggaaattattt

SEQ ID NO: 334671 - DNA, 669 bp, Cannabis indica
caatcaaaacaagggttttcgaattaatgaaaaaaaaaatctagaaaaactactacgaacctaaaattcaaccggaaatccatttttatttgcataaaactaatgttttgacttcaattgttagatccatgagaatacacgtagataaagttatgtacgtggaaacactgttctgatttttaatgtttcgtaacagttgcataaatattttgctaatatttatttcgtctgattgaaaccttcgtctaatgcaaccttcggccaactaaccagtaaccttcgtctaattgaaaccttcgtctaatgcaaccttcagctaaccacccagcaaccttcgtttgattgaaacctttatctgacgcaacctttggtcaaccacctaacaactattgtttgattgtgtaagtgatagtgtaagaagtattttggtaattaaaatcacagaaaagatgtaaatgttgtctacaccttatggaggtatttttgtaaataaaatgtcaatttatattttccatgtaataaataaggaaatgagtttttttgagttttaaccaaaaaaagtaacaatattacaaaaatacttccagctggccaaataaacaaatatacagctcaaataaaaaaaattacataaataccacttgcgcacaccttcaacccaggatccat

SEQ ID NO: 334672 - DNA, 494 bp, Cannabis indica
aatcatgtttatatgttcaaaaatttaagtcccatgatttgttagtacactagatttagactgacatgataatcagcaataaggcatacttacatcttagataagtgttatgtcctttccaggacattgaaaaggtatactagtatcagatgtatggagtgtacgttggattggactgatattgatcttatcttaggtctatagatcttaatgctgatatagttaggttcaatcttaattgtattatttatgttcttcaatttgttcgttaaagtcaaccaattggatcttcttggaacatacagatcaagaacatgaggctgctggtgcctcgcgactgcctgttattgacatgccccacaggggcatgtcgtatggcttcttcaagtttgataaagtcgtatgctctatcaaggatctccttcatgttgttagtggatatcctccaaatatcattccaaaagtctcttagtaggagtatgcccccacgtatg

SEQ ID NO: 334673 - DNA, 687 bp, Cannabis indica
gctatggaatttgggcgtgggtaaaagtcagatatatatgagtttttataagttgtataataataagaagaaaaaaatagcataacagttggtaatctattaagataagatgtcagaatttaaatgacaaatattttgactaccaaaatagtttgtacacagttgcataatagttttttatagttgtacgcctaaaaataaaccaacaactttaattgtaaaatcataacacagttgttgttaaaacataaaaaaatgaacatagtataatggttaatttcaaatatcctataatttgataaccagttccattatataaaacgtatagagtacctaaaaatattaaacaaccaaatattatcttaaatgaaaatgaaccaagaacaacaaagtttcccaaaaaaggaccctactttttcaatttagaagccttagaagacttgttctgcttctcatcctcactatcaatactttcatcatttttcctttgaccatacaaaaacaagagggcagcaagtcgagtgtggtaaacttcaatgtcaaagtcaccagggacatctttcccatggatgaagaactcagcaaatgcaaccacaaatgctctgcaatcactattttcaagaaagaaaaacaaaatagttaaacaactattatacaacataaaaaacttaaaaacaacaactcact

SEQ ID NO: 334674 - DNA, 401 bp, Cannabis indica
taaaattaaattttaaaaattcaaattaatttattttgataattagatttgcaatatagaaaataaaaatcaaaatataaaacttcacaaaaaatcggaagttaattccatgaaatagcatgaaaaatcgaagaaaacgaaaaaatttgcaagtggtacggacagtatgcaatgcatactgtccgcgtgcatgcagggaagcctgaccgagtggacacggcacaggaggttgctaagcagcctctctgcgcgcgcccagggggaatttcaaacatgcgcccgtgtcctaaccgagaaatctcggacagcaggttgtctaagcgcgtgcatccgagggttgcaccctcatccacgcgcgtagggtgggtgacaccatcccgatattttctgattttcaaaaa

SEQ ID NO: 334675 - DNA, 890 bp, Cannabis indica
gttcccattgctccaccacaacgcacaaagatgggccctcaaaggaggctgggaatatacgttggatttgaatctccttccattatcaaatatctagaacctttaacaggtgatattttcaatgcacattttgctgattgtcactttaatgaggaacttttcccaacattaggggagaaaagaaaaatctacataaagatattacatggtgtgaaccatcattattgtatcttgatccttacacaaggcaatgtgaatcagaagttcgaaacattgtacatttacaaaatatagctaatcaattacctgatgcatttgttgacactaaaggagtaactaaatcatatataccggctgcaaatgctccttctagaattgaaataccaaaaggaaaacttgaagatttagtcgcaaatgagtctaagtcacgcctgaagcgtgggagaccaattggttccaaagataaaaatcctcgaaaaagaaaaggagcagataagcatgatgactccaatatggatgaaaataaccatataaaaattcaagatgagggaaacactctagaagagaaagcaagtgaagtaagtcaagagatctcagttgattatgtcaggactaaaaactcatcaaataaaaatgattcgaaagttattgatgagacattttcttataatgtggcatgcaatatagtcaatgaaatagatgatcaagaaccaaaatctgtctttgaatgtcaaaatagacatgattgggataaatggaaagatgctatgcaagttgagttagagtcattaaacaaaaaaatagtttttggacctattgttctcacacctgaagatgtgaaaccagtaggattcaaatgggtcttcattcgaaaacgaaatgaaaaaaat

SEQ ID NO: 334676 - DNA, 677 bp, Cannabis indica
acaatatttcggtgttgatcggatttgcaataggtatatccatccgctaaccttttgttagtataattaattatcaatgcatgcttagttgagtttgaatatcttaaatattcatccgtagtgaagtaggttctgcgaatacatgtactgcggtcggatgggtggataaattttgtattgtttatgttagtttctttgttctgtattgttatatttgttttgtttgttactttaggcacttttaaaatttttgggaacgtccaattacagccgttatgctgccaaaatttcggtagaatttggatcaaattttattataaaaaacataaatgttaaaggaaaagtacataacataaataactaggttattactcgctagttgtaagaaattaggtgacataacacattcatatttgactcaaaacatgttcgtgttagtaggtctttatatttgactcaaaacatgttcgtgaaattaggtgacatttgttttgtttgttactttaggcacttgtcttgtataatctaattgatgtgtctatgcatttattatacttagtaggtctttatatttgactcaaaacatgttcgtgttagtagcatgattatcaatgtcaaagttcatatttgaaaggttctcaaattttgtttattaatggtattaggaaaatgttatt

SEQ ID NO: 334677 - DNA, 1107 bp, Cannabis indica
gatgactaatgcgtcagaatgcggatgatggacccatctcgcatcactctccataaaggtgatgtcgtcgcattcttttttaaacaatttctctggccgctcactgagattatttacattggtgagcggcttctccttagcttccttggcatagcgctcttgcgacttgcgggagtctcctgcgatctggggccctacaatgatcgttaagatattgcgaggtgttctcgaaccactcgcgttttgattttcttctttgtcatccgctcggggatgaccttcctcgttcttcttatacttgtcgaattttcctctccgaatcagctcctcaatttcatcctgcaagacccaacattctaaagtggtatgaccaatatctttatggtacttacagaactttttgggatctcttctgtcgcggtttcctctgatggggggcggcttcttgaagactcccttcctttcttcaattgcatagatgtggtctcggggcaccgcgagttcggtatagttaacaaaacgcggtccacccttcctcttcggcgaggactccttcttgggaggagatttggccaactttggacttcgctgtctccgtgggctgcgtcttctcgggcttcggcctctggaattcttccctcggggactgcgagaccttgatcgcggtactagtgatttacgcttatccttgcccttctccaactctgccagagaattctcaattctcttatgaggttcagccatagcgaagaattcgactagcgattctgaccttcgagcttgtaactccttccagaaatcagttctcggcaaaatacctgttatcaacatacaaacaagcgaagactcgggagccttctcgacttttgttacttctgcattaaaccgtttaaaatagtcttgtaaagactcaccgggttcttgtttgatgttggccagagttgtataaggaggcctataggtcatcgtggcctgaaagtgcgtgaggaataagtcgacaaaggtttcccatgtcgatatcgaggcctcaggcaattgggtaaaccaatcgtgggcattttcctcgagcgttgccacgagaatgcggcattttgcaagctgtggtac

SEQ ID NO: 334678 - DNA, 676 bp, Cannabis indica
ttgaggttaaggagctacgtgacttcagggagcaggcttaaaagaaggcaaaaagagatgccctcctggcccccgttacctactagcactgcaacaaacgtttcgacgattgtgtctttatggcttggcagactaacggtcagatacttaatctcgacttctatcccaagcctgaagaggtcctcgtccacttctgggagaagaagaagagacttgatgccttactggagaagctcaggggtcctcgtctgccacctcgaatttattaagccagcttttcactacctctatcattattattatttttccttttacatatttaatccttctcccctctttaagacaatttacttatatatttttttttcttaaggggagacacttaaggcccgtccccaggcccttatcttttttggagattttctttgggatccgaacactttatattcacgtttgaatacatacttagctttaactttgttaaatttggtctgtttacatttgtccgtgtggtatgctttactaacccccctaagtgacatgaaattcaaatttaggtcactcagttttaaaaactttggattagaggttgcatatatttgtccagtacaaatttactttacagaacataaactttatttttctaactattggtaatacttgtcggaggttatca

SEQ ID NO: 334679 - DNA, 568 bp, Cannabis indica
tcagatgaagagagcttaagtaagaagtcactaacacttctcttgtgtctatgaatatgatcaaactaaattcaagtcaactaacatgtatggatttgctccaacaaaagtttattgtgtttcttttgtttcttacgaatatatatacctagctccactccactccactcctggtcttgagttcggggtgttatggctaaaagctcttagtttgaatactctgttctgcttcgaagtaatctgattcttcacatctaatctgtaacaccctttaactcatttttctcttctaatcattttcttacctcaaaaaaactcaatgagttgcagtgcaataatattgcctacaaatgcgcgtgttggattcagattcagtcccacaaaagtattagggaaagaatgatgtggtcgaccctatcatggccacagtaaatttttgggcctttgaaccttgggatttacctagtatgtgtgctatttcttcatttttaatgttgtttttctttatttttacgttaatacatattcatttttatgtggttttggtttctgggtttgttgggatttc

SEQ ID NO: 334680 - DNA, 783 bp, Cannabis indica
tcacatggacgtttaatcccattttcttgatttaggccttttctacttgaaagttgtccactttttaatgcttcaatgactttggcaacttgtttttctcgaagaatgtcgcgacgcttaaatgattctccaacaatattcaccacatttgataccacaatgagaaaagtacctatatttttacaaaataaaaatcattaataattggaacatggtttatgaaatgagtgttgcccctgattttgtccaaaatacgtggaccaacccgatgatgacacgtagactgaaagggtttaacgtttagatagttcaactaagtctctttagccagagggatcaaccttagacatgccttccggagaaggcacgtgagtctcacatactcccggagagtaaggctacaactaagcatctccgggaggtgtcagatcctatctgaacagtcacctcgcatttaatgccacatgggagaaggtgtattgaaactgccatatgtcttaaagtttgacggcataaccccctttctgcagctactacgctatgattagtaagcctagtgacggctactttatgagggatcatatcagtcaagaaggataaaggactacgtccattaaacccctacaaagcctagggattagaccatgcatttcctatgatgtatccattaggaatgtgtgcctttactgagaattacaaaaagacatgtacctcgattctaaggatcaccccacaataacactataaataccccccaaactcattaaggcaggggtcgagaat

SEQ ID NO: 334681 - DNA, 837 bp, Cannabis indica
cagcaagacagtataaaatataaataatcataattatcacatcacataaacatcaatcccatttaacatttgtctgtatgacacagacccgcgtggtacgcttacacgcctatttatgtctatgtggcatagacctacgtgttacgctcacacgtctaaatacaaaaggccttagaacagttcatatctattttattcatcgagtccagcctgattatgccttaaacacataaccctaaatctcaatatacacttatatataacatggcatagcacattcacattaataatgactagggtaaaaaccctagaccattaaccgctcatgttagggtgataaccctagtcttggttcccaaatactcacatatatcattttcaatataagccccaccacgcatactctatgtactaactactattttacctaatgtcccgcaaacgtggagattccaaatcctcgggtgctcctgactgagtgtcggtaatcttagtcacaatttttgggattcacaagaaaagggttaatccctaaatccaatttcacataatataaaattggcattcaaaatttagataaacatatgaagctcaaaatgagctttcgaacgatatgaagaacgtcccaaacggagtcccgagtcaaaagttatgaacaaaacaagttcaacatgcaatctatccacgcaagcaagccgcggcacccaaaagctgggctgcgacgcatgggttcaaaactcagagactccattccaacagctcaaaaaatgcatcaaaactcacccaaactcaccccaaacatgcatatatctcaaaatcatttcccacacaatataa

SEQ ID NO: 334682 - DNA, 711 bp, Cannabis indica
taaattagctatgtactagttagagatgaggaatgatggctgctaggtattatccccaatggtggttgacgaccaggtcatacccataagagacccctgttgtgagtaactctttcaaatgttgaaatcccatgaaaggctcaaagatagttgttaacccatgaaaaaagtgggatattatcataaaaatcagacttcaactacctctaaaaattaaggagacgattgaggtagctccgcgttggtcgcgtttcttgaagtgagaagcacaaacactctcctctatataaggggtcatccatgacctcggaaggggatccgcaattttgagcacttagcaaaataaacactttatcattatttgcaattaagaggctgttcttgacttttgcaactcagattaataaaacacaagggaagtaggctattaccaacattcggggccgaacctctttaaattctcgtgtcttttctttacatttgttgcaatttctagtgtcattaactgtatttatcactttgattttggtttatgtctcatttattaccaccccgcgtcgattggctaaaaatccagtcaataggtacaacttcatcttttttttctcttcctttttgagttggtcacatctaaaatgataatttattttttcaagattcactacaaaaaaaatgtcacaacaaaaaaattttgtgactaaatgtgacttt

SEQ ID NO: 334683 - DNA, 520 bp, Cannabis indica
taacaggaagaatggcagctcttaacaaattcatctcgaaatcaactgataagtgcctagcattcttcaatgtgttgcgaggtaacaaaaagttcaaatggacaaacgagtgcgaggaagccttcgaaacataaagaaacatctgtcaagccctccagttttggctaaactaataattggagagactttacttatgtacttggctatctaagagaatgcgattagtgtagcattagtgcgagaagaagggacgcaccaacaaccagtttactatgttagcaaaaggttattgggggcagaatcaagatatccacctcttgaaaaacttgccctatgcctcattcatgcatctcaaaaattaaggccttacttccaggaacatccgataaaggtgttgactaatcaacccaaaagacaagttttgtcaaaaccaaacgcttctggaagattgataaaatggtctattgaaatggggcaattcgacataacttatcacccaaggacatccatcaagggccaa

SEQ ID NO: 334684 - DNA, 591 bp, Cannabis indica
caataattatacaattaaaaaaacaaagccataattatgttcattgtgaaccaataactctcaactcagccttttagagacgaataaaattataactaccaaaatgttattaaagcaaataaaagaaaaaaaactttgaaaccctctctttctctcgtaaggaagcaaactatatttaaaaatgcatttacaagaaagaaaaaagaagcaatagggctattagaatagggctattagagaagtagtttcgtttctcatcttctttgctcaataaagataccgatattttggtgtcttaagcgtagaaaaattacactaatctatcccgaacttagtgattaaactttactacgatgacaatacagtaggggcctcgaggtcttgtaaaaaagccaaaatataactcgacacaagaatgataaaaatggtaaaattatatatttatttatttattttgaatggaaaatgcatttttattaaccatcaaagtccgctaccaaagacggtagcaaatcgaatggaacagactccatatcgaaagtacaaccaggaaaaaatatagaagctctacagttatgagctaccatattt

SEQ ID NO: 334685 - DNA, 559 bp, Cannabis indica
tatttatttatttttaataagaatttttttaattatatacattatatttaaattaattatgaaaataattaaagtaatttaaatagatataaatagcgaaccatgttacaccgaaaacataaataattattttcctctctttctctctcttgtctattatttcaaaaaaaaaaattcctatcacaattttgatcatttcaaaaaattatattattataatctatttttcaaattaatttttttaatatatgtagaaaacatatatttcatttattgtaattaaaaacaaaatataacaaaaataaaaacaacctcttagtttattttataatatattaataaataagtaaccaaactataaatttaaataaaattcagtatatatatagggtaatactatggtaggacctagaaaaagttccctaccgtatgaaacttttttttttaaccgttgattttagatcttgtggctattattgtaaggtatatactattattataagactgcttgtatataattaaaactttatacatattataataatatatttatttaaaa

SEQ ID NO: 334686 - DNA, 1719 bp, Cannabis indica
aaaatcagatttccacacaacgacctgttggtcgtagaggtccggatagccaataagatggtggccagaaccatgattgataacgaagcctcttccaatatcttgttcaaaactgcttatgaaaagatgggactccagctcaaggatctagccccgtgtctcctgcctgtccatggtttctctggccaagcagtggcacctctaggacaaattcgtctacccctcactcttggacaagcttttatgagcatgactattatggcacacttcctggtattagatgctccttcagcctttcaagtaatgctaggtcgaccagccttgtatgacataaaggctatcacatcgatattccactcgtgcttgaagtttccaacgaagaatggggtagggtgtctaagaggaaaccagcagactgctcgggaatgttataaccttgcagtggccaaggctaagaaggaagtatcctccaaccagagcactgacaagggaaaaaacatttccaagtagggaacttcccaaggaggggatatcctcgacttggggacccaagcagtaatgttggacccgtagaaaaattagaagagatcgagatcgatctagatatcccgaccagaaagctaaagatcgaaaagggtttgttgctcgaagtaaaatcagaactaataaaatttagagcaaacctagacatttttgcctggtcacatgcggatatggttggaattgatccttctatcatttcacacgttctgaatattgatcccaatttccagccagttcaacaaacgcaaaggctattggagaaagagcgagcactagccctaaaggaagaagtagaaaagctacgcaacaacaatttcataattaaagttttctacccagcttgggttgcaaattccgtattggtgcccaagcggaacaagaaatggcgattgtgtattgatttcatagacctcaaaaaccatgccccaaagattgttttccactttcaagaatcgatcagctcgtggatgcaatagtaaggcatgaaatattaagcttcatgaatgcttattcggggtacaatcaaatcaaaatgcatccactagaccaagaacatacaaatttctggaaagatttgggaatatattgttacaaagtaatgtcgttctgtctaaaaaacgctggagcaacataccaaagattggtaaacaaaatgtttaatgactagatcgggagaaatatggaagtatatgttgatgacatgctcgtcaaatctaggaaggctgggggcatatagatgacctggacgaatgcttcaaggtcctcaaaaagtacaacatgaaactaaatcccttaaagtgttcatttggagtcagctcaggaaagtttctgggcctcatcgtcaatgcctgaggaattaaagccaatcaagagaagattcaagccctcctggatatgaagtcgtcaactaaaaccaaggaagtgcaaagtttgacttgtcggatcaccgcactcagcagatttgtttcaaaatcaactgacaagtgtgtcccattcttcaatatcctgtgagtaaacaagcaattcgagtggacggaggaatgtgaaaagctttccaagagctaaaagaaaaacttgcaaaacctcctgtactctcaaaacctctagacgaagaagaacttggaatatacttagttgtcacagagcatgctgtgaaggctgtgctaatcagagaag

SEQ ID NO: 334687 - DNA, 1210 bp, Cannabis indica
ttgagtttccaacatagttctcagctctttgaatttgctcaatgactcatttttatttttcagtatgaaaatccaaacatatcttgaaaaatcatcaatgaaaatcagaaaatacctagcccctcctctggattttgttcttgatggcccccacagatctgagtgtagataatcaacaattcccttggttgtgtgcttcccagtgccaaacttgactttggtagctttcccaagaatgcattgttcacacagttccattggttgtatctggtccttgccaaatactccaagtttgctcagaattttcaagccaccatagcttatgtgaccccaatctcctatgccagattagggttggttcctcaccctttggagccactgtattaacttgatctctgaatgtattaacctgcagcacatacatgccattcatcatagtagccctcgtgactaacattgatccctttgtcaccttcaatgagccattttcaaccttcactgagtacccatcatgatctaacatagccattgagatcagatttctctttatttctaggacatgtctcacatgttcaagcattgtaactccaccaccagtcatttgaagcttgacagatccaattctaacaattggatatgaatggttgtcacccaatttgacagagccactgttgatagtcttgtaatttatgaattgcttcttaccaagacaaatatgaaaagaacatccagaattgatgatccaatcagtatttgacttgtctttagaaattaccaacacactgacactatcatctccatcagataccacatctgcacttccattcttcttggagatgtaatctctcaggattggacagtctttcttcaaatgacttgtcttattacaaagaaaacatcttctcttgaacttggcattagtcttgcctttatttccactgctttgattcctgttctccttctttgaaccctttcctctgacaaagatcccttcaccaacattgtcttcttgttcatctgcctttctcttcatctccttttacattagagcactctgaacttcctctaatgtcaaagattctcaaccatacatcatggtgtcaacaaaatgctcatagctttcggttggaagagaattcaacacaacgatagcctggtcttcatcctccaccttgattccaatattctctaaatcaaggatcactttatt

SEQ ID NO: 334688 - DNA, 730 bp, Cannabis indica
ttctttctgggtcagctgagtaaattccttccttttcgcacttctgactgcttcattatagtgcgtcgcattgaacaactcctgaaacttttcccaggtcatagtggtaacatcacaagtcagggacaccatgtcccacaaaactagagcatcttcttgaaactagaatgtggcacaagccactctgtcattaccggtgacgccaatgaaattcaaaattctagtaaaaaccgttaggggtgactttcattacattgggacctcccaaaaagactggaggtgcctgcttgcggaacctttcatacagtggttccatatggttcactgcaacaacaggtcgtgcctgcacaacaggggcaggagctacctgcatttttggagcagggatcgcaggagcaccctgctgtctcaagcatatgatttgttcatcctgctcattaattctggcttgcatttctgcaaatcgattttcccattcctaggcagcctgcagcgggctaacatcatcctgaccacatgcccttcctctaaggcctctgcctcagccacgaacatctgggggaatctgaactccctgactgccactggatccgaccgagttaccctaactcttcgtgtttggcctggcgtccacactactagaacaaccttcgtaactaagagctgttgggttttatgccctaaataaaactctatttcaatgtaatctagattattcaatatcaataaa

SEQ ID NO: 334689 - DNA, 523 bp, Cannabis indica
catctttgttgatgtttaaggcatggcagattgtgttgtgatcaatcccagtcatatcaaaattgctccatgccaacacatcctaatttctcttgatagtatttatgatgctttctttcactgctagaagcaagtttcttcccaccaaaatagttttggtggggtactttaccttgatttttgcactctgacatgacgtaaaacgatggtgacacgtggaataaattttatgtacctgctcacaagagatatgccaaacagagcaccacatatattcgttcgtgagtcacagaagaaatccctataattttgggatcagatgacagagatatggcaagctgtctgaatcccttgattagtctatcaatattagttaggtttttgagccttaaataaaacccatttcaatataatcagatttaataattaataaagatcagaaaacgctttttatgttgcatggttcacaagatttatttaaggattatatttaatgtataaattctattaggtccagaacata

SEQ ID NO: 334690 - DNA, 712 bp, Cannabis indica
tctccattctactctctcttaagcttaattatcatgagtttgaatcctctattttgatcatgaaatttgtctcaactaacttttacttaatcttttcatttagatatacttatatagagcacatatatattatttatatatttctactattttaatgaacgattctcatgtatataattgttctcaactatttcttattttgatcataacatcgatctacatcattttactattagttatattatattggaaatctttcaaaaatattaattaaaaacattagagcatagcatttgataaatgataactttttatattaaggtaatcttctttgcaatgctataattttgttttaatttctatttcttattgtgatatattaaaatttaatggtatattaagaaaaaaaaaaacaaaaacaaaaaacaaaaaaaacttatggtctatgtttttatgcagaaattgatttcaagcaagtctctatgagtcaagacaataactacaagttttatgttggcaacagattcttctttttctttttcttatttttgaatgaaaattctcttctcttgtctcaatttatttatttattattattgaagtttggtgtattatttttattttttgatgtatcgtttttttttcttatttcatttttactatatttataattttttttaatattttggttatatatttatatttatattat

SEQ ID NO: 334691 - DNA, 730 bp, Cannabis indica
ttgactcaaattctctaaactcacaactcaaaccatcaataagagtatatatgtaccaaattcatactctcattgaacttcacttgaacacttgtcttcacattcttcaatctttcactgatgtcttctttcttcaaacaacttttaactgaaaattggagtcttcttcaccttgtcacattccttcgcactaactaaatgccttttgtgacttgactccaccttcacagctccacctaaaataatcttcccgactaatttatacaaatttttctctttcttacccttcacaactatcaagccacctttcttgatagttatttcaccatcttttgcggaatagacacgacctcgaatatccaaagctcccaaagagattaagctcctccttaatgttggaacatgtctcacatcagtcattgttctcacaataccatcaaacatcttcttcttaatggttcttattccaataactttagagttagaatcattacctatcaaaacagtacagccatcatatgccttataagtgtcaaagcactccttatacaggcatatgtggaacgaacaaccagaatccaaaatccaagagtcagaaaatttttcatcagctatgacaaagagaacatcagagtcactttcaaagccttcaccagcaacatttgtggaatctgatgtgtctttgcattcttgattcctcattgcttcaagatgcttggtcaactcttca

SEQ ID NO: 334692 - DNA, 493 bp, Cannabis indica
taatttttttttaaataaattgaaatctgatccgacccagaaaaaaattaggcggggcggagcggatctaatccaagatccaataagtattcgaatgtttcggattagaggtgatccgtcgggtcggagctccaatccgctccaactaaatggatctttttgacatgcctattgatttaggtacctattctcatctactctaaaaatatctctagttctaaatgtgagataattatttagaaaattgtgaaacgaattagaacttagatctccagtaacttgtcttattcaaggcatgcaacagaataaattgtctccttccgttcagatctctaacatttaattcctgtttatagcagagtatactcaagatctgaacatgtatcttctccttctttgattgtgttcatcacagtcttccacaaaggcttgagtatcaacttgaatagtgtgagctgataccaaagtcacctttagaacatattttgagaga

SEQ ID NO: 334693 - DNA, 932 bp, Cannabis indica
taacaccctaaatatgaatttactaataccataaaataaacacatataaagcttagaaaaccttacattgatgccaggggaataatgtgtctctattcgctcagatctctaacccttgttcctttctgtcgcagagtaataataaaatctaagcctggatctctttcaggtgttggattttttataattttccacactatgattgattatttgacttgatatgagtggacatggtactctatcactaaaggatcgaatttgatgaagaacaatagaaggggatttcaaaatacaaaggaaggagctctcatttactagttgtttgagaaagaatgaaaactaggttcaaatagatagatgacaatgagagccattttattctttttatagtatttcaactagggtttaagatttaaattttatggattaaaaaaaagatgaataatagcaaaataatgcttaagtggccggccataatagtgggcctcactagttaaatttttttctattttattcaaccatttatcttttctttcactactatcatattttataattttaatcctataaatgtaaaaactatttctttaataattataattaattatcaaataaattgtcatttattttatttattaattagaccttacaaagtctcttaattaacaaataaaccttaaatttattttcttcacaattaagcccttgcttagtgaaaatttataaacaagacatagtctaattttagaattataattaattaataaaaactaattaactaagtctacaagcagtattatctcaactaatgtggggaccatgggcctatataatcaagcttccaataagtggttctagaatttaccaagtaaattctctaacttattaatttcttctaactccactatagattcagaattgcactcttaact

SEQ ID NO: 334694 - DNA, 848 bp, Cannabis indica
aaagtatgatctgattggcactggtgtaaccatctcctttcaacacttttataaacctgtcaaaccaggctcgaggggattgcttgaggccgtagagagatttttttagttttcacccttttccctttgagaatcggtcctcaaatcctagaggaatgtccatgtatacttcttctacaaggtcgtcgttaagaaaaacattctttacatcaagttagaataaaggccattcgttgttgactgcaatagataagacaactcggatggtgtttaacctagtaacaggagcaaatgtctcttgataatcaatgccatatgattgggtgaatcctttagccactaatcgggctttgaatctttcaatgctcccatcaaccttatacttgaccaagaagatccatttacaaccaactggacgtttaccattaggcagatctgtgatgatctatgttttattcttttcaagtgtttttatttcctccattgtggcagcattccaattgggatcttatagagcatcctggaccgaatttggaatctgaacttgatccagagtggtgataaaagctttataggtaagagagaagcttgagtaactcaaatagttgtgaatgggatgttgagtgcaagagcaaacccctttcttgagagcaatgggaatgcttagatcttcagacacatcttccacaataggttcagcgtgagcatcttcctgtgtttgttcaagaatgaatggaatcagattatattcttgactttgctgagtgtgagtggtagcttgatcaatgtttgctagatttttctttttccttgagtaaactcggttttctgtgtttgggatgtggaca

SEQ ID NO: 334695 - DNA, 526 bp, Cannabis indica
tgggggattgacctaattggggcattacccactgggcgaggaggagctaagtatgtggtagtagcagtcgacttcttcactaaatggatggaggtcgagcccctcatttgcataacctgcaagaaattccttgactttgttgtcaagaaaattatctgcacgttctgaattcccatgaagatagtatttgataatagaacccaatttgatggtgacatgttcactaaattctactaaaggaataaaattattaaaagcttctcgttagtatccaggcctcaggaaaatggacaagtggaagccgtcaataagaccttaaaggatactataaagaagaagctagacgctgccaaaggcagttgggttgacaaggtacctcaagtgctctgggcccacaaaactactgagaagacagctactagacacactcctttctcgctagcatttggctaggaagcaatgctgcctattgaagtgagcatatcgactcatagaagagagtttataatcaagaagaaaaccagga

SEQ ID NO: 334696 - DNA, 756 bp, Cannabis indica
aaaaattaaaaaaaaaaaaacattatgtaccaaattaaaaaataataaactacatgtattacacttaatatcatttaattaaatttaattaaaaaaaactaattatacgtgtattgcacgtaacatcaaactagtaaaatatgagcattccactgctaaacaccttctataagtggcatcacacgattaattagcgatatttcttaaaaactattttttttttaatttatataacattcaatacttaattacaacattaacaatatggcattaagattcattttagcaattctcatataaaatttatgttgaataaattaactcttcacaatttatcaagtgatttttaatatatttatataacatctctttataatttatttttggctaattaagatttttgcccctgaattttgacatgtactaaatcatgtttcttgaattttttttgtagttaaaaattatctctaaactattgagattgttaaatttaaggacttttctctaatttcatttaatttaattaattcggtgattgtccatgaactaaatcatgtttttcagactttaatatctaccaaattatgccgctcgaactttcacatgtgataaattatgcctttgaactcttttcttacttaaattagacaaaagtctttaactccaataattttaaaggtaatttttaacagggaagttttttttatttttttttaatttacagtttgggtttctaaagtagttgcagcgctagtt

SEQ ID NO: 334697 - DNA, 930 bp, Cannabis indica
gtttgatgaatttcccttcaaccaacgatggattggatatatgaataatactcttatttttgtgtacaatatattattgattaattgtagctctattacaatcttaggtcggccttacttttaaggtaggttcggctacgactttaaaatatttaaatacatgaaatacttaaagcttgtttgctttcatttatataaatgataataagaaagaaaaacataaaaattttaaagtttgtttttgttttttttttaaaaacaatttttttttcatatataaagtttaaagtttgtttgctatatatataaacaaaatattttttattatttatatatttatcagaatagtgagagtgtatatttaatgagagaaagctagtgatttttttttcatacaaaattaatgagataaattaatgtttttttttctttattgttttgggaaaaaatattgccaagtaatagttgtaaattttcatagaaagttaacactgtgcaagactttagtgtaattaaattttggtgtaatttgaggtaattttttattttattttatctgaccatgtaattatttatacaaatatttttttataagtagtaaattttcatgaataattaatatttttattctctaattaattttttacactatcaagttgtgttccttataatatacaacttattaataatacacccctcagaatatattttttataataatgaatctttccatcacattttattaaattttattgtgaaataagtgaagtggtggatggtagtttaaatagatacaaattaaatatcatttactttttgtttttatacaataataaacaatagaataaaggggaattactttacatactattttttaacttttttttcttcaaatttatggtttgggttgctccggtggtttctatgtag

SEQ ID NO: 334698 - DNA, 941 bp, Cannabis indica
tataagtgccatgatcagtggtaatttttaagtctcaactgatagtgtcatttagtccccttacatacttttgtttccgggtaaatccgttggtaccaggtcaccagagaacttagacagacgatcaaattttagggtatactcagccactatcttcttcccttgggtcaacttcacaaaatcttccacatgtgaagttcttacatcaatgttattaaaaatttcttcaaacaaagtctaaaactcttcccaagacatggtactaacgtctcgagtctgacccacaatataccaccaaatgtgggcatgatcttgtaacatgaatgtagcacaattaactcattttgtccccgtcacccctatgttatctaggatgagggaaatagtgctcatccacaactcaacctttataaaatcagtacctcccagaaacgttggaggttgtagcttaacgaaacgttcgaacacagaatctcgatgtggcaaaataaatcctgggttacccaccactggaactggagctggtggtaacacttgttctgctagagttgccgatgctggttacctgaatcgacacaattcatcttcttgacgaagtataatgcttggcatttcaaggaacatttgctgctagtcgataggtggattagcattattaacccccacattatcccttgaatgcgtaggcggtgccagtggattgacttggtcattaccatgctctacgtgctctctctgtggtctagatgattgtggagggtccattttcacaaatagccatgaaattaacaaccccggcgagtcaagcaccaataccgcacttacgcacttattgccttaaccctaactcatacattctatttctcttattaaataaatatttatcaattaaaacactaatcatgcttttcatataaaattcatttctagatgctcatata

SEQ ID NO: 334699 - DNA, 508 bp, Cannabis indica
tacacattctgagggaaccatctttctttttcacaaacagaaccggagctccccaaggcgatacactgggtcggatccctatgtcaagcatcccctgaagttgtaacttaagctccttgagttctgctagagccatcctatatggatctttagaaacaggttcgactccaggtgctagatcaattacaaaatcaatttctcgttgtgacggcaatcccaacaactcctcgggaaacacatagagaaagtctcttaccaccctgactacctcaggcccaaatgtttcgggtctgctggagtcaatcaccactgctagaaatcctacacagccactgtgtagtaaatctctagccctcagtacagaaataactgggacccgagacccctgaactgatccaacataaacaaatggatcttcaccttctggctgaaaagtcaccattttccgcttacaatctatactggccgaatacttagacaaaaaatccatccccagtataatgtcaaa

SEQ ID NO: 334700 - DNA, 508 bp, Cannabis indica
atttttaaatgatatttaattattttgtacaattagatgaactaagtatgaagccttaaactagtcaataacaaaatttgtatatttatctatgagaacactttaaaaagaaagtgaccactttttatagagttcaaatactcctttgagaacactttaaaaagaaagtgaccactttttatagagttcaaatactcctttgaatatttgaaaattatccaccaactccatggctatcacaaaatattttattggatgtttatgaacactaataaaaagatcatacaaccaattagaacaagaaataagttgcaaaacaactccaaaatagagttgttatgtaactaatgacgacataccgtctgatgcacactataggcgcttttgtagattctgaaaaaagggaagaagtcgcgagctactttaaatatttaattcttcaatgagtgtagcgatttttttttcaagaaaatccttcaacttatttcactttttactttttaaatat

SEQ ID NO: 334701 - DNA, 781 bp, Cannabis indica
cctaaccatgatacacaaaaaaaataaaagttataaaagtaaaaatatgaaaacagggttttttatgtggttttacagttaaaattctgcatagtccacgagtcaatcttattcaggtttctgattgtttttcagggcctcttttgtatgagtttttttgtacccccttttttgatcttgtttgccactatttataattacatagtgtgcagttgattacaaagttgactacaatctgtttacaatgatcatcctctaaaatccgaggtttgattacatatcacgtagtttaaatgcgattatgatttgaaaatcatatagctgtgattttcccgcttttattgggtcaaaatgatcgtgtattaaacacgtctttaattgtagtatctggggatatctcgacagaagcttggttccagtgatctcaatagcgagctaaggccatttttccttccgaggtcgacaatgcatgtcttgtgacgatcacggttcttatttacaaagagctcttcgaagctcgtttgaatgctagcttctgactcattagggttgtaagcctcactgacgttaactggatgaagttacaggaagccttcccataacgagacgggcacctcgcttactgggtctcgagccgatccgactattacacttagtgtgtacattatatattaagggctttcgcagttgatatgtgtcactttcgtcttcctatgtgtactgtccttgatgcctcgctatacgctttcaatgagatatggtttctcgctaatatactaag

SEQ ID NO: 334702 - DNA, 884 bp, Cannabis indica
aaatgctttgtacaggtataggtgcccccaagtgaccgagcagacttttgattcttggtcacttgtttttcacaagtatgcttttttgtctgttcggggttttgggtacgaccagaccttttgtacgcactggatggtaaatttgtaatatgctaatgaactcgactcaatttgaatttaaataaacatctttattcatttattggtagaaaatatgtctgttaccgtagtaacttacattgaagccattatattgatttagtctgatctttagcttagcataaacaaaacaaattacaaaaaataaaaattgtactttcataagtggtcatccgacctgagtactttataatttaatctgaacctttggacgtggtccgcccagaaggccattcacttaagagtaaatgttcttttatttcgtacttgatatggtcatccgacctggtacttttattggtagtattttcttgaatgttcctcgttccaatacattggtactagaacgagttacattttttgtcatagttacccagtttgtatgctcccgattctagaacttcgaccacttgatatggtccttcccagtttggtccgagcacacctaccgtattgtctttggtgtttaaaaatactcttcttaggaccatatctcccacaaagaattttcgtgctctcacttgcttgttaaaatatcgagctactttttgttgatgggctatcaatttcaagtttgctgcggttcgttttcttcaacttcatcaagtgattttgcgaggagtgcatgattggcctcttggttatatgtcagtcttctgtgggtcggcagttcgagttctacgggcattgcttcatatccatatgtcatggcaaaaagagtctgt

SEQ ID NO: 334703 - DNA, 868 bp, Cannabis indica
tactcaatgtaaattatttatagaggatctttgattattaagattataacaaatggataatctcataccatatctatatcgtggaacatataaagtgctctatataattgagagtgcaattctaaatctatagtggtgcaaggaggaattaataagttagagaatttacttggtaaattcttgatctgcttattggaatctcggttatataggctcatggtccccatactaaagacaaactacttgtaagactcatttaattgattttaattaatcaattataattctaaaattagcttatgtctagtttatgaattttcactaagatatggcttgattgtgaaaaaaatatgattttagggtttatttattaattaagagactttgaggagtctaattaataaataatataaatgacaattttattttataattgattttaattattaaataaataattttggcatttatgggattagaatttcaaaaatggcctttgtgaaataatagataaatggttaagaaaaatggcaaaaatgtaactagtgatgggcccacttcatggccggccattaagtccctttttttgctattattttatcattttttattccatataattcaatcctaaccctaagtgaattagtataaaaagaaaagaatggtctcttaatccaactaatgaatctaaacctagttttcatattgtcagacaactagagagtttaagacttcttcttcttctttcttcttcttcaatttcgaattctatagtcttcttcacagacaaattcgagccttagtgattgatttcatgcccacccatagcaagttagtcctcaatcatagtgtgtaagactgtgaagaa

SEQ ID NO: 334704 - DNA, 499 bp, Cannabis indica
tactcatcaacaaaacgccctattttgctgatggcgttgtggtccgtcccgctcaaccacttgaaacctggctgagagaagtagaaataccccgacctgccctgcttgggagtagactttaggtcgaagaaccaagcgacctcgtggggtgaaggagcatcccatccctgggaagcgtagaggacaaagagagcggacaaatacttaatgcccttgggagtaatctgggctgggcagaggctgaagaagtctgccacatcccggaactacttatgcaagggcatcaacgccccttgctggccgtgagccctcgaccaggcgcacatccccttatcagggtttgtggcacgattgtcgttggcgggaatgtagtaatctacctcgcccaggtattcgtcctggtcgagagtacgaaggtgttcctccgaaatcttggacggaggacttacccacctagcgcccaaggcaccctgcctcctgtgaggaaccacctcagcaa

SEQ ID NO: 334705 - DNA, 825 bp, Cannabis indica
ggccgctgaagatatcatttcaccacgatctcaaccgttgcaatgtattttcctttcctatataatctcacacttctcattcaatttgatcacatctcttcaacatatttcctaaatagctatattttcttcaaaaatgtcttccattcgcggttcttcttactcagtagaggaagatgtgcacttgtgtcatgtctatgttgacatttctcaagatccaatcgtaggaagaaaccaatcaggtaataatttttgggcaagagttcaatcagagtaccacaaagatggaaaatttagtaataaacctcgcccagtaagatctttgcaaactcgaatgtctactattaatagtgcagttgcaaaattaaggggatgtatcaaccaaattgaaaataaaaatccaagtggtgcttcagcagaagacattgtaagtgtttgttattataatttatttattattactatcttatttttcaattttcattaacgttattacttaatttatattgcaacagttaattcaagcgaagatgttattagcccaagataaaaagtacgataaaggctttaaatttgatcatgtgtggcacatcctcaaaggtattcaaaagttttcaaatgatgaaaacatcaatgcaccacgtagattccaacacgaaggtcctagtttcacttcatcgaaatcatcatctcacaattttgagtctccaacatcggcatccactggtatgagttcatttgatctaaacatgaataatgaggaaatgaatacttatccaacagaaagaccatgtggtgtaaaaaaagcaaaggaaaaacaattag

SEQ ID NO: 334706 - DNA, 415 bp, Cannabis indica
aaattactcatttattttaatatgagttacttgattatatgtttatttaaatatatgttgatgtatacatattaatttatatttttttatgaattatggaactatataagatttttttttatgaaccagaaaattgtattgctcaaaaactgattttataaagaaaataaatctaagaaagacataaaatataatctttagaaaacaaattttaaaatagttaatccacaacaagcttattaaaataaatattttttaaaagtaaaatactaaaaaaatatatcttctaaagaatatgaaaaaataaaaaattactaattaaatgtactaaaaaataaattaaaataaccattaaatttagtttttttttttaaaaaaaaataataaaaaaaaagaagaagaagacaatagtgta

SEQ ID NO: 334707 - DNA, 511 bp, Cannabis indica
aattagggttattaatctctataagtgttattttgagcatgcaataatctgttatatgagagactatttagtatgcaagttagggttattatcctaagattttatatgttatagtgtatatggaatgtatgtatatatatcatgagttatgtatataagacataacttggttggacctggtatatattattaggataaaccactggaagaacgtaatgtatggattacgtaaatatatatgaatagggttatgcgagcaaggcataaccaggttagactcggtaattataactgagataaaccttactaagtccttattgtaaatagacgtgtgagcgtaacacgtaggtctatgccatatagacatatatagacgtgtgagaaaaacacgtagatctacgccacgtagacataaataggcgtgtgagcttaacatgcatgtctgtgatatacatgcatatgagattggcattattgtttatataatatgataaacatgttattgatgttt

SEQ ID NO: 334708 - DNA, 1100 bp, Cannabis indica
cttaagaaaaggaagataaataatagaattgtttcctttgttaataaggaaggaaagcaaatggattgtttccctgaggtggtggaccatttttttaaagcatttaaaaggtttatggggagtttgagtattgcccagtctttgcttaatcgagagtgtatggacagggggagaaagctttctttagaccagcaagttgggcttttaaagccctttaccagaaaagaaataaagaaagcttttttcagcatcctcaatactaagtctccaggtcctgatggctatggttcaggtttctacagggagttatggccagaaattggaggggaaatatgcacagacgtgttgcaattctttaagaatggtaagtctcctgctggtcttcatgaaactaaaattttattagtgccaaaaatagactgtccttctcgtgtgatagactatcgtccaattgcctaatgtaccaccatctataagggtatctctaagcttttatgcatgcagttagctactgtgttgtcgtggttgttgaccaaaatcaaggggctttcaacaagtcgttccattgctcataatataatgattcttcaggatcttatcaaaaactatggaaggaaatctatcacccctcggtgtgctatcaaagttgacttgagtaaagcttatgatacagttgattgggggttcttggaagacattcaggaagctctttgttttctgactaagttcattggctggatcatgaactgtttgagaagcacaagctaccttttgatgattaatggcaggattcaaggaaagtttttgggaaagaaaggtgttcgccaagaagatccagtatcacctctcttgtttttcctagtaatggagtatctcaccagaagacttcatcttgcggctttagacaacaagtttagctatcactcgatgtgtagaagccttaagataatttccctctattttgtagatgatcttattatcttttgcaaaggagatgctcagtccacccaaattattaaatctgttcttgatgattttagtgcttcttcaagtctgaaagcaaatcttgaaaaatcacaagtgttctttggaggtgtttt

SEQ ID NO: 334709 - DNA, 504 bp, Cannabis indica
aagaaaaaaaaaacaaaaaaacctatctcaacctactctttatgatgatattttttattattaaaaataaaatatcattttaatttcttttgtatttaattaacccaaaagcattttttttaggatattcaaagagcaactaaatgatttaaacaaaatttattgtaccaactggtttcaaacgttattagaaactaaacaatatagtagctctccgcgcggttaacttaatctttttttatattataataaataattacttaaaaatataatcctaatagtaaaattataaatatattatcttatttcatattattattaatgattttatttattagaaactaaatgtataactttattaataattatttagaattatttattaagaagttcaaaatttctatattacgtttagtattttaaattgcttcatgaaaaaaattatttttataaaaataaataaatagagtggtgtagaaaaaaattacgctgtttcccataatg

SEQ ID NO: 334710 - DNA, 650 bp, Cannabis indica
catagggatataactcatttttttggaactaatcaattcccgaaagagctccatagaacgactctctctcttatcccaaagattgatagtccttctaaagctattgattatcgtcctattgcgtgctgcactacattatacaagtgtgtttctaaactgatttgttcccggcttgcaaatgtgcttcctgctttagtgagtcaaaaccagggagcttttgtgaagggtcgatccattgcctacaacattctaattcttcaggacatattgaagatgcacaatcaaaattgatatcagtaaagcttatgatacggttaattgggattttcttgaaaagcttttggtggcctattgttttcctgccaagtttgttaactagatcatgaattgtgtgagaaatacttcctattctttactgctaaacggtataatctagggtcttttaagggagagcaggggcttagacaaggggatcccatctctccccttctctttgttctagtcatggagtatctttctcgtaggatccaacaagcatccagggaaaaggatttcaggtaccatcccttatgcaaaaaaaatgaaactaactaatctttgtttcgcagatgatttagtcatcttcgataaagggaatgagggctctttaa

SEQ ID NO: 334711 - DNA, 560 bp, Cannabis indica
taccaaagattggtaaacaaatttttaaagaccaaatcgggagaaatatggacatgtacgtggatgacatgcttgtcaaatccagaaaggctggagggcacatagatgacctggacgaatgcttcaaagtcctcagaaaatacagcatgaaattaaatgccttaaagtgctcctttggaattgaagccaattatgaaaaaattcaagagctcctggatatgaactcgccaacaaaaaccaaagaagtgcaacgcttaagtggtcgaatcgtcgcactcagcagattcgtgtcaaaatcaacggacaaatgtgttccattcttcaacatcctgcgaggaaacaaacagttcgagtggacagaagaatgtgaaagagcttttcaagagctaaaggcacaacttgcaaaacctctcgtactttctaaacctctagacagtgaggagcttggaataaacctagatgtcatggaacatgtcatgagtgtcgtgttgatcagagaagagaacagcgtacagcacccagtctattacattaataagagactcatcgaggccgagggc

SEQ ID NO: 334712 - DNA, 539 bp, Cannabis indica
tggaactcgggcctggacacggtggcgtgtacccagaccagaactgagaccctgacctggacctaaatctgggaccggatccccaacacagactgggacctagatagggactccggatacgaacctggactcggaccgagatccgtatccagacccaaacttggacccgcactcgggaccccaacattgacctggacccgaacctagacccaaaaccggggccagacttggacacaaacctagacacagacccaaagctagacccggacacggacccaaactcgaaccctaaccaagattagaaccaaagtgttagacccagatctgaatccagactcagatctggattggaacttgggactcggaccgaaccttgaccaagaccgaggacgcgaatccacacccggaggctgatctgaacatagagtgaaatacagacccgaacccaaactcaggccaggactcgaaccaaaactcagacccgaactcaagcccaaagatgaactcagaatcgcaaatggaactagaaccgaactagg

SEQ ID NO: 334713 - DNA, 671 bp, Cannabis indica
atgagactatacagttgaagagggcttaaatggattgattggtactacctatatcaacaaggtgcatttgttttctggtagtccatgacgaaaatatttcatggttaagcgtgcttgacttggggtaatttcatgatgagtgaccccctaggaagttttcccaggaagcgtgtgagtgacgacaaagcacgctaaaaacacatgttggtttgtagggtcagtcatcagtctatgaagcaaccggagtgagatactcgtatataagagccatcattccgtggatgtaaggacccaatggaggcttaaagtgggaacgttacaaaatatatatattatactcaaaatttggctcaaaaagtgacacgtgtcaatcttgtagaacatgaaccaaaataaatataatgataattatgtcattaaatgcaaaatggaagaactcattaaatatggaattaatagagtatattcgtaacttgttgactgtatagtattaagcaagatagggatatacaaactatcaattcatgtattgaggagaaaccatcttgcctcggaaggcataatctcgagacaatatatagcaaggcatctatctcgctacatataagaaagtatcgacgaggcgaattggctattgaaatacttagcgtataacccacgttataataact

SEQ ID NO: 334714 - DNA, 1174 bp, Cannabis indica
tctcttattttagtccttgtattattttacaatagagttgtaataaatcttgattttcttccattgttataaaatctctaacacatactaaacgaaggagtaaagactacacaaattaacattttattttttttgggaagaaacaaacatttcaataatgtagatgtttttgtttctacttttttttcatcattttcgttgggaaacttgtgctttaaataatttaatacgtaataataagtgtgaaacctacgatctaactcacacatgtctgttaatttattatgtatatggataagtaatttatgtgtattcattgttttaataatgttaattgagtagttaaaataatagtttaagggctcgtttggtacatcgtattgtaatttactgtattagtattatttaatacaatactgtttggtcttgatttgtattaatagattgtgtaaggttataatatatatattttcaaaaaactcgacccaaacaccgactacgggtcgggtctagggtctaagtccgagtctcgagtttgggtctaggtctgggtttcggtcccagcccaggtctattttctggtccgggtcccagtctaggttctgggtcctgagtctcgagttcgggtccaggtctgggtccgagtctgggtcttgggtccaaggtctcaggtctcgggtttgggttcgggtcccaggtttgggtctgggtttgggttcgggtccgagtcccaggtctgggtctgggtttgggttcgggtccgggtcccaagtttgggttcgggtctgagtctgggatccaggtctagggtctggtttcgggtctgagtttggggttcgggtctgggtctgggttggggtcccgggtcggggtttgggtccaagtctcttgtcccaagtctgggtccgggtttgggtctgggttcgggtttgggttcggggtccgtgttcgggtccgggtctcgggtccgggtcttgggtccaggtccaagtctcgggtcccagtccaagtctcgggtttaggtttgggtctcgagtttgggtccgagtccaggttcgggtcccgagtctgagtccgggttcgggttcgggtctcgggtcttgggttcgggtccaggtcctgagtccgggtcggggtcagggtctcgggtcttggcatcctgtgtttaagtcta

SEQ ID NO: 334715 - DNA, 649 bp, Cannabis indica
gccactgtagaacttttgataataccatggttcgcacactaatcggtgaaggatttactgtcaaattgcttgccattatctgtaactattttatacggcaatccgaaatgacagattatgttcttcacaataaagtcttgaactttctttgatgtaatagttgcgagtggttcgacttctgtccacttagtgaaaaaatcaacctctaccactgcatactgcactcctcctttgcctttgggtaattgtccgatcaggtcaattccccaaatggcaaagggccatggactttgcatctgagttcacctgttgggcaaagctcgaggtatctttataaatctatggcctttctcacatttcttaacataggcctttgaatcttcaatcattgttggccagaaataaccttgcctttgaattttcttagataaactctgcccgacagcatgatttccacagaatccgtcatgcacctcagataggagtcgtgtagcttcttcttaagtaacacatctgagcaacggcatagagaatcctcttctgtacataattccctttactatgatataccgtatagccttccttctcatcttttgagcttcattccaattatctgggagttccccagtgttgaggtaggtggctatcg

SEQ ID NO: 334716 - DNA, 522 bp, Cannabis indica
tcatcgttgggtgaccccccggggtccaacttgagggggtgacaactgtcatcgtttggtgatcccacacgacccaacttgaggggagtgacaaccgtcatcgttgggtgactccccgagacctaacttgaggggggtgacaaccgtcatcgttgggtgaccccccaagacccaacttgagggggtgacaattgtcatctcggggtgaccccccaagaccccttgtccgttgtcagtagttatggtgtaatgtggatgtccccatatacctttaagaatgtcattatatctatggtaaaatacataacttgtaccatgagggtgtagggggtgggggtatacccctagactaacccttcatggttgacagtcatcccaacggtcataactttacgtattcttcattaatttagtcctgatatttttgtgtcatgtgttgctactcttgacacgtcatcgtcgtaaaaattcaggtaaacaatatgcatgcttacatgtttagcgtacatgttttatagttgc

SEQ ID NO: 334717 - DNA, 1472 bp, Cannabis indica
cttcatgcatagcgaggttgatgtctcgcctcgcaatactggtgtcgtatggtttctcgttaacgtacgagccaacaatttgtatatttttatcttgcgtaagaccttacagtcagcaagttgtaaatatactctgtcagttccgtatttaatgagttattccattttaaaatataaatatcattacatttgttgatttgtattctcccagtttgacacgtgtcctcctctgaagtgctagtcgaattttgggtataatagatattttgatggttaagatattgttaattttattcaaaataaataaaattaaatatcatatgtttcaaaattttatggttagaaaaccctaaaatatctatccaaaccaaaattaacaacttttaaaaaatttcatattattttaacaaaaaataaatttttaagataaatttctaataagataaaagtcaaaactaacatttttctaaacttataatttaaattaataaaataaattttaaaaaataacaaattttgaaaatttgatatggttagaaatttgaaattccatctagattatctttaagtttattaatattttaatctcaaaataagatcattttaaattctattaataaaataagtaatatctgatcttataattaaaattaataaaataatcaaaaaaaaaaataaaatttttttttttaaaaaaaaaaaaaacataaaggctagtttgtggaaaaaataaatttttaaattcaaaggctactaatatctaaaactaatttaaattaattaaaaaattaataaaaattaattttattctgataattagattttatttaaaaatttaaattctaccaaaatttgaatttcttttcatcgaaaaatgatttttgaaagttaaaatatcacaaaataagtttggcccaaggagtatgcatactccttgcgcgcgcgttagggggtggatgtgtgtgggaaaggctgcactgcagtctacttgaccaagggagctcggcgtggggcggcttcggacaaaaccttgtccgagtaacctcagtcacgagctgtttgaagctcgatcatgaccgaggttctcccaagcttccgcgcgtgcacgtgtgcaacaggttgagatattttcattcaaatttcaaaagaatcataactaattcaataaaaatccaaattaagttttgtaaaagcctaaattcattaatttcatctactttctaaaaaaaatactttcaagatgaaactaaaattattcttaatcgtaaaatcgtaattaatatacatttatcaaataagcacataaaccaacatgaacacatccaaatcatcacaaatattgttttaagtccatatttcatgaaggtaaatcattaccatggctctaagaccagttgttggtaattattttactaggatctagatttactaccatgtatattgtttaacatcctaaatatgaaatttctaaa

SEQ ID NO: 334718 - DNA, 1043 bp, Cannabis indica
gaagtatcaatcattttgatctcctccgtgctactgatgctcggttcttcgaggaactggataggaaccaagttagccttatcacttacattactacttgccaatcgagctaacgcgtttgcagttgtattttcttcccttggaatttgtctgagaccgtagcttttgaactgtgcgagcaggtcatgtatttttcttagatatgctatcattttttctccccgagcttcgtattctccagatacatgatttaccaccagttgtgaatcactgcagatttcaatgtgctcggctctcatctcttgggctaactttaggccagcgattagagcttcatacttggcttcgttattagatgctttgaatccaaacttgactggagcatgcatgtgttgcccccaagcgtgacaagggaaattcctgcaccagatagctgatttgtagttgacccgttactgtttccaagtcggcttatcttcattgttatttggctgaggtgtttgtaccgcctcggggttgctttctggtaagctttcttctttgcctgtgcattctaccacaaagtccgctaaggcctggcctttgattgctgttcggggttggaaagtaatctcgtactgacccaactccaccgcccacttgagtagccgtccagaggcatccgacttttgcaatatttggcgtaatggttggtcagtgtacaccggaacaagatgagcttgaaaatagggccttaaatttcttgttgctagaataaggcagtaagcgagtttctctatcaatgggtatcggctttcagcctcaatgagtcttttactgatgtaatacactgagtgttgtatgtttttctcttttctgattagcacgacactcacagcgtgctccgtgacagctaagcatattccaagttcttctccgtctagaggttttaagagtacggaaggttttgcgagttgtgcttttagctcttgaaaagctttttcacattcttccgtccactcaaattgcttgtttcctcgaaggatattaaagaatgggacaca

SEQ ID NO: 334719 - DNA, 457 bp, Cannabis indica
ttacctcagttatcactcaatcctccacttagaaaaagctcttgaattctgctaaaatgaagaacctagcagctgaaccctaagttctagcttggttcgaagagagagaaagggaaacagggatgaatttttgtttttctttgattttcttaatttccttctaaaagattaatcccaacatcaatacttatctggataaaagagagttaacttaaataatactcttagagtttaataaaaactccagaattgagaaatttcaactctaatgcccatttctaataatgagagcataacataataaaatcatgcataattataaaatgtaattaattaatactaattgtctttactaatccatattctaatcatgtagtcattatagctgacctctctgttgcggcgatccaactgttcttggtgggatcgaagaatgtactctcggtcatccatccac

SEQ ID NO: 334720 - DNA, 1065 bp, Cannabis indica
aaagtgcaggcattaaaaaagcaaagttggtcgtctaacctttcaaatatgtctttacaaaaaaaagccactaggggaaaaactattgtctcggccaaagggtcatttcctaaaagaaaaaaaggagataaataaaccaagtctacatgctgggagatttggacagaatttcttctccttccttaacttcgtcgtcgtcttcttcgatcttggttttctcgcagagagctaaagtctcctcttccttctactctaagaagtcggtatccatgttaggggtccaaagccaggcgcagtatacaacgcaaaaatcaactttatcgcatcgttctacggtctcgatttctttcttggcaagtttcttagcaagcttctcctcaaactcatcagcttggactttgagggccttcttggcctcctcttttgccttctcggcttccttctttgttgtctctgtttcctctttcgctttctcagcttcctacttgaggcgagtaatctcctgttaggcgttgtctcgttactcacacacatccttgcattgggatattaatttgtgagtcttgcccttcaaatactcaagccgctcagagagtagtcgattggaaacaaaagaagcaaaggaagcctggagaattgcaaacagatgagtataaaagaggtataaaaagacagtataattatattaacaaagccgacataccatgaagtgacaatccaaggtcctggaaagcatctcctctagattcctaagattgagaaaatcccaatctgggggaaggagagtttgaagtttgcgccaacaagtgacctcgtatgcctaggaaaactcagagccagcttctctagctacgatcgacagggtctcgatggcctaacttggagaatcggtagcgggagtcacctcgagatgaggggcattgacctgaggaacaaatggaggaggaacttgctcttgaatctcgttgtccgaaacctcgatatcaataggctcggccggtaacttcttcttttgagtggtggttttcctttgcttcttgggaggaaccacctcggtggcaatgg

SEQ ID NO: 334721 - DNA, 779 bp, Cannabis indica
ttttcagctggacttttcttgtatgaaaacttcttataagagaagcaattctcttattgaaagtttatttttaaaggaaactttgactcttcctattttccttattaaattcgattgtgtcttgatacaatcagatcatacacactgtttatggcaggtatcaagacccaatacaagatcagactcgtttttggcaagtttccttttttggtttgatttgttgcgtcagaatctgcttttgatgctggaaattaagtttttcttaggaaagttttatacagctgtagatttgactttgtagctgtctctagggtttctatgttctataaatagaacctagagagcagtcattcgaatcagctcttctagtcttcatttttgtattttgcttatttgtgagaagagagttctttttgtgagaacctagttattcatctaggctctagtgtttctcatatatgttcttcctctgccttagagtttgttagaacgacttgattgaacaagagagtggtctttgggagaagacttgttcaagccttacttcgagaggaagtaagcactcacactttaaagatgaagggagtttgctatttgaaggtgtttcagaagtcagattcataaagtgcattacaaaggattccggtaataatttagagggagtttaaacttgtataagtcaattgtctttgtaatcgttgatacttgattaattgatttcattctctgggtgtggtcccgtggactagaagtgttcgaaagaacactgataccacgta

SEQ ID NO: 334722 - DNA, 843 bp, Cannabis indica
atcaattatttatttatttccttaaatagaaatttatttctttaaataaaaatatatttctttaaataaaaatattcttatatctgtatgttgattgttctagacaagtttaatttatttatataaaaaatttattgagattatattttaattttagtaattaatttataatactgacttatttgtttttttataaatgattaattataacaaatccctccttttgtttgtgttttacccaaaatttggctatgtactagaagctgacacgtgcccaacaaaaagaatttaaaccaactcaaataatataattatgacgttgtatcattaaatgaaatttaaataactcgttctaattaaatacaaggttgatagaaatgttcaaattcgctgactgcttagtcttatgaaagacaagaataataattattaaactggtattgacgagacaaatgtctacctagggataaacttagttaaatatgtaagaagaggatattctcctgcacgagcagaataagagtagcaacattcaattgcctcgcgttactcatattgtagaaatcatctcgcatcactaatataaataaaagagatatagcgagatgaggtgcttctaacacttaacactttttcctattaagatggataagaagaactcacgattgacgagatgtaactctcctagtcagcataactgtctaaaggataaaaataaggaacggttgagtagttattagatattattccatgtgtgaataaatgaaacgtggggaatgtccccgtttcattaaccattgtaaatgaatcaatcccaaaaagaataactgccaacctatattc

SEQ ID NO: 334723 - DNA, 757 bp, Cannabis indica
aatgaaaataaatctgtttctttattgataattaaatagaaaagattacattgaaatagagttttatttagggcacaaagcccaacaaactctcacttgcactaacataaaactatcagtacatctcaattaattctaaatttagtgtgtgcttttcaaatgtagttacagtcaaaacattggtgaatggatcaactaagttgtcttctgtatccactttctccaccagtacatcccctcttccaacatattctctgatgatatgatattttctctctatgtgtttgcttcttttgtggctttgaggctctttactgttggctatagctccagtgttatcacaaagtaaaaccagtggtttttccattcaaggaacaacaccaagtcctgaaagaaactttctaaaacatactagttccttagcagcctcggcagcaactatgtattcggccttcatggtagagtctgacattgcggtttgtttagcagttctccaaacaactgctccacccccaagagtaaataccatcccagatgtagacttcctatcatcaagacaagcttggaaatttgagtcggtatagtctatgggatttaaagcaccacccttgtagattaacacataatgccttgtacttttcaagtacttcataatatgcttaattgcagtccaatgttcctcccctagatttgtctgatacctgctcacaattcctactgcatagcaaatgtcaggtctagtgcataacattgcata

SEQ ID NO: 334724 - DNA, 634 bp, Cannabis indica
ggataggcctaaaaatattggagggaatccaatgaacaccctaattgtatgatattgtggagattgtattatactataaattagtattgtttaataaacttgaggatggttctggacttggatcccatctttggccccgagccacaaacctagacttagatatttggggttcaagtttggtttcggggtccaaatctgggactggagcttaggggcaaggtcacgggttgggttagaggtgtggttagggtcgtaattgaggtccaggataaaagtctgtgtccaagtagaggattgggatcctgggctgggtccatgttcttgattctgaaacctttgtaaattttataatataagttgatatgggtatgtgttatgcattaaaacttatagtcgtaataattaaaacaatacaaaattttatcaaaacatagtgttccttgttatagtcaaagcctaccatttggttcgggtcacacgtacaacttgggaacatgatagtacaattgaacgggagcactaaacatagatatggaatctatagcttctatctggacatagaagtgaaacgatgatttccttcgggcttggcttaatagagataaatggaggagctcttatttcagtgattata

SEQ ID NO: 334725 - DNA, 597 bp, Cannabis indica
atttttagcctaatttttatttttttttttttttaatctcatataatttaaatctaacccttggataaatcctatataaggaataagagctctcattcttatccaacctaataatctagttttctaactttgtcaaacaactagaatttgagagtctccttctctcttttatttcatatttttcgagcctgtaatgaaagagtacatgccaacccatagcaagtcaagtactcaatcatagtgcgaaagactgtgaagaatccaacacttgaaggagaatcgggctcagatcttgataatactttgcgactgaatagaacaagggttagagatctgagtagaaggagacatattattctgctgccaccaatgtaaggttttctaaactttatatgtgtttaattctatttagagaattcatatttagggtgttaatcaacatacatgttggtaaatctagatactggtaaaataatcctcaacaattagtatgttgtaatcacgacacatggcgttcctctgagtagaacgttacaatatagaattatatttacagagttcttacttgtagtctattgatataatcaatataaatag

SEQ ID NO: 334726 - DNA, 816 bp, Cannabis indica
taaattgtcaatagttggattgtatcataattattttactttggtttgtggtaagattgattgaatatgatagaacttgcatgaattattttttgaggcgaaatccttgacaatgcttgtttagaaaatgatgaggcaattttttttggatcgtttgggcctttcaagcttacctttatctttattatccctagtttgcctatttgagcttagcctcttcaattgtttttagccactttatgagactaactttgaatccacttgtaattctctatccttgtcccttgcattataccataagcttagaaataagtttgggggagatgaattgtgtgtggatgaaattattatttaaagtgggagattgggacaatgtgtgaactgtaaaagtatttttcaacatcactaatgttatttatgttctgaaaaaaaatgatgattaaaaaaaatagaaaaaaaaaagtgttgaataaataaagtgatgttggaactaatagttgtaaaattctcaatcattgaaatttttgagcacaatttgaaatatgttgtaacgccctaaataattaggcacactacccaagatacttaagaaaccctaatcccctaaacggggttactgataaaatatgcgcgaaaattaaactttagtaacaaactgaatgaaaacaaacttgtaataatttaaactttataaactaaaagttacaaaagtcgggatcccaaaaatatttacaaaatactattacaagtttttttctattagccgaccttagcggcaaaacagagtctaaaaaaattacatcactggtagacccc

SEQ ID NO: 334727 - DNA, 755 bp, Cannabis indica
gggtgttaaggataggttcttctactagctagtagggccagcaaattcttagagaaccttccatgtccattgtgacattgaaatcccatacagtgcatacttttgcgtattttgatccatcctccatacttccgtgtccattccattgttccatataaccaagttgttgcatcaatggtcaaggcgatctcatagccgataaatctagtactttcgcatattgtgatcaatcatccatgctttgttaaggtgagcataaacaccttatgttgtgctcaacaactatcaacacctaaacgatttatatatccaaaactagtgggttttaaggataggtttcttccaccagctagtagggctagcgaattcttagagatccttgcatgtccattcagacaatgaaagccattacagtgcatacttttgcatattctgtgtccattccattgttccatataaccattacagtgcatacttccgtgtctattccattgttccatataaccaagttgttgcatcaatggtaatggtgaatcaatccatctttctaaaaagatttgaagacatccgtcaaatcctctttaataacttcccagctagtttgaaagactgtaatcctaaaaccatcaggacctagagccttactaccttcacaactaaagatcatacttttaacttaatcttcttcaaaaggcctttctagttgtccctccaagaaatcaaaaaattttaaccactcaattccttcaatactt

SEQ ID NO: 334728 - DNA, 642 bp, Cannabis indica
ctatactcaagaaaccgatccctcctgctgactttggcttacagatcttagcccaagcaatgtttcctgacccaaccatttgacttgtacctttccataagtaacttctacatatattatctatttcatgaactacctttgatagaagaagcaaaatttgactccagtaagtatgtatggtcataagaacagagctaatcagcacacttctccttgcaaaggacaagttccgagaactccatgttttaattcttccagtcatcttttcaacaagaatcttgcactttgttgctgaaattttcttggcacatatagggatgccaagatacttgaaaggtacctcttgcttagtgaaacccgagacattaactattctttgaatctctttctcctccatgccactataatagattgctgatttgctattattaggaagcaaacaagatgtctgagaaaatagcttcaaaccttgtagcatgagatgaatactgctaaaatcacccttacaaaataataatacgtcatctgcaaaaattaaatgtgttagcttttcatggttctgcatctttcatgatgaccaaatttcttcttctttcccactactcccattattctgctcaaatactccattccaagtacaaa

SEQ ID NO: 334729 - DNA, 1038 bp, Cannabis indica
tttattaatactaaaaaaatgaaactaatttttaatttgattgaaactaaatattaatgcatatctatctttcattttaagttatactaaagtcacaagatataagataaattttcttacaaattataaattattgtagcaaggaaagaatttatttactttattctctttttctcacctataaaagatagtacaaaattataaatggactacaaataaatctgagtaaaagaaataagccaaattaaaaacaaaattattttactccctcttctttatataaacaaattaaaattaagctcttctttatttatattttttatttccaagttgggtggtgaagttttgattcaggtaaacttttagtttttcattcagttcctcatatgtaatcaatataaaattgtttgcttctaatttatatatatatagttgagctattaatgcgtgtttttattattgtttcaattaatatatagataaaaaatggagactcaacacttctgtagcagaaatgatattatgctcctaaaagatgataacaagattagtaataatggttgtggattgtgtaaggtgttttttagtgatgctgatgatccttattattatgtttgtgatttgtgtaaatattacgtccacaaatcgtgtgaagagctaccaaagcatatcaatcaccattttcatcctcaccaccccctctttcgtcgatcacgttgcatagaaaattgccattcatgttgccaggtgcccaaaaagtgcatcgtgtttggttgtgatgaatgtggtttttacatggatgttgagtgtactcagatgtcatcaaattccataataacaacatattctaatgaaggccaatattgcattcaacattctagtcatcctcacttattacaacttgtcaacccatcatatgcagatgatatcaatgttagttgctttacatgtcatgaatcatcagatgatgatattgggggtttattatgggtgcattaggtgtaagtattgttagggtttataaaacacttaagaaat

SEQ ID NO: 334730 - DNA, 960 bp, Cannabis indica
ttattttaaaacagctttaatattataccatgcattatttcattaaaataaatcactaaaatctctttttttttttaaaaaaaaattattatattttatttattttaaatatataatattaatatatacacatatcatccatacaaaaataattatcaaaacttaaaattattaataaaatatgtttagtacactgaataatattttgtaaatgtaaagtataaatagtaaattttaaaaaaacttcaaaatgaagaagcaatttaaagcacctataacatgtttttataaaacttctttatataattttaaaaaaattgttgtgagtgctctaaatatgtattgtgtgtgattttggaggtcagaaaaagtgtatactaacttaatattaagtataatgcacaataaacttagttttatttaatttagctgttttttttattattatttgataaagaagatcatttttttatgaaaaaatatttaatttaatatttatttaaaaaacacaataacatttaaaatttattgttagttatataattaatttgaatttaaacataatatttttaattttataatactttccatttaattttttagaaatattattcacttttcttatttttttaaaaaaataataataaaaagatataattttagtaattgcaaaaaataagagtgttacatggtaatttttttaaaaaacataaatatttttttattttattatttataaaagaaaataatataatagagaaatatttttgtaataggtacaatgaatacaaaaaataataatagaacatatcataaaaaataatataaatataaatatataatgattattgatattcacatattgttattgtagagtacattattttaacatttatttcggtcggcaagactttatggttgttttcattggaatgacttgcctgtgatcatttgttttta

SEQ ID NO: 334731 - DNA, 1467 bp, Cannabis indica
gacttagttaattgattttagttaatcaactatagttctaaaattagaccatgtctagtttatgaattttcactaagttatggcttgattgtgaggaaataggattataggatttatttgttaattaagagactttgtgaagtctaattgatgaatattataagtgacaattttatttgataattaatttaattattaaataaatagttttggcatttataagattaaaattgcaaaatgtggtatttataaagaaatagataaattgttgagaaaaatggcaaaaatctaactagtgatgggcccacatgtggtcaaccattaggttgtaattttcctattattttatcattttttattccaaataaatcaatcctaaccctatgcgaactagtataaaaagaaaagaatggtctcaaagtttaactaatgactcttgacctagttttcttcttgtcaaacaactagagagtttgagacttcttcttcttcttttctcttctctaattcgaaatccttagtgttcttcataaaataaaatttagcctttagtgattgagtgcatgcccacccatagcaagttagtcctcaatcatagtgtgtaagagtgtgaagaatccaaacagctaaatgagttttgggcttagatcttggtgatactctatgatagaaaggatataagggtaagagatttgagcgaaattctgttgcaaccaatgtaaggtttctcatattttatatgtgtttatttttattgttttagaagttcttatttagggtgttataaatatacttgttagtaaatctaggtcctggtaaaatatattccaacagttgcttggtagcgtaggttgagatcatcatagttgactacccgggagtctttctgctttcgttcttcggtgaagtcactatgcaagccctcaataagtaggtcccttatgcggatgtcctcttagagggtgccgacgctttgggttagggcggacagagctgtattttggcaatgccccggcctcgagtttatccttttcttcctaagaaaggtaaagttcccctaggtcttgtttaatttctcctgaagtgagcacatagactcctcaatctctttctcagctaaagccttgtgggactcgtacagtttccagtacttggagtctatctctttctccaaaactgctagcttggcagcacattagtcctgggccttttggacatcaaagccgcctaggatttggttggctcaacttctgtgcgtaaggttcaacttttagttgtcagaaattgaaatttggtatgaagtttgctcaacttgatggttatatttcccataaaatagatagtcatacaaccttcaataattataagctttgccaagagaaaatattatttttgaaaggctaagacttactcctgccgcctattgtttggtggccaccgatagagtgttaggttttgtgccctaaa

SEQ ID NO: 334732 - DNA, 625 bp, Cannabis indica
aaaaaatccctcctaaccaaaaataaaatttttctctatggctgacaacggggaaaatgataataatcaacctgaagagactactcatcgtcttggaaaagagcttgcgagctcacgaaggccttccaatttgtcgacaacacgatctacacagtcaacacgtttgaggagaagccaacgtaaaggtgaccaaaaggagcaaagcacatagtggtggcggttggcttctttacaaagtggacagaggctgaacctctggtttccataattgcaaaaaagttctcaactttgtcgtgaagaacataatttgtaggtttggaataccattaagatagtatctgatagcggaactcagttcgatggtgaattattcactgagttttgcgagaggaacaagattattaagagcttctcgtcagtatccaggtctcaagcgaagcagtagaagctgttgataaaaccttaaaggatactatcaaatagaagttggacgcttccaaagttagatgggtcaatgaactaccacaagtactttgggctcacagaacaactgagaaaacaacaacatggctgttggaatttattttaccaggatcttagatctactcacaagtatgttatttaa

SEQ ID NO: 334733 - DNA, 443 bp, Cannabis indica
tagtataggccacggtttaaaattatggccaatagtataggccacggtttaaaaccgtcgcctatgttcactataggtgacggttttaaaccgtgtcctatattattttctcgacagtttaaaactgtcgtctattctacccagtatccgcgacgctcgtataggcgacggttttatggactgtcgagaattctttggcagacattgtaaaaccgacgggaattcgaggttttttagtagtgtaatgaccatgtcgattacatgagtattaaggtgttggaatttattttacaaggatcttagatctactcacaattatgtttattaagaccctaaatatgaactttctaaaacgatgaaataaacacatataaagttaggaaaccttacattgggtgcagcggaataatatgactccttccgttaagatatctagcccttga

SEQ ID NO: 334734 - DNA, 752 bp, Cannabis indica
gccatcatcctcctgcttgagctcttcaggagttagaattgggaatttgcccttgttctttctagtagacatatttagaacttaagaataagagaaatttacctttaatttttaagtgtaagagagaagtagaagacaagagcacttatgaattaaaagggatttgcttttatagagcagtatacatgttgggaatgtaggaaaaattaatggccattaaatgtgtaactgtacaggtgcaacgcatgaagtgtgtatttgtcgacagaatatcgatactacgtcgataatttgtcgacaacatgcaaaacaaataaaacgggatacatatttttcgatacgatgtcgacattatgtcgatagcttattgataatacacgtgtctgacatgcaatgtggcggttgggaagagttgttgggaacgtaggtaaaatttattaacattaaatgtgtaaccgtacaaatgaaacgcatgcaatgtgtatttgtcgagtgaatatcgatacaatgtcgatggcttgtcgatagttgaatggattaattaccattgtacacgtgtctgaaatgcgaattgcattgtggagtctaagtcgatagtagtcgatgatgtgtcgattatatatcgatgatgactcccaccctcatttttgataatgttatcgacataatgtcgattatttgtcgatcgaaactggcacactttctgttgttgtttttatcgacataatgtcgatggatatcgatgggatgtc

SEQ ID NO: 334735 - DNA, 777 bp, Cannabis indica
ctcgcactatagccgcactaattccatctttcgagatagccagatagaggagtaacatttctccagttattggttttgccaaaagtggaggcgtcactaggttcctttttatgttctgaagggcctcttcgcactcctctatccacttaaatttcttgttgcctcacaatatattgaagaatggcaaacccttattagttgactttgaaatgaatctgttgagtgcaaccatctttctcgtcaaggcttgtacttccttaggctttgttagtgatggcatgtctatcaatgccttgatttttctagggtttgcttcgatacccctcgcgttgactatgaatcccaaaaatattcctgaggaaactccaaaggaacattgttttgggtttagcttcatgttatacttctttaatattatgaagcattccgcaaggtctgtggtatgatttccaatttttactgtctttactaacatatcatcgacgtaaacctccatgttttatccgatctagtttgcaaacatctcgttcaccaatcgctgatatgttgccccagcgttcttcaacccaaatagcatgactttgtagcaatagagtcccatgttggttacgaagctcgtatgttcctaatttgggacatgcattataatctggttatatctagaatatgcatccataaatgacataagcttgtgcccagcagttgcatccactaactggtccatcctgggtagtgggaaatagtcttttgggcacgccttatttagatcaaaaaaat

SEQ ID NO: 334736 - DNA, 782 bp, Cannabis indica
gttagcctcgctcaaaaggaaattgcatgatcgaagaccgtagggaaagataacaagcacctgtgcctactaaccatctcggggataggagtaggcctcgtcaagagagctgtcaaaacagacaaaacattggtcataaacttgaaaaacaaagattgatgtaaatgagcaagaagagaacaatcacttacgaagtttacgaaacgtggttgtgccgatgggggaaagaccagacgtctagaagaaattgttcttgaaggatactttatttggcaagtctacaataattttaggctcgctaggatgagtgtcgagatagaaaaagccccctgcggcgttcttccttgacggaacgaccttaactgagtaaagatactcaatctctactggtttaggacacccccagttcagaattttgtataagactttcaaactagcgaggatcctgtaggagatcggattcaactggaatggggcaactccaatgtgatttatgtagtcttgaagtagtctcgaagaggaagcgtggcccctgcactgatatgttcaaggctccaagcgcccgtaccagtcgaaccgctggtactagtctcaccactggtccccgggttactgcttgcaaaatgcacagggggtgacaactgaactcacgctcccttaccgatcaaacttggcatgattgcccaagttcgatctcgtaggtcttcagcatctcacccgtgtagcctgagatagaccgcaccttcaattctatcaactcagcctcaaaggtgacattgggg

SEQ ID NO: 334737 - DNA, 637 bp, Cannabis indica
acggactggttcaaccgcgttggccctgctcttgctccctttgcctccgaactgacgagccaatttgtttcccatctgacccaactcccagccaaaagatacgtagcctgcgcctctacgaacgctatttatcaggtttaggatattagcgctgccatgaccgcgatgagtttttgttatttgtttttctctttcgcatgtggcctaccttaacttgatcattcatacttaacttgttttcttttccagatcgctgtagagactggtcgcctctcaaagaccctgatagatcatggtacgtcatgtccgaatttgggggcatggacgaggccatgaagagtctgagagacttggcggccgagtggaaagcattccgggaggaggcccaacatagggaggcacaggcggaggagaggcaccgggaggagctgaaggttcagggcaaggttgtggccaaggccaagcgtgagctgagagaagccaaggaggctgtggaggagctgactgccaggctaaagtcaatggaggagctattggaattattttaccaggatctagatttactaaagggtatgttggattaacaaccgaatatgaattctaaaacaatgaaaataaacacatataaagttagaaa

SEQ ID NO: 334738 - DNA, 450 bp, Cannabis indica
caaagggcaggtccaaaaagaatttacgcatcaaaaaagatcatatgtataaatatacctgacccaaagggcaggtccaaaaaaaaaaaaacatgcatcgaaaaaaaaagatcatgtatataaaaatcctggccctaaggacaggtaaaaaaaaatatatacaaagagcccagggacaggctttagtcattgtctccccttagaaaataaggcagctattaagataaatattgtcttaaataaaagaaaaatatactaaaaaaaaaaaagaagaaagaataataagaaaaagcttgatgaagtgagctggattcaaacggcctaatcaatgcgaggaggaaagtgaggaccaatacgcgcctcgagcatggcgtcaagtttcttcttcttctctcgaaatttagcaatcatctcctcgggtttggggtagaagtcaagcttgatgctctg

SEQ ID NO: 334739 - DNA, 828 bp, Cannabis indica
ttcaaaatccaagtcacttggtttaaatgcaatcgtgacgttgggtaaaaacaaaggctttgccacaggaataaaggacacgctggatggttctggccaagctgcttcttacaagaatcggcgtttaccttcagagatttcttgcaagaaacgcctgtagcgactagcaatatcttcccgttggatctcactacgtgttctctaaccctagcattgttcaactctaatttggaggtgggttttgaagggttgggtttatacaggatggcagattctgtagggaactcaaactctaaaacttctggacgataaattcctgaaccagagtggcacatcgctgcaagcaagaaacagtcccaatccctggagacaattttatcaaaatcgaaggtaatgagttggagatcttaaaacaacctacatatttcctgaaccctagtatgaacctagatacagtttaaatcctaaaaactaccaaaacaagatgagatgacaacgatacaagcaaactaagtaacaaatccacacaatgtaactaacatgagaaagaagaaagcaacttactttttaaagttatggcttggggcaatgacttgttactccgtctacaaatcttcgaacgaagcaaggatcactttaagaggatgaagtcggaagaaactcgcagaaaaaaggtcaaggacagagatggcatgcaagtcctcagacaaacttgttggtgatccttgacaaagaagcttaagagttttttcagactttctaaaattgagaaaataatgcaaaggtggttccttttctcttactttatacccatgatagtggcttcgt

SEQ ID NO: 334740 - DNA, 845 bp, Cannabis indica
gattttgcttggcttggagcttgatacttggagattgtttgagtttagccttgaattgagatttgaggtaactttctttggtttaatctttggtttttaactgaatttaattgtaagaagagcatgaaaagggtgtggtgttcttgattatgcatgttgttgagtttgatatttgatcttggtaaattgggtgtgaataacatgaatttgttgtagattttaattgttgagttggtgctgagattttagggtattttctaggtttattttcatgtcctgaattcagcttttgtttgagtttgtttcttgaaaatacttgggtttgttggaatttaagctcaagttcaagagcttggattttatgagttaaagtcatgattttgtgttaaattgtgggacttatttttggtaaatttagaggcgtttttagagtttcattgagtttaaagtttgattgtaaactctgattttagttgtgtaaagcaagcttgagttcatggaactcaagcttggagctttaatggaactttttgatttttagtgaaattattgtgtttgagctgtggaatatgtttaatatgacatatgttgatgctctgaaaagtttggtggtgtgtggggaagatttgagtaggttatagggccttaaaaattgagattttttgtgttgttactgcccagacaataggaattccagttggttcagggctgttccaaccggaattccggttggactatatcggggaaaatgttgaattttgttttgaccataacttttgactcgggactctgttttgggagttctttatatcgttggaaagctcgttccgagctctatgtgaaat

SEQ ID NO: 334741 - DNA, 594 bp, Cannabis indica
accttgctattcctccagagcactttgatcaaggttatggtcttgttttgaagaactttttcctttctatcaaggatctaaactagttgttcttcgtaggaaaagtgtgactgtagttaaagggcttcgtaactcaagacatgagtcgagtctgaaacatattttctcaacattgaaatatgaaatacattatggacagccaatattgctggtggtaaggctagccgatacgctacctgtcagaccttctcgagtatttgaaatggcccaatgaacctagggttaagagttgcccctctttccaaagtgtctaatacccttcaccagagaaactcacagaaaaacgtgttcccccataaaatgtaatatctctgtgcttcggatcagcataacttttctgcctgctttgcgaagcaagcatacgagccttgatcttgtctatagcttcattggtctgtcgaactaattttggacccaattacttcctttctccagtttcatcccagtgaattggggaacgacatttcctaccatacaacatctcataaggagccatccttattgtactctcgtagctgttattgtaggagaatt

SEQ ID NO: 334742 - DNA, 1347 bp, Cannabis indica
tggattaatctgatacctactcattactcccttcaacagcaggtgtctggtctatggcatactaaatctatgtctttgttctcggtcccaatttttttgtccgtgtcccgggtccaagtcccccatccaattccgagtcctgggtttcggtccgagtctatgacatggtcggagttcaactcctggtccaagtttggatttgggttttgatctcggtatgggtcctaatctaggttcgagtcttggccatgtttcgggtccgagtcttgagttccgatatgcgtctgggtttgaggcccaagtctaggtccctaattcggttctggctcctaggtcccgatctgggtctatgtccgtgtttgggtcctattcccaattttgattttgattcaatgtctgggtttgggtttaggtccgggtcttgtttggggtctgtgtcctggtccgagtttgtgtttggctctgggtccaagtctatattccagattgggtctaggtttaggttaggtccgagtgcaggtccaggtctcggttagggtcagggtctcggtatggatctaggtcccgagtttcgatccaggtctgggtccaggggctaggtctgagttcggttctaggtgggtctaggtccttgtcatggtcttagtcttttttgaggatcctcgtctggcggttcttgttcaggttccaattttgggtcacgggtctaggtcaggggccaggtttgggtcctggcctgggttcgagtccttgtttgagttccagatctggatccctgtcacgtgtcccgatcttgttctagttcaagtcttggttcccaagtccaagtttggtttcgcgactgagattggggtgcggttctcgatcccgacccaagttttgtgtcccgagtttggttcaatgtttgggtcagatttcgggtccaggtttgggtcttgagtccaggtctgggtggggagccggggctggttcccagttcgagtctaggtcaaggttggagtcttggtcatggtccgactaaggttccgtgtcatggtctaggtctggttacggttccaagtccagatccaagtcttggttctagtcccattcccaggtcctggcctacttacagtttcggttccaattttaggtcacaaggtacaggtttgggtccagattttaatatggtggtgggtttcggtccgcgtctgggttcgggtccgaggcttgtcccagatctagacaccaactacgggttcggtccaagccaagccccggttccagatccgtatcccgatcacggatccccacctgattccattttgggtgccgggtcacgagctgggtcctaggttcaagtcaagg

SEQ ID NO: 334743 - DNA, 929 bp, Cannabis indica
tatatatatatatatctaagagattatttcatttacacaataacaaaaacaaacacaaatattatctaaaaaaaaataataatttcagaatattcacctatatatatgtatataattaaaaagaaaaaaaaacaacaaatacaatcttatataacattttacaaatcaaaatatatacacactatatagctacaaaaattcaaacaacaaaaatatatataaacacaaatacatatataaacaaaaaataatctatagtattctttttatactaaaacaccccatgggtgtaacaaaacactatgtcggctctaggaggaatttttatttttttccttaatcttatataatggagttatttaaaatcacctttaaattttctgatttgatctaagtgaggcctactgttttctaaacttaagccacggcattgggaaaagaaagaggtaagcaatcccatcccatcccagccttagaaggttgtagtcttttcggatttggctatatattattagtaaatggttaactgaacgcaaatggagacaccccacacccaccattgacatccctagaccagaggcatttttaataatgacatatattattttaacgtacagaaaatgagatattacctcacaactcgccgctggtggttggccgacgctatttcaggcggaggagagccggcagtggcagcaaaggacgtcgacgaccggagtggggaggcggaggggatgggttttcggattttgaagggagaggcggaggggatgggttttcggattttgaagggagaggcggaggggatgggttttctttagctgaaatgaaataggggatgagataaatgaaataggggatgagataaatgaaataggattttcagcattttttttttatattggagaagttgtaacgtccccgcttca

SEQ ID NO: 334744 - DNA, 961 bp, Cannabis indica
ctgttgtgtattgctgagatgggagagttgatggtgggggtcgggtccgagcaaatggaggaaaaaggggggtgcgactggggaaatcggagcaaggggcggagaatggagaggagcggctgttcgtggggtgcggtcgggtttggagaagagtgacggcggctgtggaggcgggttcgcctggggttgaggtcgaagagggttcggctgtggggtcgacggagcaatggagaagagagggttcggttttctaggcagaaggaagaatggtggtggtgatggaggttgaagggggtggtcggacggtggctggtcgaggaaggtgaaggtttttctgggttggggttcgaaggttgaaggtgaaagggctgggtgaaaggtcgggtagggtaaaaaaaaatatttgaaattaattttttttttttatgtaataataggatagattaaaataaatataatattaaaaaataataataataataatttctgttattgtttttttttttttgtatttttttttttttgataataatataaatatatatataagtaaaataggagtaatatgtaatagatggacctttcatctcgtaatgtgagtgatattacgcctgctgtagcaaaatttccacaaaagttcagcaaaaatcttgctgagtgctctttgaacatgtattacttttgctaaaattttgctagaaaaatgctgcagcaggcggaagttctccacatgaacgaaaattccttttgtgcttcacagaaatgctgcagcaaaagtccatcaaaaatttagcaaaatctctaaacttccaaatcacctccaaggctccaaattgtgttccaaaaccacctgaaacatcaaaccaagtgtaaaatccacccaaacacctaaaagaaaaatgaacaaaaaataaaataaaataaaaataaaggaaaatgaagaaatatatacttttttttt

SEQ ID NO: 334745 - DNA, 1045 bp, Cannabis indica
aagcatagggaacatcaagaagccaattacagtgatggatatgacagtggggaagtgtatgtggctgctactaatttgaaggatgattggatcctagattctggttgtacatttcatatgacaaacaacagagaattactatctggttatagagatgtcagaggaggaaaagtcatactaggtaataatcaaacatgtggaattgaaggcatagggacagtgagcttcaagatgtttgatggagtggtcagatcacttagaggtgtgaggtatgtgcctaacctagctagaaacttgatttcactaagtgtgcttgatgatttgcagattgaaagcaagatcaaagatggacaaatcaaactatgcaaaggatctatggtgattatgaaaggagtgaaggaagatggactttactacctatgtggggaacctataataagctgcaacaatgttgttccagcacctgaagatgacaaagctactctatggcataggaggctaggtcacatcagtgaaaaggggctgcaaatagtcaacaatcaaaaactacttggcaaagataaggtatctaaggtagatttctgtgaacattgtattctaggaaagcaccacagattaaaattcaatactggtatccataaatcaaaacatataatggaatatatacattctgatttatggggacctgagaaagttaatactcatggtggctgctcttatttcctatctattgttgatgatttttcaaggaaagtttgggtctatttgcttaaaaataagaatgatgcttttcaaaaatttgtgcattggaaaaccctaatggaaaatcaaactgataagaaaattaaggtgttgagaactgataatggcctagaattttgtaatgacttgtttaataattactgcaaggaacatggtatcatgagacacaagtctgttaggcacacaccccaacaaaatggagtggcagaaaggatgaatagaactttgctaaataagtctaggtgcatgttgtttagtgctggtctgtctaaaggtttttggg

SEQ ID NO: 334746 - DNA, 555 bp, Cannabis indica
atgattctctctcatcttttcttttggtgttcaaaccacttggattgtcagccgttgtcgagacggtacttactgtggcagtacttgtactgggttagtttcctgagctagtctttagcaacttcatctcatttcttgcttcctctttgtgcacaaacacttgcgctcttttgttaaattcataattatttatcacttgacgaccttgtaaatcgtcccacaacttgccttcaactattgaaaggtcggtcgtgatccctgcttgaagagcagtaagttaaatgctgtcattcaagtttctaactttagcaccggcagtattgaagcgaatcaagtaagccttaagtgactcgcctggttgctgttttatgttagttagggatgatgcttcaggtcgcctttctctagctgtttgaaattgtttcttaaaatctttggacagctgttcccaagaagttatcgaatggtgtttgaatttatcgaaccagctactcgctaccctagtcaacgaagttgggaataaaatgcaatgtagattattgttgggttttatgc

SEQ ID NO: 334747 - DNA, 1141 bp, Cannabis indica
cattttgggtgccgggtcacgagctgggtcctaggttcaagtcaaggtctagggtcgggtattgggtcccggtcctagtttcgctgcccaagtccctgtcctgattttaggtcaaggtcgcagtttttgtcgggtttttggtcccaatctaggtgcgggtttgggtcctagtcacgattcgggattgggtctagctctacgtttttaattaggtttgggttcgggtttcggtctttgtgctcgtcctagtcctagtccttgtccggttctagttccagttgcgattccgagttcgagtttgggttagagttcgggtcgtggttcgagttcgggtcgacgttcgagtgctggtccgagtttgggttcaggtccagatcgggctacggctatgggttagggtcctatgtctgggtccaagttcggatctgagtcccaggttttgatctcgatctaagtcagggtttagttccgggtctaggtcttgggttccgttcctggtctgggttcgagtatatgtcttggtgcaggtctaggtttgggtctcattttgggtttgggtctgagttcgaggcccgggttcgggtttgattttgtgttcaggtctaggttcaggttcgatcctagtatggattcgtgtccaggttcttgtcatgatttgggtccagggcaggtttttgttctgggtctaggtctgactttgaattcttgggtccaagtcagtacctggtacgggtttgaatctcggatttagatctaggtttgggtttcgaggcctgggtccctggtttatgtcccccatctatgtctggttcctaggtcttggtttgggtctaggttcgagtttgggtcccgagtcttggttttagtctaggtcccggtctgggttcgagtctaggtcttggtcccaatcatggtctaggttcaggttcgggtccttgtcagggtttggatcctggtctgggtcgtgggtctcaggttccagcgagggtttagaaccaggtcgagtttaggtcccggtctaggttcgggtcccaggtctaaggtccctgtcctaatcaaggtccctgtactagtcaaggtctctgtccaagttcttatctcaatttgggttatggtttgggttcggttctgctctcagcta

SEQ ID NO: 334748 - DNA, 533 bp, Cannabis indica
ttttgttgttttatagtttatttagttgatttatagttgtcatgaggttgttttctcattatttttagttttttttttcttattttctagtgagaaaagtgtaatttttaactttttttttttaaacatgtgtaatttttaactttgaaagtgtattttatttgtaagcaaaaattttaaatcgtaaaattataaataaaatataaaaaaaatatttttgaaaatttctcttaaaaaaataaataaaaacaacacacaaataaaaaaaaaacagatatatatattcatttctattgaataaacaactaaataacaacaaataaacaactgtataacaactccatacaatatgcaaataacatagacatgtaaacaactccacaaattgcatcaactccaaagaaagaaaaaacatcactcatgtataaaataaatttacaaacaactacaaaacatgtgtatatcaacttaataatgcccataaaagaactaaacacatactcaattttttatttgttgaacaacttaataac

SEQ ID NO: 334749 - DNA, 2315 bp, Cannabis indica
tggaactttgggcttcctttccacggtcacttcttcttgctcgtgttgcgctgttcaggcatacctctcctgagctttgcccgagtctctagcaatgtgaggccctccaataatgacttgcaagtgtccatctaccggtggaggtagcaaatcttggttgttctgaccttggtcggtcttgacatacttctgcatgtgttgattatttttccttattaggaattcaatttcccgcttcaagttgtatcatttgttagtgtcgtggccgtagtctacgtggaaccgacaaaactttgtcatgtcccttttgttggtatctttcttcatgggtccgggattcttgtacggagccaacgactaggttgccatatatacactttgtatatcttctgtcagaatagtgaatgcagtgtatttggcattactctcccggggagtctttctggattcatcagtgaactttcctttcttctcgttcccttgcttgtggttgttgctggaacgcttgccacttgaacttgaattatttcagtagttgggaagttgggcagatgttccagtgaaaggagcttttgacttgcccagcttttgttcaccttctgctcgttgaatggcttcttcgagcttgatgaagccttcagcttggtcaaggtcaaggaaatcactcattgagtctactggcccgttctttcttatatccttccaaagttcaccaaggagtttgatgccccccagtatcacgaataactttccatcctcggttacctgtgaaactttggtcgcctccgtcatgaatctgctaatgtatgcccagagtggctcgccttgtcgttgcttaacttcgaacaagtctcccaaatgcaatgggagttggcgcgaggaggagaattgcacatggaattccgaagagaaggtttttcgtgaactaaacttttcaggagccaacttgaaataccattgctaagcgacttccgacagagtggcaggaaagattctgcagcatacatctcctcgtaccccttgcaaatcgattggaatttcaaagtacttcagctggcaaaggggatcttctctccccgtgtacattttccacgttggcattttgatctccggcgagaaaggagatctacgtgctcggtctaactccagatcattatttctttttccagccatgccgtgaaacatatttttcagttcgtctagctgaacctgtacgactgggctgacttgctcggcattatggtcaacttggattacgtcagcatctttctgagaggggacttgagtacgagctacgggctgcacgattgccgtaacattctgatcatctgttcccatccttctacttagatcattcattaggtcatgggttgttcctaacctttcgaacacagaagctcctggttgccttagcgatttatttgcttggttgacgggttgaatggcaccgttgatctggttggagccatcacgtatgactcctcctgatgaattaccagacaagttatactcgcctaccgttgggcccacgagcaaaactcatgaccggggattgggcggctgaccatttcccgtctagggagtgttcatagttggatcctcgtccgtttctcctaggggaatgacgttcggcgattgctgacctacagtttggtaggctctttgtatcaacacggtggcttgccgactacgatcttcaatgtctgcatggtgagcccttaatgcttccatctctttatctctccattcggcgaacatacgcctttgttcgtcgaacgcgacatttactgcagcacgcagttcgtcctaatcaggatgcagagtgttgttatgaccatgcatgagtacgagtgcgtcacagagattttgtaatttagtggcatctctgatagtcgtctgggcgtaagttctaggcaaaacagtcggactatgaatgccctggtctgggcgtcagttgttatttccagtctcttgcttaccaggcgcaattccatctataggaactgtttcaccataccccacacttgccagctgtccaggattaacagcaggtagaacccttatgctccctgggttttacgatgtaggatccagcgtttgtgaatttgtcggatcagtcaggcctttatgagtttgcaccatcgtattggcggttggatgttgaataaagagcgattcgtgatcctcctctccatgaaagcaccaaaatattgatctctcttttaagcaacgacaatgaatctattttataagctataaataatttataataacagatatacgataaaacaataataagacacagggattttata

SEQ ID NO: 334750 - DNA, 1080 bp, Cannabis indica
aaaatttaaaatcttactaaaacaaaacctgatgatcacctctgtagtactccaggatataatcctcccaaacaaagtttttcctgggacccttgtgtttgtccgtgcactatcgatcatgctggtaacaaatgtagatagaatgatacccttttgcagaaatgtcaatggatagtcgaagcgtcgcctccttagtatatggactgctgcatataaaggttagaggaagtagttagacaacaaaatatattaattgtagattagttgacttataaaatatagtaaaattatagattagtttacttacgtcatctgtaagtcattcatgtagtgtcaacaacttccaaaagaacaatggaccgtaatcaccacttttcaaatcctgaagccggtggttgggaatgagtccagaacaccactttcggaaagtatccaacaatcgctcatccggtggcgccaagggatcaaacatcaaagaaggtctctgtttcttcttatctccgtgtagtcattaaaccatacagggggatttctcttcctctttccacacttaacccttgcaggtcatgcctctatcgtcaaaatttcaccctgtgactcgttgtcatctatatagataacacctgcaccgataggggtagttggagctccctcataaggatcatactcgtcaggaaagacctcctcatcttcacccatagcagatggtgagggtgatgcagctggtactgggggtgatgcagttggtagtggggtagatgcatttgctggggcctacgatgcttaagctgtcgttggtgtacgatgcaacatgctcaatatagttcagagctgctccataattaggttctgaccagccttcaactctgcatggctattctcatatgccatcttcagctcgacatgacaagcgtacatacccttttggtcagcctcgatcctgtccaacctccccactaaatcactgtactcggcaccaataaggcctgatgaagatggtgcactgggctgagggtctgaaccagtggcttgaaaaaatatatctcaaaaaaatacggtaagcatacggtaataccacaa

SEQ ID NO: 334751 - DNA, 582 bp, Cannabis indica
acggctgcccaccttttttatcctgtgtattagagttttaaattcctatcttttatattaaaatattaatggtatgtatatagttttttaaatatatatatatatatatgtgaattagattggatcgtttacttttacatgtttattaacatttaatctgcacaagtatgaattttaaatttaccaatctgcactttgtgaatttaattaaatgtgatcgtgcagattgaattagattggattgtatattttattaacactcctaatatttagctaagtattatatatgaagtaaattttttagctatttcagtttatctattgaatataattttttgacattttttatatttaactcttagttatatttttacattatagttattctactttagaaataacattgttgtcgaaaacaacacttacaagaattacaaaattactcatatttttgccaattataaaactgataacacacaataaatgaaaaatacttatttgatataatgaatcggtcccacattattattagacgtaatagatgggcaagtcacatgtccaaaaagtttttcaaccttgttg

SEQ ID NO: 334752 - DNA, 564 bp, Cannabis indica
agcacaggtagcactcatagaggacaaaagtgacatcgctatagcgaatagcgaactgtggacattgtacatcgacggagcctcaaatagtgagggttctagtagtggactcttattaatcagtcccagtaattttaaggtacatgctgctttacgttttgaattttctgcatcaaacaatgaagccgagtacgaggcattaattgcaagattgaaactcgctctcgagatgaaagttaagtatcttcaggcttttagcgactcccaaatcctggtgtgtcaggtgaatggagaatatctggcaagatgcgggagattggttaaatatttagccattgtatgcaagctaatgcagaaattcaaaaaagtaattgtgtctcgaataccgcgtgctcaaaattcacacgcagacgcattggcccgtttggcctcaaccagagaagccaaattgctcgatgtgattccggtagatgtgttagctcacccgactataaatcgtgaaaggatcatggagatagataccgttcaggaggtcacctggattactccaatcgtcgcatatct

SEQ ID NO: 334753 - DNA, 596 bp, Cannabis indica
tttttttttcatatttattttcaagccttatgatatttttgacaagtgttgctcaagctttattgtatttgtgattgtttaattatttagtaatagtccaaaccgcaaaaattgcaccgcaccattttttacagtgggatttatgtgatttcttagtgggaaatttgattttctatacttaaaaaacttaatttttttaaaccaatacattttacactacaaaaaatatgacatttttttgaaaaccccaaaaatacctccctcataactcaaaccctttctctctcctccctcaaactctcagccgactttctctgcacccaccaccctcacccacaagcaacccacggcagccaccaccctcacccacgagcaacccacggcagccaccactctcacccacgaaaaccccaaccccgacgaccctcacccacgctcaacccacgtcacccacgaaaaccccaacccccgctcaacccacgaatcgccgccctaactccaacgacggtcgaagccccagcccccttctccaccgcggtcgaagccccagccccagcccccttctctctgaaaacgaatgaaaacaaaaaaaaaaa

SEQ ID NO: 334754 - DNA, 1222 bp, Cannabis indica
tcgaataagattgactcgtggactatgcagaattttaactgcaaaaccacataaaaaaaccttgtgttcaatattatttttctataacttttgctttttctttgttgaataatcatcctgaggctcaaatttggttaacaaaaatttgcgttaacagttacacataccaactataaaagtccttagcttgcaatgagcaaagtaagtgtaaatgtcggatcagatcaaagaacaagtatgccagatgaccatctccctatgggaagacttcctatagcttcatccaactaacaggagcgaggctcacaacattggcgagtcagaagatttctttataaataaccgtgatcgacaccagaaatatattgttgacctcggaaggaaggaaggccccggctcactactgggatcactataatcaagtttctgtcgagacatttccggattcagcagttaaacacgggtttaatacatgatagtttcgacccagtaaaagtgagaaaatcacagctatacgattttcaaatcataaaccgcatatgcactacataatatgtaatcaagtccaacgattttagggattattgctgtaaaattatttcggtcaactctgtaattaactgcccactatgtaattataaatagttgcatacatgctcaaaatagggacaaaaaatctcatacgagagagaccacacgttcccggagaactcaacctgatgttggtcctagtacgcggacaacatgctcgaggagagctcagcgtgggaacggtcagaaccccgggacaagggatgaagagctcaatcatggaggtgcccaatctgtgagagaaagaacttatgaaacagaaattcgctgcctgagacgccatctggaagaggcgcagcatggaaacgctgagttagaacgtgaggcagcctcggccagggccgcacaggggacaaatacccaaaatcaacctgaacatggagtaagaagaccacgaggctcacaaacctggagacaggaaaaggcctgggaagaacaaccaagggaaaatgagacaccccctgagaatcaggatgaacaaccagatgggagacaatcagaaactgatgaacaagaaatcccttatgaaaatgaggaggatgttgggactcaaccgagagaacagagatcacgtgctagaagtcaccaacattcttcccaaacccatagagcgaggactcgtacataccct

SEQ ID NO: 334755 - DNA, 572 bp, Cannabis indica
acttcaacttggaactcgatctcgcatttctttattgatcaacaacaaattgagtacgtcacagttgagtatgaattctcaatcttgagtcctcgcaagtgtttcattctcacactctctcaccctagcatacacatttagacgtttgtgtatctcattacaaaatcctttccctttggaatcccactctttcatagctaatcttcttgcacactttctagatttgtgcttctgtcgagttctgaaaagtgttttgaataatgaagaagacttaccttatatataggcaactaagcaagtaactgattcaagagaagttagttagagcgctcttggataataacatgggtaatttttatttatatacaagtaaatacaaaaaatatgtaaaaaaacataataacataatactatacaattttatgaatatttataaataaatatatatatgtttacaattttaacttgttgattcaattgattttctaagaaaaacgcataaagctaaatatgtaaatataaaaattaatatttatattttgatatattactaaaataatatgtttactaaa

SEQ ID NO: 334756 - DNA, 1498 bp, Cannabis indica
tcactattaaatttgattttgtatacccatctgcatccaaatggcacgtttgtttggtggtaaaggcacaacactccatgttttgttcccaatgagcgcttttagttcattgttcatagcatggacccattgttcaaattgaatggcttcttgatatgtttgaggttccctcatcgtggctattgcaaaaataaaagctttgtaaggatcagatatattggaatatgaaataaaattagaaagattagtggtgttgaagatttatttcgaattgtggagtaacactcaaaatctctgagataagagggaggtttagtgacacgagtagatcgccttgggggattgggagtaggattaggtgctagagacctcaaactggttgtgttgtctgtcatatttgattcaatatgtgtgttggagtcacttgtttccttttcctgtatgttcctgtggcagattagaagtattgttttgttttgtgggataatcacagataagggtgttgtgtataacagcactgggaagaataatgttggaaaacggatctatgtcagagttgtccacattaagtttatgaaaaggaaaaatgttctcatgaaagacaacatttcgagaaataaaaaattgattagtgttaatgtcaaacaatttatatcctttaattccttgggggtatcccatgaaaacacatgttcttgcacaaggtgaaaatttggttctgtgcgcgtgcgcagtgagtgttgaagcaaaagcaaggcaacctatagttcggaaatgttcataactcaattgcttattgaaaagacactcaaagggtgttttaattttaaacaagggagtaggaattcgattgattaaaaaaacatcagccgtgatacattcactccagaacttgattgggaattttgcctgaaaatgtaatgctcgagccacattgagcaaatgctgatgctttctttcagcaacagcattttgcttaggtgtctctacacaagtaaaatcgtgcatgatcccatgttgagcaaacaattctttgaaaaccaattcaggtgcattatcagatctgaaagttttagaaacacagtttaattgtgtttgaacatatgatagaaattgtgggattatgcttttagcatcagatttgtgctgcatcaaataaatccatgtaaaccgtgagtggtcatcaacaagagtgagaaagtacttgtgattagtgtgtgaggctatgtgataaggtccccatatgcacaatgtatgagatcaaaaatacgatttttcagattattattattctgaaaagagagtcttttttgcttagcaattggacaaatataacatggtttatttttatgtaaagcagaagtgttacaatgcaaagtttccttgagaagatctaatcgcttatgagacaaaatgcccaagtcgagaatgccaagtttcagctgaaaatggacagaacttggaaaaggatctggtgcctcatcaaggatatagagat

SEQ ID NO: 334757 - DNA, 553 bp, Cannabis indica
agtcttttttagttttatagacccatttacatccaatggctctcaccccattaggtaactttacaagttcccagactttgttacacttcatagaattcatttcattatccatggcattgtaccacaattttgattcgctgttgttcatagcttgtaaaaatgtttcttgatgatttccaattcaaatgtcagattctaataaatacacaacacaacctttgtaaatctttggtttaacaggtctagtagatcttcataagacttcaccaacaagctcttggggagcagcagttggttcagtaggttgtgcaatagttacctaaaactcttgaacatcttaatctactgtattataattaccaccttgtggatcttcaatgattggtaatgattgttcaacatctgtttgaactacaggagtgttgaccattattagtcttacttttgagttggagggttccgaaggatctttctcgggacctaagtccttcgaatgatcactcccactaaccaaggcatttttaagaaattttgcattccttgattccacaat

SEQ ID NO: 334758 - DNA, 853 bp, Cannabis indica
aagacgtccctcaagctattctccaacctccacaagttgaattccctatgaacgcccttctcaaagccttaagagcatttcccactcaactgatggatcctgctgctcaacagagtcatcattttcagatctttcattggatccaagtgcctgagtttgagggtggacaagatcccatggtagctgaaaggcggttgaggctgatgaagaaaaatttcaacacaataggaacacctgaggaatatcaagttacttttgctgtgaccaagttagagggtggtgcaacagattggtgggagaccttgtctaggacaatggaaactgatgggatgacttgacgagattttgaggaatttttcagggagcaatatttttagtccatctcacaggagggctctgattggagtatttgatggtttaagacaagaggatatgactgtgaatgaatacatgaagtttgtagagtctactccttttcatggacagcccaggacaaaccagtctcagtcttcatcttacggttttacaccctaatagggccagcagtctcagtatcaacatcagtttaggacacaaggttcagggttcaacatgggatactcacaaggtttccaaactcctactcctagtgggagtcaaaaggtataatcaaggcggagtgtttggtgctagtacaagccatcctagtcagggaaagggaaaagcaaaagcaaagtcgttcgctcaagcctatgctcttagggttgatgatgtatagggcggtgcagaccaaggagttgttgatggtatctcacactcttgggctcatgggtttttttgatactggtgcatcacattcctttatatctttaat

SEQ ID NO: 334759 - DNA, 787 bp, Cannabis indica
acgggtactctgtgtgcaggtaaggaaaaactatacagtgagggtggcgagctcgaggcatggattacatgttaggggattgtcacgatgttttggtttgagaatatttctttaaagattatggcttgattacttttgtaaaatttaatgtttaaaaatttataaatgaatcaagtgtttttgttttaaaataatgagatctcatgctttagttattttcaataatttagtttactgttttattataaatggttttaaacggactagtaagtgtgacgtctcgggaaatcggggcgttacagagataaatatttgaggcctcattgcagtaattatattagtttactgaagtatcatttataggtagctaagtgttttaaggataaaatacattaaagggtagaatggtaaatttatccctattcagtgtagatcatctatagaggatctttgactattaagattctaataatggataatcataacttatctatatcgtggtacatatagagcgttctatataattaagagttttattcaattccaaatctatagtggtggaaggcagaattaataagttagggaatttacttggtgaattccaattctacttatttaaagcttggttatataggcccatggtcccctcactagttgagatgatactgcttgcagactcagttaattaattttaattaatcaattataattctaaaaattagagtatgtcttatctaagaattttcactaagcaagggcttattgtaaagaaaagagattttagggt

SEQ ID NO: 334760 - DNA, 868 bp, Cannabis indica
ttacatcaagattatgttgtaagtaaattttttttcagtactctagttcaaaaaatatactcttttttgaccaatttagctcttcaatagaatgcttccatttcacacccctgaattgttcgtgttttccaggcaaacaaaattgaattcggtccaattgagataaaatatcatctcccgtcattacaggaggtggtgctctcttctcaggcttaccatcgtattttttactttcccttcttggatcattcattttgagaaaatgtatgtggccaacgtatccaatcttactatttaggccaatggaaggagtgtgttcgttgtaagtgggacatgccatgtactcttttgtgctccaaccagacattagagcataagcaggaaaatcatttattgtccataacactaccgcacacattgaaaatacagttctattgtaggcatctcgggcttcaacattcgtctcccataattgtttcagttcatcaattaacggtctcagaaacacatccatgacttttctagaagatgatggacctagaatcaataaggttaagaataacgattctgatttcatgcacttccatggttgcaaattatataggacacaaataactggccaccggctataagagttgctcatgttctcaaatgaattaaaactgttagtagccaatctgagcctgacatttctaggtttgacaacaaaagatggatgaagtcggtcaaactgcttcctttctttagcattcatagtatgcctaagcacattgtcttctttgagtctctgcgagtaatgcccccacatgtactcaatggtgtgaattgagcaatataatcgttttagtctcggtgtgagtggaaagta

SEQ ID NO: 334761 - DNA, 1124 bp, Cannabis indica
tctaagtatgcacttaaaatagttagtttacctggcattttaaccattgtactcaaccatcttactgaatattgatttaattttgtcatataaaatgatatgcaccctctttattttgatatatttatatcataatacaagtacatttcttcctttcataaatatggatttgagagagcttttatgaataagagaaagtcatggatgggtttccattttttcaaagtaatagcatcatggtgataaatgtggggctaagccaagccaaccatctggatcgaaaatgaagaaagaaacaaacttaatcagtcagcctcttctggaaggaacatttaaagctgtacctaaaatggtgacacaccactagagacgaattactactgtatatgactcttccctttcatttttattagccctcttgtctttagctaattaactttaaagaacactccctaactaaaccacctaatcaaacattgcttacaaaacctagtattataaacatgtaatattctgatataattatgataataggaaaaacgacttttgatccaaaatctatatatgaaaggcactttaattaccaacctgatgacagtaatctcatttaggaatatttatatatatgtataatgttactattttaatccaataattaataataaatgatatataaatttaaattttatacttaatttaactacttaaattaaaaaaaatactaaaaatatatctttctacactatatttttacatagaaaatatttaagtcaaactcaattatttattattctttttttttgttgtttattttttttaattttttttcaactgttgaaacaactactcaactcgtataatataaaataaaaaaaaaattagttaaataaaaaaattaaacttaaaaacttaaattttcttaatactactctcatatctataaaagtatatatattaataaatcttatatgagatgcaagtaggccaacaaaataaattgctagcattatggaatgttaattgaaggaaaggtgacaagaggcactacttttatgtgggccttcttcactttttgttgggacaatattaagtacttttatccctgatcagtcaaaacgtgaagg

SEQ ID NO: 334762 - DNA, 579 bp, Cannabis indica
ctttggctgtgtctgtggctgaggcttttggtggtcaatggtatcagaatcacagcttggaataacatctctaaaacgagtgaattccacattttggcacacagctttggtatgaccttggtttttatagtatgtgaagtgaacattttccattttaatgtctttgcaaggaaaactctcactgcagtccaatttaatagcttctttggttacacttgtacccttaatgttttcaaaagacactttactaacttgaactgccgatgatgatgagccctgttgtttgcaaagctttttactttggtcacagtagttttgttctattacaatggggttctcaacattattcatttgaatatttttaaatctaatattgcttgcacttcctgaaccaccctgcaattattagttaaacaacatcaaaatcactttatagtatgatataatatatatgttctaatattgataattaattgtgtatataaatatatataatattaattacctgaacagtttttattctaactccaaatttagtttcataaaaattagctctatctacaatcacgtctgtaacat

SEQ ID NO: 334763 - DNA, 629 bp, Cannabis indica
ccttttccctagggatttaaaaatcctcatgtctcattgtatggtggaaccaccgatatgatctcgcatttgaatagctttaatacaataatgcgagctagtaatgttacaaacaatttacgttgtattttgtttcatgggaacagctgtcaaaggacttcaaaaaatagttccaggccacaagggatagacgacccgaggcgtccttgctaaccaacatcaaggagcaaccaggcaaaacacttaaggcgtacttaagtcgttttggcacggctactgcaagggttagatatttggatgatagtacgcaacttactgcccttcaggcgggaatcactactgatctatcaaccattgggggcaaattgtgggacgacttacagggtcgtccagtgaagaacatcactgagttcaacgaaagggctcatgtgttcgtctgaaaagaggaagctcaaaaagagataaacttattgaaaacatgctagggaggcaaacctagtaatgtttcaacaagtactgtctcaactagagttgataactcaggggcctctggctaaaagagaaagtacgattctaaggagttgtcaaaagacaaaaagaaacaaaaaaagcacgataagtacgtgcca

SEQ ID NO: 334764 - DNA, 1157 bp, Cannabis indica
attgttcgcaatcttcctgtttatgtagttggttatctaccaaatttttttgattttcaagcagttgtcaattctgtctcgctatagtagttattaattttccttaagcaaacttaaatatactttaatgattttatcactttgtatatttttaatttgctcgtatgaatactttgattatctatccattttctaggttcaagtacttttatcaaggcctcttaatgcctcgtttagcattttcctagctcgcatgaatcgttaatattaagttttatacacgagttataacttttgattttcctttcctgtcagataggtttttaataaaaaattatagttgtttgatctcttcttcgtcagaaaggtttgatcaagatgctataacaattcgatccctctcttctaaaaaaggtttggtcagggagttataacagattgactcctctttggtcaaagaggtttagtcgagaacctttatatttcattttttttaaatggcgggtttgcattataccatgtatttccagatgaattccggttaatcataccaaaatgccccattaagtaattttaatgaataaaactttgtaattacttaatataaatgattttctttattcataactgaacttaaattttacagcagtaatgcgagttacatcatttatttattggtagtagggtcgcaaatgttctaatttcgagtagtactttattagcgagccgttgagtcgagccaatttataaactctaattccaactactacttcgatgacatatggaccctcccaattcaggttaaacactcctacagatgtgtctctcgtattttcaaatactcgccttagcaccaagtctctaacattgaatagtcttttcttgattcttttgttgaagtatcttctaactcattgttggtatgttgcgttggtaatttgcgactcagttcatttttcctcaagtagatcaaaggataattttagaagttcctggttttcttcatgattataaaactctcttctgtgagtcgatatgttcacttcaataggtagcattgcctctgagccaaatgctagcgagaaaggagtgtgtcccgttgctatcttctcgttagttttgtgggcccagagtacctaaggtagctcgccgaccca

SEQ ID NO: 334765 - DNA, 1522 bp, Cannabis indica
aggggaatatttgcaacaatctgcatagttcgggagatttttgcaactgagaaaagtttagggggaaaaactctacaaatgtcatgatttaagaggcaaaaatcctatttattcttatggaaacatctaatttctaagtaagaatagtgatagttttgcggttcaataagataaatgattgtgatatagtgaacagttgttagttagtgcagttgacctattggttagtttaagtttaattatgttcatgtcatatattgcatagtcaagtccttttattattaaaacatattactgtaactgaacaaattatctctatctatacaggcatacaccgccactttgttctttttggtttaatggagtttctgcggagaaggttaattctgcttcatgcttctgttccataactttgaccctatgtacaataagaacctaaactctaacttttacttttcttttttcttatttttgatgtgttcttgtaatagctttaacagacagttttcttctgatgaggttctacagttgctggatcgtttctataacttggaagtgttggtatgaaaatatataactcattttccttatctccaacttgtttcttaaagaagatgtgttagtgaatgccaacactgaaatccttaaattcattattgaataatatgtttgtccattcaatatgctcacctctcatctagtaatataagaaggtttttattttgggtgctgttaaagcaacttcgataaagtaaacaaaatatcaatttgcaagttttttagtctatcttttatcctaagcatatttagtttgtaaccaaaatataatggaatcaaaatggagttgtaataattcaattttttccttttgtggtagcaatgactaatgagaggtgtgtttgtctgaccctttctttttttggtattatatatgtcagaaaccagatgatgaggatattgaagtcttgaatcgcgaagaagattttagcttgcctcaaagtttcttcgttaaggaagaatcataattcataaatgacaatcatttgtaaatatgctttaatagtgtttgatcttgtaaagattcagcctccctagatgatttattggtcatttttaatctttcttgtttatggtttggatgcatgtataatggtgtgagagcttaattttggtagattttagggaatataaaaatattaaattttggtgggatggagaagagagacaatttggaaatataagattgttatgggtgtttatcaacagcttacaccatacccaaattattatgtgttttggcagtgcgattgccaattatatattttttcataccacatcatgtcatgtgcgtggtttgaaattttatcagagtcaagtctggtaaaaagaaaatattattttttatatagggttaatttcacaaatgcataaaaacaacaaaaatacggttttacggaattttaaatatttttacgattttttttattttatttacataaaatacggtctttttatgttgaaa

SEQ ID NO: 334766 - DNA, 677 bp, Cannabis indica
aaaaaaattatacatgggtgaacaatttttgatttctcaacatgtccaaataatactaaatacacaatcaaaccattcaaattgtatttcgaacgctactattaagccaattcggaagaagaaagaataaataagttttgcatatgttatttatttggggttatttttcattaatataataaaatgtagaagagtttatttttatattgttagaatttaggataacatgaatgatgttctatcgcaaaattaattggtaatagaaagagtaactcattcatcttatatacgacaatttatatatacagattagcaatgtgagactaactataatatacattcctcacgtttgggcctggttgtgggtataacaaacgacctttaagaaaccataagaccgaacgtgacatttgaaagaatcccacaaggccaaatattgagaaatttgtgattgtatacgtcgggaaatttatagattttgaaacaggctaaagaccctaacactagaaactgatacacattggccgaaaggtcccaaatggagattaacggggagacagcaaaagtatcttttttggaccagcaacactttggctcacaacagatcacaaacgacttttcagaccggtggcactttgggctcacaacggatctcaagtggctctgataccatgtta

SEQ ID NO: 334767 - DNA, 873 bp, Cannabis indica
gtgatatggtcggatggtacgaagccaacatacatattcaaatgtaatctaacaggcttcctagcatgcacgctaaacatgtaatacatatgcatactgttatactaatcttacctcaatttcgaattcaggtgtgccggtcaacctgagtggaacgaactgcacggcggtttacaggctcctaaaccataacaatcacaacactagttaagtgatacgctaaatcacttcccggggacttaaactagaaactagaagttgccctatcgataaaaagcatggcaataccctaaacaacataaaaacgagaaaaactagggtttctgaaaatcccccaaccggcagaccggttctgcaaccggaattccagttctgggcattgctgaaccccatccgaaattccggttgcacatccagaattccggttcctcgcaggaatcaatcaaaaattcataactcattcaaatcaaacccaattcataccaaaccttccagacctgttctaaataccccaaagaacataaccaaagcaatagaaccaagcttcaagcacagaaacacatttcaccattggaggttcaagattgagttcaaaaactcaaaacttgactaaacctccaaacagccactaaatcatgcataactcaacctatttcaacataatttaacaccagaaaatactactcaacaatagcagcaaccacagcaacgaaaatcatcaatttactttgaaaaccatagcttttgaaccaaaattctcaaacttgaacaaaggtaacaagcatgcattaaaacctatctaatctcacttaattcaacattttaatcacaaaaacaacaacaacaacaactaacagcagcaacaacaccaaa

SEQ ID NO: 334768 - DNA, 1525 bp, Cannabis indica
taacaagaccttgaaggatactatcaaaaagaaactagacgctgccaagggtagatgggttgacgagctacctcaagtactttgggctcataggaaaattgagaagacactaacggaacatagtatattctcgctagcattttgctcggaggaaatgtttcctgaagaagtaaatatctcgactcacagacgagagttttataatcaagaagaaaaccaagaacttttaaaattgtccttggatctacttgatgaaaaacatactgagtcgtagattactaacgcagataccaacaccgagtaacaagatacttcaacaaatgggtaaaaaagaggcttttcaacattggagacttggtgctaaggcgagtgtttgaaaatacgagagatgaatcagcaggagtattcaaactaaacatggagtgtccttatgtgatcaagacgatagtaggaaccagggttcataaattggctcggctgaatggctcgctaataaagaactactggcacatggaacatttgtgaccctactaccagcaaattgatgttgtaatactttcaacttcatatattaataaagttaatcattttttctaggtaattataaagtgttattctttaaaattacttgaggggcgtatgtgtatgattaactagaattcatctggaaatacatgatatattgcaaacccaccactttaaaaattttcaaaattttttaaagttcttttttaatggaacctttttgacgagataggaaaatcaaaaaatcatgaatgacgtttgattaaacctttctggcgagaaaggaaaatcaaaagttgtaaatcagatataactcataagctacatgtaaagctgaatactaatggcttgcattgaacaggaaagtattaaacaagacaccaagatgtcttgaaaaaaatacttaaacctaacatatgaatagaagacctaactattcatataagcaatcaaaaatatacaaagtgataaatcattaacaatatattcaagtttgcttaaaaagagattataacagtatattaacagtatatcagttttaatggcgattcaagcttactggagccaaattctcattctaccaaagaaaatcattagaggcattgaggcagtttgtggagcttttcattggaaaggtcagtctttgtttcaagggggtggagcaatcaagtgggacacggtttgcactccaaagtcagctgggggtcttggtattaaaagagttgaagagtggaacaaagcagcaatgtgcaagtacatttgggcaattgtaaataataaggggtctctatggatgcaatggattcatagtgtctatttgaagaaaggagactggtggagtcttacttcctccatacatgctagctggtattggaagaagttagtggctctaaaggatcaagtgaagagtttgattgatacaagagagtttacaacaacgaaattctctatttcagcagggtacaaaatgttgggttttatgccctaaataaaactcttt

SEQ ID NO: 334769 - DNA, 849 bp, Cannabis indica
aatcacgtaatacgcctatgttagttagggtgttacaccatgcaacattaacccaatcattaccgtctacctaacacaactagtaaaccttaacaacgcacatagattatgtcgttgttcaaaagtttgctagataatttgacttggaggtggtgacaacgcacataggttatgtcgtggttcaaaagtttggacagccttgtaattaactgccactatgcaattataaatagtgtcaaataaactcaaaaaacggatgaaaaaactcacatacgagaggccctaaaaaatacttagaaatttgaataagattgactcgtggactatgccgaattttaactacaaaatcacgtaaaaaattcggtgttcatattttctttttctatagtttttattatttctgtgttgaatcataattgtgaggctcaaatttggttaacgaaaatctgcgttaacaggagagaagtggaaaggatggctcattaatgctaatgatgtgcctcgaaactataaaaccgccaaattcgaaggcatatatattttcaaattggattatgatggaaatacccacggtaatcatttaaaaagcacttttcgttgaaaatgactttttaaggggtaattgttatacccgaaattgagctgtactttagaaggtgatacatgtcaatcttagggaatatgaatcaacaaatataatgataattatatcattaaatagaaaatagaataactcattaaatatagaataaatagagtatgtacgtaactcgctgactaaattgtattaagcgagatatggatatacaaactatcaattcatgttattgacgagaaaccatcttgcct

SEQ ID NO: 334770 - DNA, 646 bp, Cannabis indica
gtataaaagtttaaataacccagcagacaaaaaagtaaaaaaaggacaaaaaaggacaccaagtgtaaaaatctctatttgttaattatcagatataataatagattctatataataaatatatatatgtaattttgcttctaatatatgtaattattttttaaggtgtacgtacttatatttatagtcatgtaaaataaccaacattgataaaactttttctattgttattattggaagaaaagaattagagggagattattttttgtttcatttttatttaaacaacaaaatttagtgcttgcttgttggtaacaattagataattacttttttattaatttagttaattaagaactaaaaagaagttagtgcatgcatgtggaaatcgacaggggtgctaatgaaatagttgactcgagagtcacatcctgcgggatgcacttttagttgacatggtgtgcatgaagagttggggcagtcaggcatttgcgtgtgagcatgttgtcgaggacgccaacagatgaagtgggggagagaccttcacggttcactcaacaagactacttattcattacaagcatcgagatgagtatcatggagattgattgttgttcaggatgtaaagtcaagaagactcaggaca

SEQ ID NO: 334771 - DNA, 603 bp, Cannabis indica
acctgaggaaggcatatgacacagtcgaatgggtcttcattgaacagatgatgagagcactcagattccctagtaagttcataaatctcattatgaaatgcatacgtacacctatgttttccttgctacttaatggtactatgtgtggattcttcaattcaaagagagggttaagacaaggagatctgatgtctcccctcctctttgtattgggaatggagtatctttcgagaattttcactaaggtgggagattggccagaatttaaataccatgataaatgtagtcaaatgaagctgaatcacttgtgctttgcagatgatttgttagttttctgtaatggtgatttcatctccataatgctgcttcttaaaggccttaaattgttttcctctacttcgggcttaatgccaaatgatcaaaaaacagcaatcaattgttcaggaatgccagatcatgaagtatccagaattcttgagccatccaattacaagagaagctcactaccattccgataccttggcatcccaatctgttcaaggaagatatctagagcttaatgtcagtgtttgctagaaaaaatgactagcagaattcgaagct

SEQ ID NO: 334772 - DNA, 620 bp, Cannabis indica
gcttcaagaggagacatcacaatgagtttaaaatcgaaatgccatggctgtccaatgagtacccttctgcgatcaccaaagcatccgaattccacggtaaagaaattgggctctttttccagcacattgattgagaagcgttctggccacatttcttttaaacgctttttgaaagcttcagggttaaaatggcgtgtagttagcagtttgacagcaaggaaggcagaaggctcttccctgttttcatcttcaggcagttcagatggttcagcaaaggaatgaatttttgtctcaatctcagtcaagttcagattggcagacaaggtgttggtgagttcttccattgttgaaaaaggtcgagcggatgtagggtcagggggatattcagaagtcaggggaatatgcaggttacaaattgggacaaaggaaggaataaactgatggggaaactttataagctgtaccttgtgaatatatacagagtgctttatatagaaaaaacatacagggaaaaatttctcccagggaaaaactaaataaggaaataaatgcttcatgtcaggagaggcaatgatgcaaatagaaatggcagtggctcctaaaacgaatctaggggttct

SEQ ID NO: 334773 - DNA, 639 bp, Cannabis indica
tccgatgttaccaacactagtacctgatgatgacgtagtgcatgtggtacaacactcaatagtacttggggtacggttcagccctaccaacactagtactgtaacaccctaactcatagggacgccacgtgtgtaatttataaactagtttaatactaataaattaatttattattaagagccatgataatactaaaaacctgactaaaacaaagcactaaaaatggacatcataacgacactaaaaacgtgtttcggggatccctattataaaagttttacaaaaggactatatacaatgacaattcaaaatatgaaatcaagatacacagcagatacagcccaaaactgttgggttttatgccctaaataaaactccttttcaatgtaatctctattcttttaaatatcaataaagaaacagaagtatttatcactcatttgtgtgtcttttggttcatgttatcatttacttgtctaattgatttttaaattcatccaaacccatttcacatttatattcttgtttattgtgtcgtcagcacagtagaaagtaatcaagattatgtgattgaatgtatattcctagattcatcagaacacagggtttaactgatatgaaaatctacaacatagttt

SEQ ID NO: 334774 - DNA, 595 bp, Cannabis indica
gtgcatgattttaccatttgttttatcaatttttaaatgtcaaataattcaaacctaaacttagatggattcttataaatagatagtgatggactcaaattaaaaaatgaaaacttaagtcacattagccttcagtcaaattttgagcctttaatctctctcatattcgaatcattctctctctctctttctttcttcaatttttgagccctatattgatagagtacatgcccacacatagcaagttggtactcaatcatattatgtaagactatgaagaatctaaatcaactgaaggagaatcgggctcagatcttggtgatactctgctacaaaaaggatacaagagttagagatctgagcggaaagagtcatttaattccgctacaaaccaatgtaaggtttcttcaactttatatgtgtttaaattacattgttttagaaattcatatttaggacgttaaataacatacatggtagtaaatctagatcctggtaaaataatacccaacacaatcattatctcaatttgatcctcgtacaaatccatgtgaacttgaagttcaaagaataatttatttgtaaaatattgcaa

SEQ ID NO: 334775 - DNA, 780 bp, Cannabis indica
ttctcatcctcagtgactgatataaaggcccataatcttcctgtttctggtttagcattcactaaaatcatgcatcatgtctccaggcaaagttttatcattgaatctgttcctccagtaatcaacttgaacttgataaactttttctcaaaagcaactgccttggcataaggtaatctatgatgcagcgtgtccatacttgagtataactgcgctcgagtttcttccaacaaagggtacacaaaagatcccaaataattctgaaccgattcaaatgattcaggaatttttgaaatgtaccaataatatatacacataagaaatgatttgcttacacatcaaaagtatatcccaaaatggaaatagcaggaaaaagaatatgaggactaaattcaaactacatagacaaacaaaacaaattagtagttatataaaccacatttgtacctattaatctcatacttgcatcaaaagtaagcaattactaaaattggattttcccctatttcataatctaatccatgcctctagaattctgtcatcaccacacattagaatttcaagaaaatttaaatgggaaattaatggtgctcaatcatttatatatatgatcttcttttatatttaagcttcaatgttaacgagaacaactcgtatatattattggctgtgttgtttgacagtgtttctttattttgtatcagattaaaacttgatattgaataggcatttttctcaatttgtcaaaaaaatttagtcatattgtgtaatctttgttcg

SEQ ID NO: 334776 - DNA, 861 bp, Cannabis indica
ttgtgactaaaaatacatttagtcacaacaaattataatttttgtgactaatacttttagccacggaccttttagtcacaatacaataatgataatttataattaaccgcaactttttttatctttaatcacaaattttgttgtgactaaaaataaaattttttatagtataatatcataacatataatatcacgagttatgcctaattatattagatataatatttaattaaaaagaaaaaaaaagaaactagctacataatgtcaaatcaacaagtagtattaataaattaagtaattttaatataatcgttcttcgctccactaatttaatattttttttagtattataataaataattacttaaaattataattttaatgtatattaaaattataaatatattatcttatttcatattattattaataataattttacttattaaaaactaaatgaacaattttattaattattctttagaattatttaataagaagtttaaaatttattatatgtagtattttaaattgctttgttaaaagaaattatttttataaaaataaataaataaggtggtgtagaaaagaattacggtgttccccataatgtattattttcatatctcgatctttcaatactattgttattgttgtacctcacttgttgtctcattgtatctcacttattttcatcattgtatctcacccgttgtcatcactgtatctcatcctttgtcattaccgtagttcacttgtagtcgtcgtcactattatatttcataaatctatatcttactcttagatttcatttcgaattttaaatatttttaagacaatagagaaaatttattagtttgt

SEQ ID NO: 334777 - DNA, 1561 bp, Cannabis indica
tacatcaagcttgcatcatacaattagagagaatctatttatgcataagttcaaaaactttatatttttgaaatttttactaatgaatctttatttttaggtgtaatactgtgcaatagtataatctgtaaggattgctaataccacttataaaattttttgtgttatttttatttttctgcactttagttctttacaagttggctagtctgtagttacaaaattttgatctgtagctacaaataatctattttagtatcaattttattatttcacatttaattaattaattaattaaataataagttggtgattataaaatacaaaatttcatttgtaggggctttttaaagtattatcaaattaaaaaaaatagttatttttaagtggaactctttttagtggaggcactataatatttataagctatcaactaagtttcgttccccgtaccttacaaaataaaataaaaaattctaggtttgttcatcgttataataaatatcttacgaaaaatttacataataaatcaaaaaaatttaaaaattacagaaatacatcaatacagaaaaaaatcatttttattctttaaacttttttatttataaaaatacctcatcactaaaaataataaaccttttattggttattttataattgtcatgagtttatttttctgatatatttattgttttataatttatttagagttatcgtaatgttgatttgtcattgttttttttatgttttgttaaattaattgtatttttgtaattttaaaattttacacgtatatttttataattataaattttaaattataaaattataaataaaacatgaaagaaatatatttttaaaatttttccttatttttaagtggaactctttgagtgggggcactaacatttataagttatcaactaggtttgttcctcgtccttacaaaaaaattaggtttgttgctcattataacaaatatcttattaattttgaaataaatttaaataattttaagtagtgtttagtaataacttcaaattaattaatcaaaactaagagaaatatagaaaagtttcatgtatatattttcatgtatattcaaatttttattgttgcctaagtattaaatatttgatcattttgtaattaggatttttgccccctgaattttgacatataccaaattatacccctgaacttttaaggtcgttaaaaatgtcccttgaactattgagattgttggatttaaggatttttgtctaatttcattcaatttactatttcagtgattgttatacactaaaccatgctccataaactttaatatctaccaaatcatgtccctcgaactttgacatgtactaaatcatgtgcccctgaactttcatccatattagacttttcttactaaaattagaaaaaagtttttaaatccaacaattttaatagttcaccaacatttttagcgaccttaaaagatcaagggtatgatttggtacatgttaaagttcagagacaaaaatcctaattagtttttttttttttttacaaaattcaa

SEQ ID NO: 334778 - DNA, 1394 bp, Cannabis indica
ggttcataggctaagtcctataaaatggatgcccaacgaaatacaagaagtcagggtaatatggttgagacagaaggtactctgggaaatcaaaatccccagaatccccgaggtcgcggtcgtggatgtggcagagctcagggtggtcgtcctgtaaatacaccacaagctcctccggattgggagcagaggtttgcgaaaatgtaagatcgaatctgccagcaagatgaagaaatttagagattaaggcagtagggtcttcctgatgtgcctgctcagcaagctcaggccgttgtagctccagcggtgccaacagaacaacctgttgctggtaagcgtatgaagccgttatatgaaaggtttcgcaagcaagcacctcaagtgtttctgggaggtcctgatgtgatgaaggctgagcagtggctcacagtaattcaaatttgaattttatgggggtggttggaagtgatcgcgtgacctgtgccacatttcagttccaagagaatgctctcgtgtggtgggagtttataaccctcacacgggacgtcactgttatgacctgggaagaattttgggaactattcaacgccaaatattataatgaagtcgtccgcagtgctaagcagaaggaactcactgagctagtacaaactgaggggatgtcagttacagaatatactaccaagtttgatcgttttgccaaactcactgtgggtattgtgccaacagattttagtaaaaaggagaagtaccgggctggtctaaatgtgaagattaggcatgattcggtgatcactaacaacgaagcaaccacttatgctgaaatggttgaaaaaaatttgagagccgagggtgctgtgaaagtccttcaggagcctcgtgtgactccgagtgttggtgggacccccacccttcctactccagtttatggtagggatggtggtgattccaccactgatcagaaaaggcaaattactcctgcatctggtggctcagggcagagtaagcggtttcatgtaaaccaaggtagaggtggacgccaaggttattcctaccctgagtggccacgttgtaagaaacatcatccgggagagtgcgaccggaagacatgctttctgtgcggcatggtggggcatttcaagaaagattgccctcaagcaaagaaagaagagccgaaagcagaggtaaaacctgtacctgctcgggtgtttgctatcacccaagctgatgctgcagccagtccttctgacgtgacaggtcagcttcccgttaacaacttcttgtttatagtattattttattccggagctacacattcatatgtggcttcgcgggtaattgatcttttgggtaggcctagtgatattcttgaaagagggtttggaaccctaatg

SEQ ID NO: 334779 - DNA, 635 bp, Cannabis indica
ataaattatttaaatagctataagtaatttcttaattaatcataaccaactgataatttccaaattaactaagcgggctttacaccttcgttcagcctcctcctggatcgcccgcctttcggcagacaagtccggaaggatcctcacggcctcgtctatgcccccgaattcggacatgatgaagccatggtcaattaaagtcttggaaaggcggccggtctcagcagtaatcggaaaaaagagaaggatgagatcagatgccttaggcgaaataaccgatgccatatacgtgtgcccatatggcgtcgtgtaaagaccgcttagtttaaattttgaaattagcagataattagggtttaattatgaaaattatttattgatatttaaataattatttatgataatttatttgaattcagaatgcattttgtatgtcatatatagaaatttcatatttttgcatgttcagtgctcggcaacattggaacccggtgtatggctcagtagaatcacatcttggtattttagtatagcggggcggtataattagacattaggaatgttgagtttagtcgagaatttagaattttctaaaatacccttagtaccccttttatgtcaatttaatgtgagag

SEQ ID NO: 334780 - DNA, 723 bp, Cannabis indica
ttgtgattcaaactatatcccaaaaaagtacaaggggaagacctaaactctaacttgtgtttattgtaaggtctaatgttgggataacatttgcaaccaaaggttttgaaggttgtgtagtcgggcttagtgtgaaatagagtttccaagggtgtagactgctgcaataagggtgtaggaagtctattgtgtaaatatacagcagttctaaaggcttcatcccagaattttagaggtaaggaggcttgtgcaagaagagctaggccattttcaacaatgtgcctatgctttctttcagcaagaccattttgttgatgagtagtaggacaagggtgcctatgatgaataccacattcagcaagaaagttggtaaaggatctaaactctcctccccaatcggtttggagggttttgatggatttaccaagctgtagttcagcttcagccttaaaatgttggaatgttttaagggcatcagatttgtttttgagaaggtaaagccaagtaaacctagaataggcatcaacaaaatgaatgtaatatttatagccattaaaggatggtgtgtgtgatggtccccaaagatcagagaccaccaactgaaggggttcagaaataatagattgagatgcctttgggaagggaaacttatggattttaccaagacagcaagcagagcaaacagaaaattcagattctttattaatgccagaaatgttacat

SEQ ID NO: 334781 - DNA, 454 bp, Cannabis indica
ccgtagtgaagaccccaaagaaaaatggtgttgctaaaaggatgaaccgaaccttgttgaacaaagttagatgtttactatatatttttgggttaagaaaaccattttgtggggaagccttagcaactgcaacctaccttgttaagaggagcctgaatagagttatagaccttaagacaccttatgaaatgtggtacaacagaacctccaacctaatgcatttatgaacatttgggtgtactacatatgtacaccaatccattgacaagctaaaacccagatccgtgaaaggaactttcttaggttatgccttaggaaccaaggggtatagaatctacatttctaggaagggtaaaccaaaggttgtgatgttgggttttatgccctaaataaaactcatttcaatataatcagatttacttagtaatatagatcagaaataacatttaatgtt

SEQ ID NO: 334782 - DNA, 644 bp, Cannabis indica
ggagtccattaactccgtgtattaggtatattggggagtatacccctttttctgccgcttatcctccgtccagtggctgcctttggaggaccttttgctccgagagccctgagaaggaccggctaaacttgcggccggagcagagtgggtcggggcttgtccacttatccccgagggatttccaaaatgggaagatgctggggccaaggcttggccttgactatacccgggagtggcagaaaactgtatgccgctcaagggtggagttgttgttggcaaagtacctgggagctgagctccgggtgcgtatcctgctatcccggtaggatattatccccccataggccactatttgggcctcttccaagttgatatatttcaggactcttttctagaaatcttaaaggttggaagctccttcttgctgtaactcgttccagaatggggtccctgtgcggatgcctgcttggagaagagcaagctgttgtccgtcatctactttcttggtttttgaggcttcttccctgaacctctttatgaaattcttcaatgtctccgtaggcagctgcttgatgttagtcaaggcgctgacctccagattgaccttccttgcggcgcaaattgtctccgaaagctggtttgca

SEQ ID NO: 334783 - DNA, 809 bp, Cannabis indica
ataagttttgtcggaaaagtcattggcaccagaaaagtcgccaaaaaagttagttaccagaaaaatcactgttaccggaaaagtcgtcagaaaagtcactggaaacgtcatcgtcgccggaaaagtcatcgaaaaagtcattatggcctgcaaagtcaccagaacttaatggctcagatataactaaaaataaaaccggttctatgaataaaaactaataactcaaactggttataattaaaatataactgattatgtaacataataaaaatataaataacataaaataactcaaaccagttataattaaaatagaaccagttttattatagtgttataatgaataaaaataaataatacaaaataacttaaattggttataactaaaatagaaccgattatctaatataatgaatacaaacaagtaacacgcaataactcaaaccgattacaattaaaaaaggaaaagaagaaatcagttcctaaaacactgaaatataattaaaaacaaaactagttcacagtaaaatacttcataacacataatacctcataaaactagttgttatcccaatttttgcactctgatgtggcatcacacgatggtgacacgtggaatcaactttatgtacatgctcgcaaaaaatatgtcgaacagagcaccacatacatccgctcggagggagccctcttagccgggcattgagcaatccgcgcagcatgccaacacttagaaatttcagctttcacatcgtgagtcaccgaagaaatccctataactttggatcagatcacagagatatggaaag

SEQ ID NO: 334784 - DNA, 929 bp, Cannabis indica
tttttttttttattttttttggttattttatagtttatttataattatatatcgtgatattgatttctttatttttttagttattttttgcttaaaaagtacatttttataattttaaaaatttatatgtatatttttgttgcgaaaattacgaagtatgcaagtatatgtaatcgcttttgtagtttattacggtatgactgatatcgttctcacggagattgattatcaagtaccaatatataacctattttattttctatttgacaatcgaaattggaatagttgaaaataataaatagcaaaattaaatgaagaacaacaagaacaattaaattgatccaaatatatataaatgagaaattagagattctaatctactctactatactttattattcattattgcaatcataaaaataacttcttctcactaaatgaaagacatgcaaaagtgttaaatattcagattaagaaatataaaactcgaccttatgcaatctctctatattaatttctatgagaaatttaaataataggaaacaatgaactcagttctaaattacatagaccaatttgatactctcgttcgaaattgaaaactatgtctattcaattttagcatatttaaatcttacttttcaaattttgattcaaattcatagacagcatgtaaaaagtgcgttatcaatcacatacacaacaatcacaaattgaataaatcttatatgaagaagaaataaaaaatttacattaattcatcacaaagtttcaagagattcaattaaaaatctcaaataaaaattaattcataatcacaataaaaacacccatgataatatctctaaaagacattaaaaccacaaattaaaagaggatatagaatgaaaaaaaaaaactaaattagaattgtgttgctccaatcttcc

SEQ ID NO: 334785 - DNA, 1184 bp, Cannabis indica
tcctctccttctcttctttgtgtcctccaatgttcttgttgaataaactactagcaaaataaaagaggaacgatattactgaatgaaaaacttctgggttgagtcgcggattaggtcgctttctttaagacgttcgtgacactgcccaggagtgtgcaagcagtcagaatttgccagtcgtccccaggataaaatagccaagtcgtattgtatcggaaccccactgcactgtagagcaccatcgaatacacccaaatatatttgataccgcagatggaattttagtatttatgaaaactgtatttttttctgataagaaaagatgtattcttcccatcagttcaatcgcattatatagacaaatggattgaaaaatcataacgggaagaagaaggttaatagaatcgtggggtgagttggtttgaacgtgtcccattaactgatacgactaagtaatcagttttaattaaacatgtttcttaattaaattaaaaataaaaaataattattttattaaataatttttctgttaaaaataatatagtgtcacaccacaccaaccaacccaacccggttcggatcggacggacggcgggcgcgcacacgtgtgtggtgggtcaagtgtgtgagtcctcacccattcgcacaaaacagggtaccccttggggcccaaacccaaatgccaaggtttcactctttatacctttataaataagggttcatattccatgtgagactctttccacttcacacacactagaacacttatatattttgttaaaagattcatcaaagttctaacaatctcccacttgaatttttaagaaaatatttccatctactagtatcattcaatagtaagattgagcataaataaatgtatcttttgatttgaacctctgtgtagtgaatacaatttagattttactagagtgacccgtagttttgaactttatctctaacatagtaccacgcaacaaccttttcaagggtgtaatcaaaagcttgtgcgttaatgaccatgcacgtctatcccagtatagtgaatgctctagaaattttgcccaaaatttcataggaagcggccctactcccacattcacataggtgactctataagagtactcccgtagctcggtactccactccacttggagtatagatctcattaagagtttctatta

SEQ ID NO: 334786 - DNA, 323 bp, Cannabis indica
aaaactaaaacaacacaaaaaaaaacataaaaaacaggcataaaaaacattaaaactaaaataatgaaatgacacacctcaacaacccttttcccaattctgtctccaaacagatcagttgattgaacaatcttcacttggtatttaccctttctctaagagttaacaaaataaaaccaaaacaacaacaagacacagggaacatcatgtcgacagctactggttagtcttctcctgcaccggtagatagggctcaaacattgaaagtgagttttgctggcagccatgctcatggttcgaggaaggtgttggaaattatttta

SEQ ID NO: 334787 - DNA, 1030 bp, Cannabis indica
aagcacaggctgcatatctcttcgccgaaagttgggtcaggttggagacgaagtggcttgttggttatgaggcaaaagaagaagtggtaggcccgatgaagcggttgaaccagtccgtcaaaggaaccatgtttaaatcccaggcgttctcggagtactcactgcgagagaaactgtcctgagcatcccttaggacctttttcaaagcctccacctccgcgttccccttcgtgtattcttccatagcatagttgtgcttggcaatccagagtttctgtctttcctcatcggcaggaatgggggtcaggacaatactaggaggaacagtgtactcctccgcctcaggtgggatccccgaatcagaactgggggccagagtgtcggctcccctgggcttcttggcagcctcgacctccaccatcttgcctttatgtttccggtccataggggtgagagtctcgccatcctcttcctcctcgacctccccgtctttatcaataagaacgattttgcttaaagggaggctagaagagggattctcggagatcacctccaagtcttgtgtttgaggctgggccgagtcgggactgtaagtctaattgagggtagccaaaagctcgtgcattggcctagctgcttcaagaaacaaacaaataagtattagcacgttaacaagaaactgtgcacacaagaacaaagcagtaaaactaatcctacccagccaatctaattcagccctagcaaagtcttgcactaaaatgttggtgtcgtcatccccaagaaagctgtctgaggggagaaacttttggaattattttaccaggactttagatttactaacaagtatgttattaacatcctaaatatgaacttctaaacgatataaaataaacacatataaagtataagaaaccttacagttgttgcagcggaatataatgtctccttccactcagatctctaacccttgtatatttctgtagcagagtatgttgggttttgtgccctaagtaaaactcatttcaatata

SEQ ID NO: 334788 - DNA, 712 bp, Cannabis indica
acaccattatacataacacacgcattaacagtttgaacctgtcacatacatttaaaaaaacacaattataatttacaaatctcaccgaaaaaaccaaaaaacaattttttggggcccaatcggacccaaattagaccagtcagatccccatcggactaggccacaaaaaattaaaaaatggcattttaggggtaccatcgaaccccctatcgggggtccatcggaccccatcgacctcgtcccaaataaacaagaaaaaacaagttttatgggtgcccatcggaccctatcgggggtccatcggaccccatcggacccgaccccaaaaaataagagaaaacacactttagggtgcccatcggacccttatcgggggtccatcggagcccatcggaccaggcccaaaaaataagaaaaaacacattttaggggtgcccatcggacccttatcggggggtctatcagaccccatcgggctttcacccctgtcagcccattttcaccatgcatcgggccaccatcgggccagcatcggaccccatcgggccagacgaaaaaaattgcagaaactaggaaaattctagttttcacacgcagcaaacaatttaacagaaaaaacagcaaaataacagcaacattccacagatcaagcatcaaaacaacattctaaactaaaataataacaacaaacaagattacacaaacaaaaaaa

SEQ ID NO: 334789 - DNA, 1048 bp, Cannabis indica
cgtttccaaacacaaccaaactttccagaactgcatattatacccccaataaactatttccaagcaataaaaaaacaatcaaacctcagaattgaatttcaccattaaagctccaagtttgagttctaaaactcaaagcttggttaaaacttcaaacaaccactaattcatgctcaaattaacatagtaaatcatattttgactacagaaatcaatatctaacaactacagcaaccacaacagcaaaaacaccatttcatgcaaaaatctctaacttaaaattcaagaaaacatgaggagaagagctaaaacctttaccttgattaaaatcacctaaaaaccagctgaatctccctggataattgaagagcaaaacaaaccctagctgctgtagggtgggtcgaagtttgagagagaaaggcttccttttttgtctattttgatctttatgaaaatgactaaaataaaaaggttttgtttaattaattttcagccaaaatatagtaaataaatcaaattattagcttaaattaaaaaccactaaagacaaaaacataaatgggcaaaatgaccatttttcccttctcccacaaaataacaaaaaagggcacttaggggtattttgggaaattcaaaatcccgactacttctgacattcccaatactaggatgtgattctactagccaaacactgggttccaatgtcgctgggcacaaaacatgcaaaaatatgaattttctatatataacataaaaaatacattctgaattcaaataaatcatcataaattaacaattcaaaattaataaataattttcataattaagtcctaattatttggtaacttccaaattaaagctaagcggtctttacataatcaatcgaacactacttaaaaatgatgatggctcttttgctcaaaaatgaaatgtttcaattgttcctgtaaattcttactcccattggaccatttgtatctatatgcattaagatcccgattgatggatctcttggttcgagaaataaaaaaagaggatcgaaccattt

SEQ ID NO: 334790 - DNA, 831 bp, Cannabis indica
aaatgtgcttgcccataataaagctcgagatactttacaacttgatagggagttagtttgtagagttctctctttgctcttgttgtaattgtaactcttgttgtttgttttcttaactaaataaaagtttataaacaaaatgaaagaaaattagtcatttgttatgaaatcttatttatggatgtccaaatcaccaaattaattatcatcattaatgcttcattgtatttttcttatatttattgatttagtttcccattcttttagtgatattttgtataaataggggttcactccaattgaaataaacaactgagaaattctcatttagtttctctttctctcttcttcttttcttcttatcaattttatattattctatattattttataatatgttatcagcacgagtctttgcccaagcttcaaggtaaatattctgttgaagttcttgagttgtttaaggtcacaatacactaaatatatatttatatatatacttatctgactaaaacaatttcaagaacttttttttttatctatatatctatatattatatatgtaggtacgtattcttatatgtttattattgaattcatatatattgtatgctatattttttatctatgatatagtagagaaaatctatataaattatgcatatatccataagattatgtatccttgataaaatattgcatatatcctgaagattatgtgttctcaataaaatcttgcatatatcctaaagattatgtaaatattatattcatcatataactgactgaaatataataaaagatatgaatacatatctatatatatatata

SEQ ID NO: 334791 - DNA, 594 bp, Cannabis indica
tgtaatagctaggtgatttcttaaattttacatgccattttgagtaagattgctaatagtgtgatgtaccttgataatgatgcaaagatttggacaaaactttaggagagataccactagaaaaatgcaccaagagtgttcgaagccaaacactatgtagtgaatgttaaatgaagtctttaagccattgcattagggctgttcatataaaccgaaaaaccgcggtttaaatccggaccacgacaatccgaaccactgtaaatcgtaatcggagaaaccgtttttggtggtttggtcaatccggaccgtttacggggtaatggttcggttgccgttcataataaataattaatggttaaaccggaccggaccgtttataataaataatgaatttatatatatatttcatatatgactatatgtctaattttaaacttttttgtgtgtcaagttttttgttgcatgacttttaaatttttatgttatgtttgacttttgagaatgtttttatatcgttatttatatgttatagatctattacttatcatgttaaatataaattttgaaaaaataaaattaaaaatttagtaaaaa

SEQ ID NO: 334792 - DNA, 596 bp, Cannabis indica
aaaaaaaaatagtgctaaaatagtactcttttagtttgatttaacactaaaattaggttttggcattagagttgccctaagaaaaaaaattattagtaggataattttattgtgatggcatagttgtaataaagtaataatattatgtatagttattaaatacaaataaagtaatctcaaagaatgacatttgtcactaaattatagagagagtgcaaaagagagtataaaagagagtctccttagcactcctcatatatatatatataatataatatggttataatatttatgtattacagagggcttttgcaaaggagtgttcaaaataatttaataattatagaaaatattatgaatgaaaatataattgtagaaaaatgtgtaaactgtgtttagttgtgtacgataatatgtaattatattcccgttaattgaatcaagtacttgaatcttaaatattattttaaaaataaaataaaatattttttattacatctatttaatgttaattatacataaatacaaaataattattccttaaagaaaatatttattaattagtaaatattaaatttattgtatttttattaatt

SEQ ID NO: 334793 - DNA, 672 bp, Cannabis indica
attaatctttacttaaaatataaaattttcaataaatatggatttttcttataaataattttaatatttgatcaaatacaatcttgaaaatatttttttagacatatattgatcaaaatacaatattcaaataatcttatctatcaattttaatttttagaatggagaactgagacaatgatacaacaacctataaatattataatatggctaattaggatttttttctcctcgaactttgacatgtaccaaatcatgcctcctgaacttttaaggtcgttataaatgccccctgatctattgagactgttaaatttaaggacttttgtctaattttagtaaaaaaattctaacatggatgaaagttcaagggacatgatttagtatatgtcaaagttcgaggagcatgatttggtagatatcaaagtatgaggagcatggtgtagtacataaacaatcactgaaatagtaaaattgaatgaaattagacaaaagtccttaaatctaacaatctcaatagttcaggggaaatttttaacggccaaaaaaattcagggggcatgatttagtacatgttaaagtttagggggaaataatcctaattagccttataatgtacagtagaataacctctatttaagaatactctattcaagtaataacctctaaatt

SEQ ID NO: 334794 - DNA, 484 bp, Cannabis indica
atagagaacttatgcaaagaaattccaaagctgataataagctactaaacctacctttaagtcaaagtaggcatacttgggtttgacataaagaaaataaaattctgatacttacatatcgaggccatacgaagatagccaggattaaacactggttggtcggtcacaaaatccgtgataaaaaagaaaatagagggattttttgatttaatttcgatttaatttgaattagttatgattttttgaagttttgaaaaatatcaggaatcgtgcatcatcacacgcgcgcgcggacgaagggcaaccttcggacagcacgcgttcagacacggtttcttgtctgaaactgagcctcgcgcgcgtggagaggctgcatgcagcctcctgcgccgaggatccttggtcgtgcaccctgtcttgcgcgcgcagacagtatgcacagctcgcaattttttcgtttttcttcattttttcatgctatttc

SEQ ID NO: 334795 - DNA, 708 bp, Cannabis indica
taggaagcccatttatttctagatatataaatagactaggttgttagaataaaatatcatcatatgatagtttatttaggcccaattagtgttgggcttattcaatgaatattaattatttaatgaatggttaaattcctctcctttgggccttgtgtgagagttagggggccattagtagagggtacgacatactgaacccagtcctccctcacatgaacaaccccaattgtgaaggctcatttgtctttatttaaataattgtattaggctaattatactagttaacctaattaaaattgaattagaaacataattaattttgaaatatgtggaattaatttttcattggattaatttaaaattaatttagaaaaacacacttagtttaatgaaatattctagataatgatttttagtaactaatttatattttctaatatttaattaagtagaaaaatatatttaagttgaaaaattaatttttgttaattaattttagaccaacttaaattacgcatttttcttagaacttaaatagaattaataattaagttgattttgttcaaggtacttaaatatttatttctatttcataaaatttaattagaaaatatatttatgttggaaattaattttagaccaacttaattagattatttttcttagataattaaattagaattaataattaagttgattttattc

SEQ ID NO: 334796 - DNA, 573 bp, Cannabis indica
tgtaagtggaaagcaaatatttttatttatcggtaattatatcgctacatgtcattaaaagtcatccctaacatctagcacacaccaatatcgctagatatcgataacaacatcactaaatatcgctaaactaaaaaaaaccaagaaaacgcagaatccgagcagttcgagctccaacacacaccaatctgagaaattcgaatgatatgtgtagatttatttgtattaacctaaatacaattaaatacaactacatccaacaacaattacaaaataaattacatactcataatttttttcaagatttatgttggtaagaaagtttgggttgcacacttagttgtcaagctaagttgatggactccgacaaagagtgctccgacaaagggtgtgcgtgttttctagagagagagagacaagaatgagagaagaaaagggagataagttttagttttattatttaaaagtataattgtaactgaaaattataaatagtatatttagtatagggtgcactcttaatgggtattatccatgaatgggtaaaaattaaaaaaaaattgaatttttata

SEQ ID NO: 334797 - DNA, 513 bp, Cannabis indica
ttaatcatataaataatataatagtacattaaaaaaattattctcattagtgttaaaataaaagatataactacataatatataaaatatctcttaaaaataaataaataaattattacctagtaatacagaaataaacaggtttactcttgtctttgtatatatataataaactgtttataaaagatatataactacataatatatcattgggagagtttataaaaagatttaaggagattatatttcttctattcccattccattgcggtagcacctctgtacaccacaccagtttttcatttgctgttaataagattcctatttggttctcaacaccacacccaggtattctttgttgtttgttgtgattttgttgctttctttgtagcttcttatatcagtgtttgaagatttgtgttcttgttctttatttcttttttttttctgtagttttcttaatttatgaattgaaaatgactgtattttcttttgtacagaatggataggaca

SEQ ID NO: 334798 - DNA, 854 bp, Cannabis indica
atttaatgccgcatgggagaaaacgtattgaaactgccataagcattaagtctgacggcgtaacccctcttctgcagctattacgctatgattataagcctagtgacggctactttatgagggatcacatcagtcaagaagggataaaggattatatccacctaacccctaagatacctagggtataggccatgtatttcccattttatatctgctgggaatgtgtgcccctactgaaaaaacacagaaagtctagaagttcggttctagggatcaccccagaaatacactataaatatcccccaaacacattaagacgggggtcgagaattctgggtttataagaatcaaagagagaaaaactaccaagaacattctctataataaatactctcataaatacaaaagactcgtggactaaggctcattaatgccctaaccacgtaaaaatctcatgcattaaacttcctacagctttctcaaatatatttttaaatcggttgtcgaaaacctcggtcaacattttggtgctttcattgagagctgaaggaagcgtctataaatagacaacaaccttataagctaaaacaacaatggtggagactcgcaacacacatcagccctgtcctcctcaagacgcccaatatcctgaagatgaggaagtggcctcaagagtcaacgtgggctctgaggtaggaggagagaccaacgacgacgaatacgaaggaaacttcgacgagtacgacgcctatgacgaaggtagttacacagaactagtgctcttgagacaaaaggctgctaatcatgaagctgaaatcacagctcaaaaagagcaaaacaaaaggatgcaagag

SEQ ID NO: 334799 - DNA, 1216 bp, Cannabis indica
aagaagaagaagaggaagagataaagtttatgagaggttttttggtttggaagaacaatcagtttattaaaattaatgggaggtaattgcgttgaatagtcaacttattggaaatagtaagattggtaatagtgattgcattaaattagtcaacttattgaagagttttaaaaaggaaaattagacttttcaaaggaaagttgcagagaagatgaaaatatcaagagagagaattaaatagagttttaaaaggtaataaatacactttactataataatacacttaataaaaaaagtgaaaatgggaaatacaaacacgtgcactactatgctgttaattttgactattagactttttcactttgaaaagcttactatttaatataataaaaacatacattaagaatgtaaagggtatatatgtcaataacattatcacctgattatgacacttttaaaatagtatgatatatccctcacaaatagttagagatcagttaaaaaataattaattcatttaaattgaaattatacttttttatcttccaatttaatcccttaaaaacatataataaatattattttctatttatcataataagttgtgaagtgttatacggtttatagttaaataattaataaaataatacttataataagcttaaaaaaattaaaaaaatagaagaattaatcaaacaaatttataaatctattaaaaattttatataatgagagaattaaggagacaatagataaaagtatttatagagcgtcatgtcatcgtcttatttttatgctttatatctattctatataaagtgtgcctatataactgaaattcttggtttatgagaaatttatgggtaactttttatttttatttaataaaataataatatattatttatatataataaaataataataaaacaaatcctattaatatttgaactgatatttagcatatttcaactctatatataatcacaactataactctagaaattaaatatatatataaaataatcgtccatgaatttacactcacataattacaatttacaacatgatcaccagttgtttttattcagataaaacagtaacgagtaacaccacagtaaatatagactttaaagccaaaaaagacccaaccattcatggaatgggataaatgacaacctttccagtggctctagaagtctcaagataagcaaaa

SEQ ID NO: 334800 - DNA, 841 bp, Cannabis indica
aagatgcgcgcataataaatatgagaaatcaaaataagagtttcattaataataactttatttgtacaaattacataagggaaccaagtcccatgttctctacatgatccttgaatttatgaggtggcaagccttttgtcataggatcggcaatcatcaattcagtgctaatgtgttgaatgaccactttattttccttaacacgttctctaatagctaagtacttaatgtcgatgtgcttgcttcgacttccacttttgttgttcttagccatgaaaacagcagctgaattgtcacagaacatctttagcggccttgcaatggaatcaaccactctaaggcctgaaatgaaactctttagccatacaccatgtgatgtagcctcaaaacaagaaacgaactcagcctccatagtagaagtagcagtcaaagtttgtttgttactcctccaggacacagctccaccagcaaacataaacacgtaaccagatgtagatttacgtgaatcagtgcaaccagcgaaatctgagtctgagtagccaactacttctagattgtcagttcgtttgaacatcagtttgtaatccttagtaccctgaagatacctcattactttctttgcagctttccagtggtctatccccgggttactctgaaatcttcctaacattccgacagaataagcaatgtcgggtcttgtgcacacctgagcatacattaggcttccgacagcagaagcataaggaatgttcttcatttgttctctttcaaaatcattctttgggcactggctcaaatttaatttatacccttcataattggagcaacgctcggtgaacaa

SEQ ID NO: 334801 - DNA, 2339 bp, Cannabis indica
tagtgattccacacagaaaaaaaataaaaggtgtaagaataaaaatatgaacacacgcttttttacgtggtattgcaattaaaattcttcatagtccacgagtcaatcttattcagatttttgattgttattcagggctcctcttgtatgagtttttccgtcctttttttgatcttgtctgccactatatataattacatagtggacagttaattacaaagttgactgtaatatgtttgcaaaaaccatccctaaaatcgtgggagattacatatcacgtagtgtaaatgcggtttatgatttggaaatcatatggttcttatttacaaagaattctttgaggctaatttgaatgttatcttcaggctcgccaggattgcaagcctcgctgatgctaacgggatgaaattatatgaagtcgtcccataacgagacgggcacctcgcttacttgtgcttgagccaaaccgacttttacacttagtttgtacattgtacgctacggactttcacgattgatacgtgtcgctttctttggtgccttgctatttgcattcagcgacatatggtttctcgctaatatactaagtgtcagtttgtacacggattcctcgcctaagaccttacagttagcgggttacaaatatactctgatactaacataattaacgagttattccataagaaggaattgcatcgattcacattccctttatcttgacacgtgtcctccattgagatggtagccaaatttcgggtgtaacacctgtagtccacgtgtatggttgtgcaccaaaatcctgccaggtccaatcctggctgatcaagcacctgtaggaagcaggctagttggcctgttgctatctataggctggtcggccagcccccttgaggtggctagtttagggattttgggcttacaatgttgtcttgcttctccgttttggggcaatgttgcgaggtaccaagatcttgcggtgttagtggtggaggtgttggggattattttacaaggatctagatttactaacatgtatgttgatgaacaccctaaatatgaattatctaaaacaatggaactaaacacatataaagttaaggaaacctgacattggttgcagcagaataatatgtctccttccactcagatctctagcccttgttcctttctatcacagagtattattaagatctgagcccgattctccttcagctggattctacacagtcttacaaactatgattgagtacttgacttgttatgggtggccatgtactctttcactatagggcccgaaaatatgaagagaaagagaaggagattcaaattatataaaaggaggttctcatgtttctagttgtctcacaaagaatgaaaactagaatgttaggtcggatgagaatgagaaccatgttattcctcaaataggatttctcctagggttaaatttaaattatatggcattaaaaaatgataaataaatggctaatttttttcttaagtggtcggcaatacaatgtgggccccactcgttacaattttgccattttattcaacaatttatcctttctttcataaatgctatattctcccatttaaatcctttaaatgtcgaaagtatttatttaataattaaaatttattatcatataaaattgtcatttaacatattaagtctcttaatcaacaaataaaccctaaaacctcttttcttcacaattaagcccttgcttagtaaaaattcataaataagacatagtctaatttaataattatgcttgattaattaaaataaattaactgagtcttacaagcagtattatctcaactagtgtggggaccatgggcctatatcaccaagcttccaataagcagatctagaatttaccaagtaaattctctaacttattaattcctccttgctccactataagttcagaattgcactcttaattatgtagaacgctctatatattccaaggtatgaatacgttatgaattatacatcgttctaatccaaataaacaaagatcctctaaagatgatttacattaagtagggacaaatttaccgttccacccctcaaggtattttatccttaaaacacttagcttactattaatgatatttcagtaaactaatataattgttgaaataagagctcttccatttatctctattaagccaagcttgaaggaaatcatcatttcacttctatgtctagattgaagatatagattccgtatctatggttagtgttcccactcaattgtactatcatgttcaaaagatgtatgtgttacccaaaaccattggtaggctttaacggaaaactctaa

SEQ ID NO: 334802 - DNA, 749 bp, Cannabis indica
gcgattttccaattcaaccaatagtacatacctagtgggatcataggcaccctcactcctaggtacagaaccaccagcattagtattggtttcctcattcctagtttcatggttttgatcatgaccacattaccttcttaataaacgtgttgaacatgttgttcttgaagtgtgtggtctctgtgaacccattgcttctttcccaggacgacgattagtctctttaggatgactattatcgttttcatcatgatcatccatgtagaaaaaaatttattttcgttaggaaggatttttctaagtttttatcacgcaagctctcaatgaaagcaccaaactgttaacgcagattttcaataatgaattaataagcctttatcgtgataaattaaacacagaaactataaggaatttgagaagaataataatagcaataatgacactgggttttttacacgattttacaattaactcaacatagtccacgagtctatcttattaggatatttctagatacagaattaaggttttacattcagtgatctcttttctctcaaagattttccgtccctttttctgtgtaatctacccttatttataggaatataggttggcagttatttacatttgaatttgaaatgcataacggtttccacgaaacgtgggctttgaccacgtcccattttaacacgtgtacagctaaaaatttgcataactgtttgttactcttatctttgaagtaatggata

SEQ ID NO: 334803 - DNA, 1223 bp, Cannabis indica
atatatatatataatgacctggatcaatcaaaaatgtataggggagttttttttttaggaaattatactatatacttcttttaaattaatgtttttaatttttatattctctttcaaaatctattatacctacttcttttttcaatcattctactaattttacccctattacttcacgatatttttcattcttctctaattaaaattttgctccaactttccctcaaacttacatatctatctccaaagaacacacaatttattatgtttgaaattatatcttaatcgataatttgagtacaatactcataaaaagagagtgaattaaattttatttgaagataaatttggctaatgtataacaaaaaaaaagtattcttcaacttctcccaatttttttttgtatttcataaatttttaagtacactttattttgataattttttattttttctaaaatatatatctttaatttatacacattttttaagtaaaaaaattaattccttctcgtattcttagaaaatttaaataagaaaaaaattaaataaaatattatataaaattttattagaaaaaaaaacacatgatttaaaaaaaatgtgaaaataatcattcgagaaaataatgtgaaaaataaatattaaaaatgatttttaaaaattaatttaagttaatttttttattaatattaagtgtctttctaattctatgggttgcaaataaaactctgaattagtataattttattagtctgttatttttttaaaagtaatttgccgtataaatacataagtttaatttctagctgcaaataatactttataattttagaacttctgtaggtacctgattaagtaaattatcacgtggcaattcttgattggtctaaattattaaatttttattatttaaaaaaattagtttaaatataccaataagaaaatgacacgtggatataatagcttaacatttaacggttaggtacttacagagttccaaaaatataacttaaatattatcactgctaaaaattaaacttaagtatttatttgtaattgaaagttaaacttaaatatttatgccgcaaattatttttttatgtataagatgcagggccggcccaagcattgggcagcttgggctattgcacaaacccctatttttctaaggcccattttttttttttaaagaaaaagtttatttttttatcttttattttt

SEQ ID NO: 334804 - DNA, 541 bp, Cannabis indica
tattttaaatatttacaatattgtaagtatattttaatttgaattaaaattttcttatataaaatatttatataatttttgtttttaaatatatataataatattataaattaataaaaaatattctgctaagtaataaaatattctattaaaattaatgaaagaaatcacaaaatattgttaaactaaaaattctgttacatactcacattttatatagaattggtatatatattttacaaaaaaaaaaaaaaaaaagctttgaatgattttcttttccaaaataacttttgcatgattatggcagttcaggttgtaaaaaaaatattataatgattagttaaaaatgtaatttacaaagttaatgcaatagcgaatgttaaataataattattcatattagtaagtcacacatattgtttaacatattatcattaggtttcactccacttatatattgatcgaaaagaaaaaaaaataatacaagtacactaaatataactacaagactaatataaaatattcacaactaaaattttct

SEQ ID NO: 334805 - DNA, 1101 bp, Cannabis indica
agatcctggtaaaataaattccaacatatctataggaagtctttgactcctagacatagactttatttatctaaggaacatttttaactattccagaaaagataaaagctaagaaaagagttccttaggatcaacagtgagagttcttatgtatgctcttgtatgcattagaccagacacctactgttgagtggaagtaatgagtatgtatcagattaatccaggaaaagagcattgaaagacaatcaagtaaaacttaagatcaggaggaggaactatatgttagttgataagggtggtattttatactcttatactacaccaaattaggtttttagacttgccttcatgctagaaagtttactgatgagatggtgattactctggggtggagcagtgattttggagaagtgtaaaaacctatctgaagtctctaactctaccagtgagactgaatgttaaagttgtgggaaatatacttatttagcctatgaaaagttttatacagtttttggcattgtacaaacaattaattaactactagcgttatctcttgactaacacagaggtagttgccaaaaagtaaagaatccagtatccctagaggagtatacatatagagaggaatttcacaatattatggattttgtgactaatgagatgtaatggtggataaaggttgtattgagtacaacttgtcaggttctattacagagaaaatactacatactacacttgatctggatatcaaggtgttgcgattaattgaaatatgcttttgttttagattagtgcaagtgggagttcattggattttctatcctaaataaaaccaatttcaatatgatcagatttactaattaataaaagatcataaatcatttttatgttgcgtggttcacataatttatttcataattatatatatttaatgtataaattctattaagtccagaacatatatatatttgttcatgattataatgtcgtcaacacagtggaacataatcatgattatatgttcaaaagtttgagtcccatgatttgttagtacactggattttgactgacatgataatcaacgataaggtatacttacac

SEQ ID NO: 334806 - DNA, 935 bp, Cannabis indica
tattagccccggcaccagatctggaagttgctccacggggttcgctcgcacctcggcaacgaacggcagcaccaccatttcctgaagcgacggagaaaaaccagcagctgaagacgtcgccggagaagagggacgaactgctggtggcatcgttgggatggatttcatcgccgatgccaaggccgatcacgttgggggcagtgacgaagccgaatccacaacggaagtcgtcgccggagtcggagaagacggaggcgtggacgctggaagcttcgccggagattcagagcttgaagacatcttcccaaggagcagtggcacatgagggtcggctggcaaagaagatgatggtggggaggagcctctttgcactcaaaccctaccaagtaaggcccaagcccaattccttaagacttacttcagctttggcccacaagagtaaaattaacccaataggtcactttgatttacttaaatgggaacccacccactttattcctatgtctagtttagtaagtgagggtcattttgggaaccaaactcctttctttactccatcttgggcccagacattccaaagtttatattgctttgaccaagttgtggtcatggcccaactaaacaaagaaatgagccattttatttttaaaggggtgcaactttggatgtcctacccaaaatgttacagtcacaatcatgagacaagagatggagttgacagattagggaaaaatgttttttctgtattatattatttctgatataaaacagtatatataacatgtacaataagtctataaagagaaacatatcaaataataaagatacaatgaatccctaaactaattccctaaaaatatggtacaataaaaacattattattatacagctatactgaataataataataatttaggaaagctgattttccaaca

SEQ ID NO: 334807 - DNA, 525 bp, Cannabis indica
tgatggaggggaggagcttctttgcactcaaaccctaccaagtaaggcccaagcccaatttcttaagacttacttcagctttggcccacaagagaaaaattaacccaatgggtcactttgatttacttaaatggaaacccacccactttattcctatgtctagtctagtaagtgaaggtcattttgggaaccaaactcctttctttactccatcttgggcccagacattccaaagtttatattgctttgaccaagttgtggtcatggcccaattaaacaaagaaatgagccattttatttttaaaggggagcaactttggatatcctacccaaaatgttacattcacaatcatgagacaaaaaatgggaaagaacacttgaaggtgacttttttgctcataaatagtgaaggttgtcatgttattggcggcaaaaataaaatacctttggtggatgagaagtttaatcttggtgctttactagtgccattcaagcattgggtttttgatagagggcgccaaacac

SEQ ID NO: 334808 - DNA, 614 bp, Cannabis indica
cctggaggcctttggtgttcagctttcacttgctgacaagttaaacactttgcaatatactctactatattgttcttcatcccaggccatcagtacatagactcaagatcttgatacatttttgttatccctggatgaactaaggagttgtgtgagactcatttagaatttctctcttaatattgtcatccataggaatgcaaacacggttcataaaccataacacaccattattatccactgtaaagtcattggtcttctcagctgaaacattgtcttgagacttcactaagtctgggtcctgatattgtgcttctttaattctttccaggagagtagactacaaagtaatgttagctaactgtcccacaataaactcaatattagctcgggtcatttcatctgccagcttcttggagatctctttcattgtattcatctagttttgaccctttctagttaaggcataagctacaacattggccttcccaggatgataaaggatttcatagtcataatcatttaccagctcaagccaacgtctttgtctcatgttcaggtctttttgggtgaaaaagtatttcaaacttctgtgatcggtgtaaatctcacat

SEQ ID NO: 334809 - DNA, 685 bp, Cannabis indica
ttgaacgcttgccacttgagcttgaattgtttgggtagttgggaagttgggcatatgttccagtggaatgagcctttgacttgccaggcatttgttcacctttcgcttgttgaataacttcttcgagcttgatgaagccttctgctcgatcaaggaaatcactcattgagtttactggcccattcttccttatatccttccacagttcaccgaggacttcgatgccccccagtattgcagataactttccatcttcagttacccgtgaaactttggttgcttccgtcatgaatctgctgatgtatgcccagagtggctcgcctggtcgttgcttaacttcgaccaagtctcccaaacgcaatgggagttggcgcgagaaggagaattatgcatggaattctgaagagaaggttttccatgaactaaactttccaagagccaacttgaaataccattgctgagcggcttctgacagagtggcaggaaagattctgcaacatacatctcctcgtaccccttgaaaatccatttgcatttcgaagtacttgagatgggaaatgggatcttctctcactgtgtacattttcaacgtctgcattttgaacttgtggggcagtggcaggagattgatctccagcgtgaaaggagttccgcgtgctcggtctagctcaagatcattatttct

SEQ ID NO: 334810 - DNA, 1501 bp, Cannabis indica
tacttttcgtcagggtcttttcttacatcgaccttggggagtaacccgagttatatttggagaagtgtgtttgaggctaaggagttagttcgggctggggttcggcgattggtgggtgatggttctaccgtcaatattttgtctgagccttggcttcctgatgagatgaaccctttcattgagtctgtccatccaggtcttgtggggaagtcggtcgactctttaatgaaagtcgatgtaaagaccgcttatttaaatttggaaattagcaaataattagggtttaattataaaaattatttattgatatttaaataattatttatgttgatttatttgaattcagaatgcattttatatgtcgtatagtgaaatttcataattttgcattttcggtgcccagcaacatggaacgcggtgtatggctcagtagaatcacaatctaatattttagtataacggggcgatattattagacattgggaatgtcgggattagtttggaatttagagttttccaaaatacccttagtatcccttttatgttattttgtgtggaggggcaaaatggtcatttttccccatttgtattttgtcctttagtggacttagttatattttattttcagctattatttactattgttggctgaaataagttgattaattgttctttgcccattttattgaaaaattaaaagaaagacaaaattccattttttctctcaagctttcctctctctttcgaatccacctagaggcagctaggtcttggtgaatttttctgcatttcaagctggttttaacaaagatttagtgatctcaagttcttggtaagattcttgaagcttcctcttaagttttttgagtttaagaaaagtaatttgttgcatgtttgatgattttgtggttgtggctgtggctgttgttattgtttattgttgttttctaaagtttaaatatgtttaattgagtggattagaacaggttttgatgcatgttagttgaatttaaccaagtatggagttttaaactcaaactttgattttatgagtgaaatgttgtttagcttgctatagttgttgtggttagttgttgttgtattctgaggtttagatatgaatttttatgttgttaaatgcatgaattagaggttgtttgaagggttagtcaagttttgagtttttgaactcaatcttgaacctttaatggtgaaattcgtttctgtgaatggatgattgttttatcacttggaatatgttcattatggtctaaatagcaggtctggagagtttggtttgatttggggttgaattgcatgacttatgaatttttgaaaaattcctgcactgaaccagaatttcggttcagggaggcctgtcggaaccggtctaccggttggcttccaggaatttttcccacaaccggaattccagtcggggaaccggtctaccagttggggaaaatttgggaaccctagttcttcccatttttgtgttatt

SEQ ID NO: 334811 - DNA, 770 bp, Cannabis indica
caagttggtactcgtgtgtaagactgtgaagaatccaatcaactaaagcagaatcgggctcagatcttggtgatactgtgctatagaaaggatacaagggttagagatctgagtagaatgagtcatttaattccgctgcaaccaatataaggtctcttgaactttatatgtgtttaaattctattgttttagaaattcatatttaggatgttaaacaacatacatggtagtacatctagatcctggtaaaataatttccaacaactggcctcagagccatggtaatgatttattttcatcaaatatgaatttaaacgatgtttgtgttgatttggatgtgttcatgttggtttatgtgcatatttgatgattgtatgaaattcaaaatttacgatgataaattttttatttctttttgaaagtatttttcttgacaatagatgaaaaattaataaatctaggcttttacacaacttaatttgaattttttatgaattagttataatttttttaaatttggataaaaatatttgaaagtgagcaacacacgtgtgagtgcggactgggcattcacgtggcttcagacagcccatgactgagtttactcggacaaaagctgtcttaagccccagctaaccgagctagcttggccaagaaggctgcaagcagcctcttttcacgctcaatgccccccacacgcgcgcgcggggagtatgcattgcatactcccctgtgcaatcttatttttgtgatatcttttgattcaaaaa

SEQ ID NO: 334812 - DNA, 1254 bp, Cannabis indica
aagagattcagtttgataagacaattgtttatttattttgataatgttctatttttagaagtaacttatatccacttttcatacataagacttagccaaggactcctcacagatttcagatttatcagaatcagattcctccttaatggaattattcaagcacaacgatctttctttcatttgtgagtcacaaacaaacttagaagaaactgatgttagtgcaacattgttagaaatatcttcatcactatcaattttatcgtcactccatgtgacattgaaacttttttttattatttttcaatgtatttgcatattcagattgaatatgtccaaaacattcacattctcataattgaattctcttttgattgttagtcattgaaggttttgaaaaagtatatcatttggagaatttgggaaaattctttttgtcacttatttttttcatgtatttgtgaaagtttttagttaaaacatccatctcatcatcatcttcttcatctaaaatttctttttcatcaacattaaaagtaatacctttacctctagcagggatggacctgggtttgaccttctgcttgatttgctgattcaactcaaagttgcaaaaaaatccattaactcctccaccttcatcttgctaaaatcgtttgcttcctctatagccaagagtttagtgtcaaacctgtttgaaagaactttaataatttttaaacaagaacagattcatcaagtttttcactaagagaaaaatattcattagctatatcatataatctttcataaaactcaaataaaatttcagattcagacattctaagatcatcaaatttggtctgaagcataataaacctagaattcttaacatcagaagttccttcaaattgagtttgaaagatttgccaatcatctttagcagaaacacatgaatatataagtttaataaaaccctcacttattccattaaatatagcatggacgacttattattgtaaggagacaatttatcatcttcattagaacattaaagttcaagttttaacttagaattacctttggaatctaccacaataggatgagaccatcctaaaagaattattatccatgctttatcatcttgagacttgataaatgccctcattatcacattccaataaggatagttagattcattgaggagtggtggacaaataatagaacttccttctgcaaagggaaacatattgtaaaaacacacaaaaaaaaaaaaaa

SEQ ID NO: 334813 - DNA, 649 bp, Cannabis indica
agagaaaaacataatgagagagtaaatgagatttttttttagtagtttattcaaatggggtgaactcctatttatacaaatatatagctaaaaatgagaaactaaatcaacgtaataaaataaaatacaatcaaacaattacgatgataattaattttgtgatttaaacattcatatataatatttcataatatgggtaaaatcatactatttttactttgaacccgaatctaaatcgatccaagagctaaacccaatctcaactccaaccctggacccacaattcggactcaacttgacccaacctaaacccacacattggacctgaccctaacttggattcgaacccggactccaaccttgaccctttcttgacctgaacctcgaacttagcagaaaacttataaaaatactagaatttgggttaatttttacaaaaatactgtcacacggaaaagtttttaaaaatactgtgtttttataaaacaccagtagaatacaaaacagaacaactcaaaacaacagtagaacaattaagaaacaccagtagaacaccagtgaaaacttaacacaatatactgcagtatgaaacttataaaaaaatacagtaaaaaagtaaaaaaaataccgcctgacaatatttttataa

SEQ ID NO: 334814 - DNA, 1646 bp, Cannabis indica
agggtggagtgggcttttcttgaactcatgatgcttaaaatggggttctctagtcaaattgtggcattgattatgttttgcgtatcctctgttacttacaagattactcatgggggtaaagtttttgggtccattgttcctagtagagggattaggcagggtgatccactctctccctacctatttttgatctgtgctgaaggtttctctgctctggttaacatgtttgtgcgtaaacattggctaacagggtgtcgtgttgctcgaaacgctcctgttatttctcatatgctgttcgcagatgatagttatattttttgtacagctagtgagcaggaggttgatagtgtacttcggcttcttgatatttatgagcgagcttcgggtcagaaaatcaacttcaacaagtcatcagtcttctttagtaataatgtggcttctgttgatcgggatcatctttgtcaacttcttggtatggcccctgcttctgatcatagtacttatttgggtctaccttgtactatgggaagaagtaaaaatgccatcttgggttttctaaaagagaagatgattaagaaaattcagagttgggaaactaagtttctttctaaggccgggaaagaggttttactgaagtctgtggctcaatctcttccaagttacgctatgagtgtatttcttctcacaaaagaaatatgttctagtcttgaggggttaatggctaaattttggtggaaatcacaagggaagggttcggctaaaggagtaagttggctcagttggcgtaagctttgttgtcacaaagatgttggtggacttggttttcggaatctcagggactataatctggcctttcttgggaaacaagggtggcgtttgcttactaatgaaaattctttagtagcaagagtttataaggcgagatatttcccaaaaggtaacttcttaactgctgagttaggacctaatcccagctttatttggcgtagcattttggaggcaaaagatgttgttcaggcgggtgctttacgagccatctctgatggaaaaacaacatcaatcttgaaagatccatggctcccaaatgttgacaacaaattcgtaacatcttaccacccaagcttcgagggtagatcggttgatagtctgcttcaaatgtcttcaagagaatgggatactgacttgatccgagacatgtttaatcaacatgatcgcgatttaatcctctccattcctttgagtaactctcgtgggagtgattgctggtattgggctaaggaaaccagtggaatttattcagtccgaagcgcctacaagcttttgcaagctatcaatggagattggccgagtacaggaggtgaggctcattggaaacaaatctggaatttacatgtccctgccaaggttcagcatttgatttggagagttcttgcaggctgtcttcctaccaaattgcagctctcgaatagacatgttccagtcgacctcacttgtcccatgtgcaaactggaaccggagacagcttctcatgttcttctcaggtgcaatttcgcacgttcctgctggaacttggcctcggctgatgctgctgggactggcaacgctgacttcagcagctggttttgtgatttattgctgcattgcag

SEQ ID NO: 334815 - DNA, 667 bp, Cannabis indica
tagactaagtcatcaacacaacattctagtattaacattaatgtaaaatacttgcttaagattaagtaatcattagagataccataaaaaatttcatgaggattaggtgttttttcccaagtcattcgaatagactttgcgaaattctcctatcttatcctcaaaattctgataagttatttctatccatatgaatggttagatttactttctcagttgaattctaaagttcctatcatgatcataacatagtaagctatcactagtgtcatccaaataaatatgggctttgaattttaaaattctcccactcaaataaggtactgtgataccatgtccaagaactttattgttatcaatttctattacaacagtaatatattaattggaacaaaaatttagatcaagaatatgttctaataatttgctaatttgttcattacattacatccatgtctaatcaaaatatgtgtgccgtagagatactgtggtgtattgagtatagtatagagttcaaaatgaactacatatgtcaatatctttatccacccctaagtattatagaaatcatgtggagttatgaataaaatctagagttcaatagatataaaagattgttgaattgcatatattacttcttaacttcttccacccctatcaaatcaaa

SEQ ID NO: 334816 - DNA, 1125 bp, Cannabis indica
agtgttaaccggtcagtccttgagacaagttttagcaaaaccagatgcttctggaagattaataaaatggttgattgaactaggacagttcgacataacatatcatccttgaacttccatcaaggcccaagatttggctgacttttgatagaaggtataactccaggagaaattcgacctattcagcgagacgcggaaacctggaagatatacgtggatggtgcatccaacaaacagggttcgggtgcaggggtaatattaatataatcaaaaggctttaagtttcactgctctgaggttccaatttgacgcatctaataacgaggctgagtatgaagccttgatcgccgagttaaagatagaagaggcattgaaagtcaaaaatctcattttgtcatagtgattcgcaactaattgtgaactaggtcctcggggaatactaggccaaaggcttaaaaatggcgaagtatttagagaaagttcagaagaacttggaatgattcaattactttaaaatcaaacaaattccaagagagcaaaactccaatgccgacgccttagcaaaactagcctcgcagaagacctagatgaattgaacttagttccggtagagatgctgagcgagccaagtatatgtgaagctgaagacgtcgagatgatagatagctctcctacgtggatgactcctattattagtcatttactcggcagacaacttctgaatgaaaaaaatgaggcacgaaacctattgtattcagtgccttgctacacaattatcgaaggcaaactatatagaagggggtattcaatgcccctacttcggtgtgttctccctgtaaaagcgaatgaaatcatcagagaaattcatgaaggcttctatggggatcatgcgggctggcaaagcctgtctaaaaagatcattagataaggatattactggccaacgatcaataaggacacacatgagtttgtcaagaaatgttataaatgtcagaggttttcacatatacctcacgtaccgccaacagaacttagaatgatgacaccaccctacccatttgttatatgggttattgacttaattggggcattacccactgggtgaggaggagctaagtatgcagt

SEQ ID NO: 334817 - DNA, 518 bp, Cannabis indica
ttgtgtaatttatgtttaattcctcttgttgttgtggatccctttctgctgcaagacaatgcagagtggaatttcgataaataaattatagtgacattttatgttttgctgttgattcttatatttggtctagttgttgtctagtgttttgtcttttggatagtccttttgtcttgagcaggttatccacattcagtaagtatttactttttctttattttattgtgacatgttcttagacgtagttttgaatttcgaaagaattagtagatatatttttttttttgaattaaagtagatatatttcgattttgctcattaatagccatacaattattacttgtttttatttgtagtgacaattgaaaattatgatatgttcttggtggaagggctcttcaacaccttccctcgaggtgatcagttgtggtagtattgtttcactgaacctctatattatgagtgctttaatgattatgtcagaaacttgaaatttttttggggcatattgtatttct

SEQ ID NO: 334818 - DNA, 465 bp, Cannabis indica
ataaattttaaaaaagagggtaaaaataaaagaggacaatataaaaagagtatagagtgtaatttcctctatatatgatgcacgtgtttaattcagttgaatgaaatagtaattgtaatggtgatagaaatataatataataaaaatagtaataagaattgattgttatatttggcttgttgttggaaatattgaaataaagggtaaatggacaaaattatccttactttgataagaaaaaatataaaataaagataagataattattttttaagtaataataataagaattcatgagtgttgagaatcatggggtttcatctcaaaaccaattgactatgagtggagtagcccatgttcttatatatggctcaatacttttacatttaatccatgtgggacaatgttctccaatatcccctcaagatggtggctattttgctcaccaatcttgaatcaccttat

SEQ ID NO: 334819 - DNA, 717 bp, Cannabis indica
ggtgtttactcttgggggtggagcagtggtttggagaaatgctaaacaaaccacaatttcagactctaccatggaggcagaatacatagctaccgcagaggctgctaaagaacttgtctggcttagaaagttcttcacaggactcggtgttgttcttagaaaggaaaaactactggtttttctttgtgataataatggagacatagcaaatagtaaagagcctcgtagctacaagagatgcaaacacatataaaggaaatatcacatcatcaaagagtatgtggcaagaggggatgtacgaagtgagaaagtggacactgaggacaacctagctgatccattcaccaaagttttggcaggaactgcatttgaaaagcactgactgaatttaggattaattgaaatgtatagattgttttatattagtgcaagtggaagtttattgggctttgtgccctaaataaaattctatttcaatgtaatctttatcatttaattatcaataaagacacaaaaatattttcatcacttatttagtgtgtcatttggttcatgttatcatttatatgtttattttatttataaattcatccaaacccttatcacattgatattcttgtttattgtgtcgtcaacacagtggaaagtaatcaaaattatgtgattaaatatgtattcctagatttatcagtatacatggtttaactgatatgataa

SEQ ID NO: 334820 - DNA, 947 bp, Cannabis indica
tttgtgacgggactaccccgaacaaccaagcaacacgactcagtttcggtaattatagacagactcacaaagtcagcacactttgttccagtaaagtctacctacaacgcagagcaatatgctgacctgtacgtgcaagagatattgaggctgcatggagttccaaagacgatagtctctgatagaggttcaatattcacctccaagtttttggagagtctacataaggcaatggggacgcgattgaaattaagtacagcatttaatccccaaactgaaggacaatcttaacacaccatccaaatactcgagaatatgcttcgagcgtgtgtactagacttcactagctcgtggagcaagtatttacccctaatggagttctcctacaataatagtaatcaagccacaatcggaatggcaccatatgagatgttgtatggacaaaaatgcagatcaccgcttcactgggatgaagttggagaaagacgctatttaggtccaaaagcaataagagaggcttctgaagcagttgaaaagatacggcaaaggatgctcaccgcccaaagtagacagaaaagttatgtagatctgaaaagacgggaggttgaattttctgtaggggacttagtgttcttgaaggtatcacctatgaaggggattatgtgtttcggagaaaggggaaagttaagcccaagatttataggtccttttgagatactggacagagttggtcaggtagcttaccgtttggccctaccgccaacattagcaaaaacacataatgttttccacatatccatgttacggaagtatgtacctgatctgacacatgtgcttaaatacgagaacttgaacttgcagcaggacatgagttatatggaacgttgtgtgcgcgtgatagaaaaaggaacaaaagtcttacaaaataagactatacccttagtcaa

SEQ ID NO: 334821 - DNA, 517 bp, Cannabis indica
ataatttacattgagtagggacaaattaatcgttctacccctcaaagtatttatccttaaaatacttagctttctataaatgatatctcagtaaactaatataattactacaataagagctcttccatttatgtctgttaagccaaactcaaaggaaatcatcatttcacttctatatagttataaaagctatagattttatatctatgattagcgctcccactcaattgtagtatcatgttcccaagatgtaagtattgggtctatccaattggtcagcttttgtgacagtcagtagtctcacgattcgtaaggagaaatactgagtaaggtgtgtaatttcaaatcgcctggggaaggtcaagtgtgatgattctgaggctgtgtaggtatgagactacatagttgaagatagcttaaatggattgattgtatgcatataccaaatcatgcccctgaattttcatccatgttataattttttttactaaaattagacaaaagtccttaaatttaa

SEQ ID NO: 334822 - DNA, 677 bp, Cannabis indica
aggtatatcacatcacctaatcaggtgagcccatatattatatctatagtatcatcacattatcattgcttaaccagtcaatcttttcattatacaacaatattaattgtattaaaatacaatgtactatgcagtacaatataattttcttaccttaagtttgggtttaggtaaattggccgacctacttagagtacgatcgatgatctcgagccctatgttataacaataataaattaataagtatttatctcaaaacactgcttagcagttgcaaaagacagttttgggtttcctaccaaaccctgtagttcaaatatactaaaataaaacttatattttggctctaaaacatacactatatggtagagctcgtcgcaagcttcgaaacggtagatagaacgtccaaaatagacacccgagtgaaaagttatggccaaaatacaaaattcgacttttccaaaaactgaccaaacagaattccggttggtacatctggaattctagttctgaatagccaggaacaggattttcctcaactttaagccctccaaactagctccaaatctaacgaaatcattccaaacttcacaagacacacacacacacacacacacacacacacacacacacacacacaacacacacacacacacacacacaacacacacacacac

SEQ ID NO: 334823 - DNA, 589 bp, Cannabis indica
ttttgttaaaattatttttattttaaatatgtcgatttttttaatttttatagattgttgtgggatgtacatacattatgtcgtagaatatatttatttttgttgtatgatatattattatccttagatgatatttatttttttattttttatgtataatagtggtatataattttattagcataatatatacatttcaatgtaggtatataatactattggtctgttacatgcatacatttaattattatttttatatagtacaattaagctagaacttaactatctcaagattgagatcaattgacccaagatcaactaagtgacattgacttagaaaagacataacacggtaagtttatgatatcttttctattgcaaatgtcggtccagtccgatgtatagccgatatatcaattactagcttactttgctaatgacctggaaaggatattccacttatacaagtataagtaaatcacatcgctgattatcacgtcagtgtaaattcagtgtactgataaaattttgggactaagtagtttgaagcatgttatcatgattatttctactgtgtagacaacactat

SEQ ID NO: 334824 - DNA, 566 bp, Cannabis indica
ttcttccattgtttcatacaaggtcaattctaaatttgttgcttgccgagagggttatgccacttggtttagcctcaaaggcttggccgcacctgcaaactgcgcatctcaaactcatataatattatgtggatcgaccataaatattaaatgttacaaatagacttttgactcattagacattacatgagctttgatcatgttattttgtacttggaatacatgtattgaatattttgatattatacaaaatatgttatattgtaattacattatttggacaaagaataggcattataaaatttaataatttcatagttataaaaaaacacaaaaacataacattaacaaagtgctattattgaaaaattatagcaatattaaaatgtaatatttcttaacatgtaacataataataatgtaattaaaaattatatgattacattttaaaaatgttattaaataaatataatatgagagaaatgataacattaaaaaatagttattactaagaattataacaatattaaaatgtaatatttctttatatataacataataataat

SEQ ID NO: 334825 - DNA, 943 bp, Cannabis indica
gcaacagcagggcatgaaatatttaagcttcatggatgcttattcagggtacaatcagatcaaaatgcatccaccagaccaagaacatacaagtttccgaatatgtatgggtctatattgttacaaagtaatgccgtttggtctaaaaaaatgcaggagcaacataccatcggttggtaaacaaaatgtttaaagaccagatcgggcgaaatatggaagtgtgcgtggatgacatgctcgtcaaatccaagaaggctgggggtcacatatatgacctggacgaatgcttcaaggtcctcaggaagtacaacatgaaactaaatctcttaaagtgctcctttggagtcagctcgggatattttttgggctacattgtcaatgcccgacgaattgaagccaatcccgagaagattcaagccctcctggatatgaagtcgctaactaaaaccaaggaagtacaaagtttgactggttgggtcgccgcactcagtagatttgtttcgaaattaacagacaagtgtgccccattctttaacatcctgggaggaaacaagcaattcgagtggacggaggaatgtgaaaaagccttccaagagctaaaatcacaactcgcaaaacttcccgtactctcaaaacctctggacggagaagaacttggaatatacttagctgtcacggagcatgctgtgagcgtcgtgctaatcagagaagagaacaacatataacacccggtctactacatcagtaaaagagtcattgaggtcaaaggccgatacccattgatagagaaagtcgcttacagccttattctaacaacaagaaagttaagaccttattttcaagctcaccctgttcgggtgtacactgaccaaccattacgccaaatattgcaaaagccagacgcctctggacggctactcaagtgggtggtggagttgggtca

SEQ ID NO: 334826 - DNA, 555 bp, Cannabis indica
gaaaaaattgaaaaaaaaaaagacacggggggagctcagtcaggctcggacatgggggccaaacttcagacaaggccctgtctgaagggcctcttgtccgagcgagctgcccacaaaacctccatccgctcacgtgctagggtgtaaccctagcctagatattttttaaaacttcaaaaaatcataactaatttaatttaaatccaaattgagttctgtaaaagcctaattcattaatttttcaccaactttcccaaaaaaaatactttcaaaacgaaaataaaaatattttttgtagaaattttgcaatttaatccaatcatcaatcaagcacataaatcaacatgaacacattcatattatgaaaataaatcattaccatggctctgatactagttgttagaacttgttttaccatgatttagattaactaacgtgtatgttgattataattctataatctaacatttaagtatgaatttcctaaaataataaaataaatacataagagattaagaaatccttacattgatggcaatagaataataatgactc

SEQ ID NO: 334827 - DNA, 913 bp, Cannabis indica
ttgaatttttatgtagaaagctttagtctccagtaaggaaggctaaagttgcataaaaattaaagctcaaactccggttgaaaatatcaaaggatgaaagcatcacagagagtaagacaacaattaagaagtccttccattttgggacggaaggttgaagacgtgccataccccaagtgatatttcttgcacgaaaaatgtcgtgcacgcgagaaacctgtagaatttttatgtagcaagcttcaacttccaggaaggaagggtgatgttgcataaaaatttaagcttagactttgcttgaaaagatcaaaggaagaaagcatcacggagagtaagatagacttcaagcagtcttcactgtaatatcccaaaaaattatatgatttttaattggacatattttattaaatttgtaattatttttgtacagaagtaagattatgaacttacttagggtaattgatgtgaatttattaaatgattaaataaagcgtaatttattaattacgggaattatatcagaatatgtgggtatcgtggatacaatttttgaattaaaatatttttctgggcccgacgattgtgggaacttgacaatgtggtcaaaaatatcacgacaataaaagatggattattttgaaagtttccggactagtctagaattttagaatgtcggtttggtggattgttaaaaaaaaccaaatacccctaggtttcaaatactaaatttgtgaaaggtagaatggtcatctccttaggtttagtttcttgtcttttagtcacagtagttattctgaatatagggatttatattaattaaaatgtttcttttaaaagaagaaaagaagaaaggaaggacttagaacgtaagtaatcaccaactcacctattctccttctccctctctctctct

SEQ ID NO: 334828 - DNA, 843 bp, Cannabis indica
tacattttttaataactagtaagtaatttaataattaaaattttaatttggttgtatattgcattatgttataggttgtgtcctaatgtttgaggatcgacatatttcggtgttgatctgatttacaatatatccattcgctaattttttgttattataattaattatcaatgcatgcttagttgagtttgaatatcttaaatattcatccgtaataaagtaggttctgcgaatacatgtactgcggtcggatgggtggagaaattttttattgtttatgttagtttctttattttgtattgttatatttgttttgtttgttactttaggcacttttaaaatttttgggaacatccaattacagccgttatgctaccaaaattttggtagaatttggataaaattttattataaaaaacataaatgttaaaggaaaagtacataacataaattactaggttataacttgctaagaaattaggtgacataacacattcattaaacttgtcttgtataatctaattgatgtgtccatgcatttattatacttagtaggtctttatatttgactcaaaacatgttcgtgttagtagcatgattatcaatgtcaaagttcatatttgaaaggttctcaaattttgtttgttaatggtgtagatatggccaactcgggttcaggatctgattcagacctagaggcagagtgtccaacagtaatacctacaagagggcctactcaaatgaatgaaatatccaagctaatggatcaaggcaaaagagtggccctcgaggttaatgacaaaggacaatactgcggcaaaagctatgccaagctcgtatcaa

SEQ ID NO: 334829 - DNA, 1138 bp, Cannabis indica
tattagattagctcccccttaatgtgtgcaagggtaattaacttaccttatagttttaatttgcatgattttgtaaactcccactcaattttatacttatatttaaaaagcattaaatatccaaaaaattgagtttgttgaaaaaaaaaaaaaaaaaaaaaaaaaaaaataatcactatagaatttctcacccttttgattcatcaaaaaaggtggcaaatgaatttacaaaataaaagacaaataaaaagataaaacaaagcataccattcaccataaaaaaaattcaaacacatatcatctaaaataaaaaaaaataaaaaaataacaaactaacacataaaagtcaaaaggcactaagcccttgcaaaaaaaaaaaacatgagaaaatatgctaaatgcaagagagctagtttggtggaggtccaaatcgatccatgtaagccctccattatggcatctcctcttaagcatcggtaaacccgcgctccgtgtcactcctcattgtggcaatgtctcttcttatggtagccatctcattttggagagtaaaaaattttaagtgttcatttcacttctcaagttgttgaaatttgaaacaatggaggtgttaaggttagcaaaagcctcttcgatgttgaagtgaggagcttgtggttcttcttcagctttctcttcgctttgagcttgggcttcttgctcttcctcttcactttcacttgagatcaaagttgcttcctcatggacatgtgaaccgtgtttggtggaaatccacttcttttccacttcattaaacttgtagcgcatagacttgaatgtgatctcaccaagagtgtcggaatccttgggttcataaatgtcagtttcatcttcaattgagattcctagaagtgggaacaagtagctaagaagataaccataaggtaagactttttagggtaggcttatacacttcattgatgatttttaggataaggtaacctaggttgatttggttgtctttcaagatgatgttgtataggattatttgatcaagtgcacttacttcatctcgatggccttttccaggaacaaggttagagcatatcaaacttacagaattgaaaaatgttgaaaaatgagaaagtttggcaaaaaa

SEQ ID NO: 334830 - DNA, 654 bp, Cannabis indica
tccaagttatagggatttccttgatgactcacgatgcggaagttgaatttcctaagtgcttgttattctgtgcgggttgctgactgctttgtcttgagcatgcatataaggtatcctgttcggcctatatcttgcgagcagataactagagtcggttccacgtgtcaccatcgcatgatgccacgtcagagtgcaaaaattggtttaacattaatgcatgatattttgttagaataattaaactctttaaatacatatatttttatatgtgctttttgtgagataagactattttgaatattaaatttataggttatatgtattttatttattctaaagttaatagtattgttttcacatatttttgcactatttaatctttgtcaaatatttaaatctaaaaaatccttatattttttaacaaataaaaataatatatattttttgaatttttattttacattattaattttattgaatatatatttattttttcatttttctacatgagagtcatatcacaaaagtcccacatggtatagaaactattgtgggtgatataaattcacattaaatagatcaatattcttttatttttatttgacacaaagctagtataatttatttgctatgtgggtgattgatgaacttaat

SEQ ID NO: 334831 - DNA, 670 bp, Cannabis indica
ccacaacaaaacaaacacaaccatattcaaatgtaaagttccaggttacattcagaggcaatataaaaccctaagattgaactagcaggtgacttttttcaagacatggtatttttttgctataaattgcagccacaacacaacaaacacaaccatattcaaatgtaaagttccaggttacattcagaggcaatataaaaccccaggaggtgaactttttcaagatatgagagtttttttgttaaaaattacaatcacaacacaatacattactatgagaaccaaataaaaacctataattaaaattccttatcatttttcctaaataatatattaactacgtcaagaatgtaattaaattcaatagtttcttacctttgtttattttgacttcagattttattgattttcttcattgctagtaagaacatgaacaataagatgaaaaatgataatcacaccagaggagaaggaaagaaatcggatgagaaggaaagaaatcgttgagaaattggtggagaagaagaaagaatcgcacataggtgaattttgatattttgggtgtgaattttataaatggaaatatccttttataggtattctattttttctattttttaagttctttattttttttttccagattttaagttttttcattaaatgtcca

SEQ ID NO: 334832 - DNA, 871 bp, Cannabis indica
atcccaaatccactatcaaccaccattgaagcactcccaattctccaaagaagtaatcttcacatcaacgacaaaaggttcggagactacaacacccgaatggttaggcctgtgttctcaggcaacggcattgtccacattgtaggacccgaatgggactccttcgtaagagatcgcgggatcagagttggagacgttcttctcttgaaatttgtttatcaacttatttctccactcatcataatcaatgccaacttaatccgattaaacccccaaaataatcagactttcgttcctttgttaccccaagaagaagaacaacaagagcgtaatcgacaacaagggccacaaccaattttgtgtgtgaaaagattgagtcttgaagatgtgttaatttttgttggtcatgaaattgttatgcctaaagagatatttcaagtgattatggaatcaggaggaggaatggaacgtgctaatttgcatcatcgtaattttgtggttgctttgagagaccaaaacattcagaatttggtaatagaggcaactttgggtttgagtgatgatggaatggaagttttgattgcatataatcattggttggagtttgtgtttcgtcgtaggcttaacgttggagatgttgttgttttctgtttcgatctttcccgacgaactatcatcacatcggcctttcgttaccatcatgaacttggtgtttgcattccaattaatcacatgtaattgttaaatcaatcttggaatcttgcttttttttttttttgttacttgttgatgatgttagtaagtactagtcataaagaaattgtcaattagtactacgtagttagtattcattctcaattagaattagaaa

SEQ ID NO: 334833 - DNA, 693 bp, Cannabis indica
gaaagctccccctccttggcgtccttcccctccttcatccgagaagaactgctcgcagagaagtcctctcatcctgaagattgtttacctcagctgataagatctcgatggtctcctcaaaacgattagcagcctcaagatccttagtcagcacggagatcttcttttcagtagcgaacagcttcttgttgtcctcacccaagtccaaccgaagagctctggcctccgccctggcttcttcagcttccttcttggtctagtccgcctccgccttcaaggtttcggacaaagccgcattcttagaagcaacagacttagcccaggagtaagtgtaggccaacttcagaccagcctgcacagaagaaaaactttagcatattgagctaagtgtggaaagttgaagggaagtatcaaaaaagacttaccctggtgaactccttcaagactccgcccacaaacacatccaaagacgagttgttgtcagcaccagccagttgctcactgacctcagggaccagccagttcatatagtgggtcagcatctccttgccttttttggcctctggaagcacgggcaaaggtggagttggtgcctgcacccgctcaggatcaatcctgacctgttcagtgttgctataatttataaacactacgaaagtatacgcaatcaagtagtaaatctcacacaggtga

SEQ ID NO: 334834 - DNA, 776 bp, Cannabis indica
tttttggggacttatgccgcaattttctctattaattattacgaccaaaatttttaatacaatgtaatttgtattatttaatacataacaaatggtccgtattagcttgtattataatatttacaaagaatccggagtcaaccccaatcttcaatccggacccgaacccgaacgtggacctgaacccgaactcaagatctaaactcggaccctcacccgaacttgtgactcggacctgaacttagacctagactctgacctcaacgcgaacgcagacctaaacgcgaacacagacccaaaaaatggacccgaacgcgaacacggacctagatgcgagccctggtcaggcgaaaaaattaagggacacttaaaaacttagaaatcttaaaaaaagaatagagagaaacattggtttatcaattttcgttgttgcaaaattttatctgtacataaaacttaaggtgattctaaaatgcaccgccttaaaaggaatgtactgatgcaccttctagttgtttcggcatccagaagaattttttagtctaattttttttcatattcatgtacgttataactatttaagatatcctacaaaattttaaaaaattcagattaatttaccatatacaatataatattcaaacagtctattttacacgtgtataaaataaaatagtcacgcgtgcaacatactgtttgaacgcaattttcggcgtgttaaacttttataaatttcttaaaattttgcaggatatcttaaatgactataatttaca

SEQ ID NO: 334835 - DNA, 587 bp, Cannabis indica
aaaatttagataataaaattataacgccttcaaacaatagactcaccatactccccgaatatatatacaaatataaattgatgtacttttattagccaagagggattgaactgaaccatatcataaatatataaccccacaacccataaatgcaaaccaaaaaacaaaaatacagaattaataatggatttttatatattaatattattatataaacatggaaaatgaacaagattattaatatgcatggctgcatgcatatatagctagggtatgagaaaattctatattaataaatatcaagatgtatatatataaattatttgtggcaattctgcagagatatatttgtctctgtccattcaaataatacaactttattaattattacacacacaaatatatataaaatattttatatatttatataatataagcattttcatttactacctgctattctcatcaatctacttctatgccgaccccatcccaaaaaatggtcggtttcggtcctataaataaataaatataaatagggacatttacatggtatactaacttttgttatttttttacaaaaatac

SEQ ID NO: 334836 - DNA, 1026 bp, Cannabis indica
ttttttttgaatggataaataattagatttaatttaaatattttagtaaatatatttaagggtataaaaagaaaaatatgaaaacctaacccccaaaccctatttcctcttcttcttcctcccacctcttcttctatcctctctgtggcctatttttcgagcagctttgctcactggacggaagtcctccagtcaccccaggtctcaatcgccacgaagatccccaccccagaaacccccaaacccgaccccttttctcccactcgatcccacctttctccctctcgatcaccatccctctcgtctgatttgggcacctcacaagtctaaatgagccaaacggatagcagtaacaaccacgatgagatcccattatggttatatttggtgtaattattttaaaatttcagttcaaattccggtaacaaccacgatgactcgtttttagttttatatatataaatactttttctttttaattaattgtgatgatgatgatgatgatgatgatgatcaagtacacaaaatttttaattaattgttatatgtgatttgttattatatatataatttttttcttgtttgagtgagtttcgtttttggttaagtaaaaactttattatgaaatcatatatatatatctcaggaaattattctttaataataaataataatatattaatatgtatgtgtgtggggttatcctccttaagggcttcaaggatctgtgactcgatccttcgtgcatccactttgactgggaaccatcgccaccagtggaggagctctggtgagcatttcagcccgtcgttgttcttagtgttctaggcttctcttcaagcttcaaaactcatttgagactcataattaatgtctgtgaatgtatgcttgaattaatttatttgggtataaattatttactattcagtgtaattgtaattgtttgattttgataatcgtgtgtaattgtttgaaaaatgttgtaaacataataatttaattttatgttttatgattgtaattttt

SEQ ID NO: 334837 - DNA, 502 bp, Cannabis indica
gttgatttgtccgtccccaaccatgaaggagaggtgccgtttgtgtgttgttactgtttatagtataaaagtaaatatattggacctgggcagtatgaaagaaataaaaatgggcttggacagtaaaaatataaagtttgttgtgtcccagtatttttgaaaacatttggtaaaaatacaatatttttgtaagtttccatatgtaaataaataaatgatacatattttaagcccaaaataggaaaaaaaaaatacaaaatgggatttagcaataacatgtgtcacttaaaaacaaaaatggcagtatgttttttttttttagaaaaaataagtcattctaatttaatcaaagtattagtactattttcttttagtagtactactacttatttttctaattttaaaagggaaatttcactttttggcattaataatacaacccatatcaaaatttataccttcccttaatttgtacaaatttagtccattgattacatgaact

SEQ ID NO: 334838 - DNA, 818 bp, Cannabis indica
ctaaggagacgttcatcgaaccccacaagcgtaaggctggcatattcgctaacagaaggaacgtaatgtactgctaaaggagacttaccggagccggaagtactggcgtcaggagcccctgtattcggcacctgaatcgaaggctttggcctgggagccctcctctcaaccgggctcccaatgcgaagggacttcccggcaatcgtttggcttctcctctcgaccgggctccccacgcgaaggggcctcccggaagccacctgggccttggtataagacttctcctgggccttccggtagagatactcctggtacttcttctccgcggtggcaataagctcatcccggaaggtcttctccgcggcaggaaccctcacgtttggacagataaccttagaaaggttagagtcctccactgactggttcggcaggatcagcttagccttccggcagttctccgtcgtgaccaagcccccaacgtcgagatccgcccggtcataagtcgcaaagacctgagcccgctgaagaacatctgagtaggcgcggtccgctcgtatagaggaatcctgacccactccgtgagaagctcccggtgctccacagcccggaacccagaggagaagaaaaagcgatggcgatattccttgacgtgggtttgccgattgtaagggaccaccccatcatttgaagggtggcccggaaaccataaaaaccgatctttaagtttgtcccccttttggggacggaacaagttcataaaaactcaaaatctcccccggattcggagagcccccagtccccgggcggagtaaaaaact

SEQ ID NO: 334839 - DNA, 1510 bp, Cannabis indica
ggcataaaatcccaacaagtttatggttttaggtttaggattaagggtttaaagatttagatttagggcatacgatttaggatttatgatttagtatttagggtttggggtttagggttttgcatttattgtgtagggtttatggttagggttttgggttttagatttagggtttagggtatagggtttagggtttatggtttagcgtttagggttttgtattcaaggtttagggtttaagggttagggtttagggttgagtgtttagggtttagggtttatggtttagtgtttagggtttacggtttagtgtttaggatttatggcttagcatttggggttttgggtttagtgtttagggtacaaggtttaggtttagggcttaggggtttgggtttagggtttagagtttaggctttagggtttagtgttagggtataggttttgggtttagggtttacagtttagggtttagggcttaggatttagggtttagggtttaggctttagggtttagggtttagggtttagggtatagggtttatgtttttgggtttaggttttttcaggtttatggtttagggtatagggtttaagggtttagtgtttagagttttggggtttatggtttagggtttaaggtataaggtttcaaggtttaatgtttagggtttagggtttatggtttagggtttagagtttagggtttagcgtttagggtttagtggttagggtttagtggttagggtttacgattttgggttgatggtttagggtttagggttaagggtttcgcatttacggtttagggtttaggggttagggttttgaatttagggctgatggtttcgtatttattgtttagggtttagagtttagggtttagggttttggggtttagggtttacagtttaggatattgggtttatggtttagggcaaggtttagggtttatggtttcgagtttagggtttaggtgttcagcgtgtagggtttaaggggttttgggtttaggctttaaggctttagttatagggttcagggattaggtgtgtatagtttagggtatagggtttagggtttaggggtatgaggtttagggtttatagtttatggtttagcgcttaagatttagcgtttacgggttagggtttagggtttagggtttaaggtttttggtttagcgtgggatttgtgtttagggtttagtgtttagttgttaaggtttagggcttagggtttagggtttctgatttaatgttggaatatgttttaccaggatctagatttactaccatgtatgttatttaacatcgtaaatatgaatttctaaaacaatgtaaataaacacatataaagtttgagaaatcttacagtgggtgtagcggaattaaatgactccttctgctcagatctctaacctttgtatcctttttgtagcagagtatcaccaagatctgagcctgaaactccttccttgggtttggattcttcacagtcttacatacta

SEQ ID NO: 334840 - DNA, 1023 bp, Cannabis indica
gaattgaatgtaattacactgtgtaattactaaaaactttccatattaaacattagctactaaaaaatattattttcccatgtaattactaactattttgccaaacaagatattaagaattcatatgtaattaccacctcatatccaaatacaccttgcattttaaaatatagtgtaattactacaccgtgtaattaccaccctagtaattaccctacttagtaattatacaattacttccaaacgcacccgtaataaatttttaatagtccccgtattatcaattattaaaaaattatgaaaaaaaaaatatatatttttttctcttcctctttctttctttttctttttctttttcttttttccttttttcttttcctctcctagtaaaataccctaaaattagtcaccctattcttcctctctctctactgataacaaatatcaaaactctccaccacacaattaaccaccgcaccaccactcataccaccattatcgccaacacagtcaatcacaaccattgtcacatctgccaaactaaatttcacaatatatatataataatatttaaccgcactatctatttcttttgcatcttcggcaactgtggtgatgggcaaaacacaggtttggcgacgatgatgacaacaacgacatgggggtctcagatttctctatttcacaaactttttctctctttcttttttctttgcaaatctattaatcgatagcgggtagtgacgaataacatggattgaggttggtgttaggatttataaaatacttaagaaatatataaatcacagatctaaacatatttctaaaagtgctttaacatagaaaaccctaaatcataaatctatagaacctttgctaaattaaagaagaagaagatgataaaagatgagcggaagcactaacctgaagccattgttggagattgcagagaaagttttgatcttccaagaatacactattttcttaggtattttctctgatgaggaaggagagaatacagaa

SEQ ID NO: 334841 - DNA, 869 bp, Cannabis indica
cttggaattgcactctctgttatatagaacgctctatatgttccaagatataaatacgctattagttatcaattgttataatcccaataatcaatgatcctctatagatgctttacattgagtagggacaaaattactgttacaccctttaatgtattttatccttaaaacacatagaaaatataaatgatatttcagggaactaatataatcactaaaatgagcactcaatcatttatctctatttagccaagctcgaaggaaataatcgtttcacttctatgtccggatagaagctatggattctgtatctatgattagcgctcactacaagaaaccctacttttgccggcgcatttttgcgccggcaaaagtacactgaatgtgccgttaaagctttgccagcacaatactgcgccggcaaagcatgtccgcgaatcttggtcgataaaagactttttaccggcgcgtagcctaaatgtgccggtaaaatatagttttaccggcgcgaaatcacgccggtaaaagggaaacgccggtgttaaaagatctccttatccgctatgaacctgctttgataaccttttgccggcacaatagtgcgccggcaaaattgttggcgccaatccttagattggcgccaatagtcctgtcggcgcaatacatgcgccggcaggactaatggcgccaatttgagaattggcacgtacatttttgggccaccttttatcggcgcaggaatgcgccggcaaaagtatttattttttaaaaaaaaattaattaattataattaatcaattttttaaataaatataattgtttaattataatattatattaacaaaaaaaccaacataatttacattaaa

SEQ ID NO: 334842 - DNA, 973 bp, Cannabis indica
tccacttctcatattgcatagctattttaactctttggtactttctctgtgagataaagctttggcttatgtatacccgatttggccctggtagtcatgtgatgtttgttggttgatgcaacagaattagggacaataggtggagttatgttggtggatgatgactcaaggggtggagagatgagattatgtgactcattagtgtgcgtgggactggaatcaacagctggtgcagctgcatgagagacacctggtgatgttggcaaaaataatggtggtggcagaggtatgaatggttgtgtggaattctcagtggtgggagatgtttgagcagatatcatatggaagagacagaggtgttgtacgtgtgttttgagtgtctatggtaggaatgagagcagatggagagtattgaataagtggatcagatgagtgtttctgacaagaggcatatggaaaattaaactcatcaaatatgacatctctagagatgtagattcgaccattagagtcaagacacttgaagcctttgtgattaatgctgtatcctagaaaggtacaaggtgaggatcgaaattgaagcttgtgtttgttgtatggccgaatgttgggaaagcattgacaaccaaatgtcttgaaggtgctataatcaggtttgatattgaagaggacctctataggtgacttattgttgagaacagaagtgggaagcctattatggatgtagacagctgttctaaatgcctcatcccaaaattttaagggcatagaggcatgtgctagaagagttagaccattttccactatatgcctatgtttcctttcagctaggccattttgttcatgagtggtgggacaaggatgcctatggacaataccagcttgagtgagataaggggtgaaagacctgtactcaccaccccagtcactttgtaaaaccttgattttttttcctagttgaagctcagcttca

SEQ ID NO: 334843 - DNA, 612 bp, Cannabis indica
ataattggcgataaggtatacttacaccttggataagtgttagtcctttccactgcattggcatagtttaccagtatccgatgtatagagtcagtggcggacccagaatttaaagtgaggggcgtaaataaatttaaaaagaaatatataaagtgtagttagtgggattagaacctttaccctctaacctgtttgccatttaccttaatcattacaccaagcttactattatgtttataaatatcatcttttaatacaaatatatgttgtaactaattaaaatacatatatatttttttcccgattttttttttttcagggggggcagtgggtccgtccctgtatggagtatacattggattggactgatattgaacttggataagatatcataaacttacagttaaatctttctaagtcaatatcactgattgaccttaggtctatggatcttaatcctgatatgattaggttcagcttagttgtattctttatgttcttcaagttgttcgtggaagctaataaatcgttctgacggatatctatatcttgggaacatggtagtttattgagtgggagcacttatcatagatttagaatctatagcttcta

SEQ ID NO: 334844 - DNA, 971 bp, Cannabis indica
taaatagtgacagacaagacaagatcaaaaaaggggacaaaaaatatcatacgagagaggcccttaaaaaacaaacacgatcagaaatctgaataagattgagtcgtggactatgcataattttaactgcaaaaccacgtaaaaaaccctgtgttcatatataatttttctatagcttttattttttcggtatgaaatcattaccgtgaggctcaaatttagttaacaaaaatctatgttaacagtttggtgctttcattgagagcctctgtgagaaagctcagaaaaggcctcctcacctaaaagtaatggatgacaccgaagataataatcctcaagaagcaatcagtcatctccctggaaagaaccattgagtcctcagggatctattgagtcatcacatgaacagacggtaagccccaggaaaacccagtattggggtcccttgcttgacggaccttgggtaaacaacaatcggccacttcctaaccagattgataaggatggtgcctacgatccaaccagatacataccaatcaggaattagaaaatcgtcatcttacacgttgattggaggaagcaaactggcgtaacgccgagttagagcgtgagatagtcgcaataagggcagcacaggagaatgatacccaaaatcaacctgaccttgggagaagagattcacaaggcaaacctcgcgactcgcaaaccaaggggcaggagacaacccagagatatattcagaactctcaagagatgcaacctgagaaaactaaggaaaatttgggagtaaggttcgaccgcagtcacgacaggagtgatctacgagagcatctaaacttgaaaaagattgacctttgtcaacgacttagtccaaagctgaagaattcactccatttgcgaatggacgggttagagaataagttcagaaggcatcaagtcacgaaaactagaagacaaccggggcatgaaac

SEQ ID NO: 334845 - DNA, 760 bp, Cannabis indica
ggatctttgtctgactcacccaggtggatgacagttgtaggttgctgattggtagcccgataggctttttgtatcagcatggtggcctgccttgttcggtaatcaatggttgcttgttgagcccttaacatttccatttctttatccctccattctacgaacatattccttttctcttcgaatgcgagattcactgcagcatggaggtcctcttgatcatgatgcagggtgttggtatgaccttgcatgatttcaagagcagcacagagtatttggatctcggtgtcatctccaatgattgttcgagcatttgttgcgggctgaactttagtgttgggaatgccctgattggctgccgaaaacgggtatttccagtctcttgcgcaccaggcgtgattccactcaaaggagttgtaacaccttgacctacagtcgatggttgttcgggatttgtggctggtggaacccttgcattccctagattcgatagtgtaggatccgctgcttgtggatttgctggatcaaccacgcctctacgagtctgtaccaccatcgtgtttatgattagatttgaagtaaagagtggtcctgtgattctagttctcaatgaaagcaccaaaatattgacctcacttttagccaacgacagtgagtttaaattctaagcgacaagtagtatagatataataaaaaaaaagcataagagttttgtagaggttcggcccggagcagttcggtaatagcctactccccttgattt

SEQ ID NO: 334846 - DNA, 809 bp, Cannabis indica
taaattgcaaacaacgggacttaagggggttttcccactaaaaataaagaaaagggggttaagtgttaaacaaataaaacataatggggtttggccgcaaatttctcttatatttataaaatgaatgaccgtaatttaataataataattagtatttgtttaatatgataatcaaaaataataattagtattttttgtcctttaaattttcaataataactgttaaattttttttcttaaataaataaaattaaattaaaaatgttatgtttatttaaataaatttaaatttttaaagaaaaaataaacttaatcttgttccagtaaaatttaatttttatatttaaataggtttttaagaaaaaataattaaatttttaaatcactaaataaattttaaaattttaattgttttaagatttaaattattttttaaaattcatcaaaaagatattaatctttcttattttatttggagggtgttacagggacggagggacttaagccattatgtaggctttaagccctcactcaaatttataataaataagaaacttttatattacatatatgttaattagttttatttaaatttttgtttactataaatataaatattaagccctcacttaatttgttcctacccaattttgttaataccactaaaatttaacaccaattttgaaaaacactcaacactcttttttattctaagtacatatataacattctatttaacatgtttgttttattttatttcaatttttttttatttttttaaaataaaaataagtcatttgattcaattt

SEQ ID NO: 334847 - DNA, 878 bp, Cannabis indica
aagctggaaccatccgttttttccaaggtcgacttgatatgttttacatcgattgcgggtacatggaaatcttctaacatggcagcgatatgagtctcgcttccattagttggaggaaactataggaagtttccttgtagcgagatggtcatctcgcattcttgttctttaagccaatctgacttttacacttagtttgcctattgtaaacttaaggtatgtgttactcttctccgttgcatcgctattctcctttatgttaacaagtgtcctccagccgaatttcgggtataacaattgccccttagttcttttttagtaaaaagaggtttttaataattacggagggcattttcatcaaaatcctttcttggaaaggacgcctcctttgattctggcggttgtatgattttgaagatcattacgaatttcctattcatattctgcatgattcccggccgttagatttctcaatctttggctttcttgtcattgaactttgggtataaaagggtggctcaagcttgtcatttttcacaaaccttcttgctctttagtgaaatccattttcagaatggattacttcctttatgccaatatgtctcttctgagttcagaagtttatcctcacagagtcataatacccagatgcacaaaccaatttccattcgttcctaaagacttcaagcctcaactagagccagaaatgatggattctaaggctgaggagcttctggccaatccaaaccaggggaaccccgtgacctgccatggccggccctcacaagtgatcccaaagggtatagatctttagagcgatctcaaagatcctcctcaggcatgtgaagaattctagaggaagattggcaatgtttcag

SEQ ID NO: 334848 - DNA, 925 bp, Cannabis indica
tttaattttactattgtttgttaaaaaaactctatataattaaatgacattttatttctctttcgtattaatatttgtatcaactttgaattatgtgcttcacattttgtgaatttttacattttcttatttttcatcttcaaagtaaagtacaatgtcagctagtctagcgacataccacggtggggatggttatggtagggatccccctaatccttctagggtaccctcgtcctgcgaatcaggttttcatatttttccaaagctaacattgttcttaatataaacggtgcatgttcaatgtactaataaaataatttttctctcgaataaataaagttcaacctccggtcagaaagggtcgtgggcttgtagcaaacactaaacttgaacaaaaaaggaaagatgatggtaagcccttagaggttgaggtggaacttgaaactagaaaagtagtttgcactgaagcaagcgcttatgttcgatttatgggccaacaagtaaccatattgtgcccaggtcatcattacaatttttctgatgtaccccaacaatataaggatcaagtgctcaatcgaataagagtgagtgattttttaattattcatggttgtaatcattttatatccttatttgtaaattaatataattttttaaattattttattacatagtactattttgatatcgatgggaatccccaccaagacctacttatgaggactttatattcggagatagcggagaggtatagtgagcgaaagataatcagacacaagtatattttaaacaactttacactaagccagaagattgggagaaagttctggcattgccttctgaccacttgaatacggagagttggaagctgatttgggaattgttcactagcgctaaatttttgaatcgctcaagtaaaaataaa

SEQ ID NO: 334849 - DNA, 1260 bp, Cannabis indica
tagaagatttttcgtccaccccccttacattaaggggtaaacgggtttttatagacttagagttggatttgccatactagtgacccatttagagtttttgtacaaaacaggcccactattggggtaaatacatagaatacatgactttgaggcctactgcaagattttgactcgtggactagggttcattaacgcccgaaccacgtaaaaatcttaatctctcttaatttaatagtattttaatttcttaagctcttatttaatttagttttcaaaagtctcagtaaacactaaattataatgtgttctatttgtcaatttctgttccatcttgatgtaagccatatacatccaatgacaagtttactttgcttaatgtcctagaaaagacacactacttaccaaaagtgtaagtaaaccttattattgataatcacgtcagtgtaaatacagtgtattgataagtcatgggacatttcagaatcgcactcctgattatatagaatgctatatgttctaaatataaataaactattaattatctattgttataatctaataatcaaagatcatctatagatgatttacattgagtagggacaaattaactgttctaccctttgatatatgttatccttaaaacaattagcttcctataaataatattttagtaaactaatataattactgaaacaagaactcttccatttatctctattaagccaagctcataggaaattttcattttacttctatgtcattatagaaactataaatttcgtatctatgattagcgctctcactcaattgtactactatgattttaagatgtaagtattgggatgatcatttggtcaactttaacgaacaagttaaagaacacaaataatacagttaagctagaacctaaccattttaggattaagatctattgatctaagatcaactaaatgatattgacttaaaaagatacaacagtaagtttatgatatcttatctaagttcagcattggtcaagtccgatgtatactccatgcatccaatacttgcatactttaccaataccctagaaaggacacaccacttatccaagtgtaagtaaactttatcgatgattatcacgtcagcgtaaattctgtgcactgataaatcatgggactaaactttgaagcatataatcataattactttccactgtgatgacattactgtaattgtgaatgactatatattctatatttaacaaaaattatatattaa

SEQ ID NO: 334850 - DNA, 868 bp, Cannabis indica
agatatttctccttttttactgaaatcggttgacacaattctcgaggccaacctcgctaagcgatcaaactgggtcgtatactttgtaacactcatgttttccttctaggtcaagtgagtgaactcttttctcttggcacttctgactgcctcgttatagtacttggcattgaactgttcctgaaacttctcccaggtcattgtggtaacgtcatgtatcatggacaccatgtcccaccgaactaaggcatcttcttggaattgaaaagtggcacataccactctatcattccccgtgacgcccatgaaattcaatatcctggtgatcataattagccattgctcgactttcataacatctggacctcccagaaaaactggaggtgcctgcttatggaacctttaatacagaggttccatccgattcactgcaactattggttcggcctggacaggacgggcaggtgccataagaatttttggagcaggcactacaagagcaccctactatcttaactgtctaatcaattcttcttgttcgttgattctagtttgcatttctgcaaaacttgttttcccaattctgggcttcctgagcagctggggtagcctggttagcctgtggcgggttagcatcaccctgaccacgtgccctgcacctggcacctctacctcggccctgagcatttggggaaaactgagctccctgaccttcatttgatccaactgagttgccctggctcctggtattttgcctggcgtcaatctaatctgaacagcctgcgcaaccaacagctagaatggtcatatcatgatcaacgagaacttactaatgccgcttatttggaaattaaaaacatgcgcctat

SEQ ID NO: 334851 - DNA, 561 bp, Cannabis indica
gtaagttcaattatgtaaattaaaaaggtggagtgaatttaggttaatcgttacatgaatatgatgatgatgatgatgatttagggcttctgagtttcgatcgaagagaggagggaataataaatagtttatgcctatttttttaattttaatttttaaaagtaccttttttaaaaaaaaataaaattaagaggccttttttcttttaatttaaatttatgattaatgtgacatgagggttttatttctattttataaaaaaaatgtaatcatgtaataatttttttaatttaaagttgttttttgtattttttactttaataaaatatatttatcaattttataatattattatatatttatagaaaaagaatgcagtcgtttttataaggctaattagaatttttgtcccatgaatttgacatttaccaaatcatgctcctgaacttgttaaaaatgcttttgagattgttagatttaaggtatttcgtctaatttcattcaattttactatttcagtgattgtttatgtactaaaccatactcccaaactttgatata

SEQ ID NO: 334852 - DNA, 1049 bp, Cannabis indica
ttctctaaatacaaaacacaccccagccactcggtcatgttgcagcagctctttgatctgcgcaacgagcccatcaacatctcgacatccttcctcctctttcatcactagattaacagcttgaaggcaatcggattcaacagaaaaagacggcaggttgcgttgtaaaccagtctgaatacccagcagaattgcttgcaattctccctgcaatggcgaagtcttcttctccacaaatctggtagcagccaccataacccgcccatcatgatcccgcacgacagagctaagcccagccaaattttcccctgccttaatccctgcatccacattgactttaaaagatcctcgccttggtggagtccactttgcttcttctctccgctgtccaccctgaaccgccacattattctccctaaactcatgaaggaacttgccgcaccaatccaaaattgcattagcttgaggtttgtgtcccccatgattaaccgaattgcgaatataccaaaggttccaagataaaatcagaaaaaattcaaattcatccttagtgaacaagcttgaaactctcataagaaacgcaagcacatcctcacgtccttgtcgctgcaatctaccataaaaaccagctccattccaaacctcccggttaactcgacatccccatagtgcatgaaaaacattttcatacgcacctgtagaacaccgcttacaataaggttctacctgaatatgtcgatgagcaagcgccgagttagtaggaatccatgaatgagccatcttccaaacaaagtgtttcactttcggtgggattttaagcttccaaagcttgctccaccacttctcagcagcttgtgtatcggactgcacatctcgcacttgtaaggcagccgccatacgatatccactacgaacagaatactccccattcttactataatgccataatattttatcttcaatatcccattcagtagtagccattcccaaaattaaatcagcatcagttggattgaagatagctctaataaactcctcatcccattccc

SEQ ID NO: 334853 - DNA, 544 bp, Cannabis indica
aacgaaaggcccaggaggggccgtgcactccacgcgcgcgtgaggaagaagagggggacagcccctggtgcgcctgtcgtgggcctgcggagcgaatcccagctcgccacgtggcaagcatgtcggctgggatgggctgaatgggctgaatgggctgccttcttggggtgctctttttgggcttcaaaaatgccacttttcatagttttgggcctcatttttatcactttttcatttcttttccactctttcacaaatgctattttctcaatcaaacacaaacaaaattaaatccaaacaaaatattttcaacataaaatatatcacaataattttaatgaaaatatttatttaaaatttaattaatttgtatttctttaaataaatacaatgcattttcttaactttttatttctttttctcaattatgccataaatactattattatttataaacaaagataaaattaatcttaaataaaatattttcaatataataatatattgcattaatttcttgaaaatattataaagaattaatttt

SEQ ID NO: 334854 - DNA, 476 bp, Cannabis indica
tatagtatttcgcgttgaagagttcatggaacctttcccaggtcatggtggtgacatcctgaatctgggacaccatgtcccaccagactaacggtcctcttgaaactgaaaggtggcacacaccaccctgtcatttccggtgacacccataaagttcagtatctttgtaatcaccgttagccactgctcggctttcatgacgtccggacctcccagaaaaaccggaggtgcctgcttccggaacctttcatacaggggttccattctgtttgccgctaccactatctcggcctgagcaacaggggcaggtgccacaggagcttctggcaccagcactgtaggagcaccctgctgcctcaatctctgaatctcctgatcctgctcctctattctggcttgcatttcagcaaacctagtttcccaattctgggcttcctaattggcttgagcagcctgggcactgtggcgggttatca

SEQ ID NO: 334855 - DNA, 821 bp, Cannabis indica
taatccatgcgcagccacattggctgttcgacgaagatgaattaggaatacacttagaaatctagacaatcaaacttgccaaatcaaccaacaaagatccaagatcattgaaaaaaatatgcctcttattaaaaacagacacagctgtaaggcaatcagtttcaactatatgaacagtatagcctagagaaaaaatccagtccaaagccatcacaatcataatacatttcacttgaaccaccggaaaattaccttaaaaaaaacacagattaggttctaataaatataattaaaaaaataactgatagaattataatttaactatacataaatatattgattgaagaaataattgtagctaaatatcaataatagtaatatgaacaggtaatatataaatataaaatagaatagttaacattatagaaaagaaaacaaatatattatacaatattaaaatagatataatattatagaattaaatgtgtatatcgaagggtaaacacccttcggtttataataatagaagacttaaggcaatttctttatccggactagtgattggagaattgggtttaatgcaatgtctaataaatgcatatagtaccgaaaaaactaccaaaaacacatgaacacattttcaatattaagcaaaagaaaggtaacccctatacaattgtgatttttttgaggaagaatataattgtgattattaatcatcacattgcacaaaattgacaaaccaacaatgttttttatatgccttttcaattgaagttttcctcccaattgaaaatacaatttctattgctggattagtt

SEQ ID NO: 334856 - DNA, 662 bp, Cannabis indica
accaagcccctaacctaaactaggatttggacctggacatggacaccaacccaaaccgagacctgaataccgacccagacccagacccaaaccagaatcgaaacatggcacctggacccagactcagacctggacccagaccaggttccaaaacacccgtaccaagactcggactaagactcggaccccgaccccaacctggaccgagaacaaaacctggacccagaattggaattggaactgtgactaggatccagacttaagacaagaaccgaacccaaaccataacccactaagaccaggacttggactgagatcttgactaggattgggacatgagacttgggacccgaacctagaccgggacctagacctgacctaatcctaaatcctcgcagagacctgagactagcgaccgagactaggatccagaccctgataaggacccaaacttgaacccagacaaagactaggatcgagacctggacccgaacccagactaggaactggactaaaacaaagactcgggacctgaacacgaccctggacccaaacctgatgaggacatcaaggaccaagtatcaagtccaattccagtgggtccagtgactagggcacgagctaagagattcaaggaagagcttaacagcctagtacacaaa

SEQ ID NO: 334857 - DNA, 1132 bp, Cannabis indica
aattttattccattctattcctattcctattcctgttctcattcttattcctatatttttattcctcccaaccaaacgcctcctaagtgtttgacaatcagtagtgttagtaaggagattcaaatggaggtcaagtatagagtggtaggattagtttgtaaaagagtaaaaaaaatgttaattatgtactatcaattgtagaaagttggtgattttttttagagttcgagcaacttttgctagctttaagttgtacttgcttcagttgtgaataaaattttcgttggttcacaaaaaaaaaaaaaacaagtatgttaaaatagtcctatccttttgatttattcacaaagtaagtatgttcaaatagtttttttttttctttttatttttaattttttttaaaaaatatatgttaaaaatgttaaatgttcaaactactatcaagtatcaagtgagctaaacatattttatatatttttttctcaattattattttaattaagttttttgttctttctttattttctttttctttgttccaatttttgtttccatttataaaataaagatataatatttatataatgtaaaaaaatatagagaaagtgaagtatcctatatgtcttgttcggctaaatttttatttttactcatatctaaaagtataaaataagtataagttttgacatattttgaccgtttagataattattatataatttttttaaggaaaagtattttttttttaaatatttggacatcattaaaaaaaatgatttttgtgggtaaattaaaaattatttaaattattttaattctaaaaatagtttcataaattttttttggtctaaagctgcaattattaattttttttttgaaataaaaaacttttttaattttataagataaaaaataacttatagaatagagattagagaagttgaagggaatgctgaaatgtgttttaaatgcacctcatttaaatttaggctctatgttaagtttcaatatatcatattctcttataaaaataacaaataaaaaaaatatttcaatataattttaaaaatgagacttataaagtctttttttggcaagttagttgacaaaataatttttccatttatggtaa

SEQ ID NO: 334858 - DNA, 1213 bp, Cannabis indica
ataatggagtcgtcactagactcgttgattatcgtgtaatcaccgtaaaagaggcttatgccatctgtcaaatccttttatgggtgttctaatacgtttcccccatgccgcattaaatgtgaaatgactgttcaaacatgttctccttctcttggaaatgcattgttgtatttctagcttccagagagtaaaggcgtgccctatgctcctatctgggggctcactccctgaaatgcaccttcctgtctatatatgacttagctaatttttgtgggtgaggtgtccttgaaatccacgtgccacatgcagccgctgccacgtattttaggaaaaatccgaggcaacactaggtttatacacagatgaaagaagattacaaaatttaactgttacaaattatttatttgatctattgacaattgaactgtgattaaaattagatcattagatttatcaacaatttaatcagatcaatttaaatcaaataaataataggtttataaaattttttgaataaacaataaataagcatgtagaaagataggatagttggttataagattatttaatttaaaataaaataataatttaaaaataaacctataattcaaaaattagggttttagcaatatgttgaccttgcttttaaccaatgacaatgaatcttaattgtaagcgataagagatataatttagatgtaagatgataagataaataaagaacacaaagtttttaaagaggttcgaccccaagtagttcggtaatagcctactccccttgatttgtattgacttaagaacaaagaatacaatgattcttttcttaaagctcttacaatgatatttctgagtatactctcttagataattttcttgaccttttgcccagtgagaatagatcactatagggctatgtgcttgagggaaggtttcccttctgtttacaatgtctataattggtaagattacacattaaatatatagaatacactgattaagggatttggacagcttgccatatctctatgatatgatccacgatttatagggattgcttttgcgattcacgatgcaagtgctgaagttgctaagtgttgatgtgctgttcagattgtctattgctcggctaggaggactttgtccgtgcaggtatatgtggtgttctgttcggaatatctccttcgggaaaatatggggattcgattccacgtgt

SEQ ID NO: 334859 - DNA, 1093 bp, Cannabis indica
gacatgcgaattgcattgtggaggctatgtcgatattatgtcgacggtgtgtcgatgatatatcgatgaggactgccacccttttgtttgataatgttatcgacataatgtcgatagtatgtcgtttatgtgtcgatggaaactgtcacactttttgttgttgttttcttcgacataatgtcgatggatatcgatgggatgtcgatatttgttattttttaggtattttttcctatactcaccttgttttgtttgaaattgcaggatcgacagtgtttcttgttgtattgtacgatggtgtttggtgtgttgagggttataattgggttaacaaagaagcttgacgttgacagttacaactgacacaaccctacaacaaatgcgccaaattttatatgaagagttggaggttgatcctttagcgtatgatttaaagttggagatttgttccttgtacatgaagggacaaatggttccgccagaggttattaagaaagaacgccaactgagaacgttcttagagatgagggcaacaatgtcaaatacagagtttatgccattattcgtgaccaaggtgagaaaagttgggaattcggagcctacgccgcctactaatcctctccctcggagtgtggtagggtcttgcgttcccgaaacagatgttgggattggtgtgaatgaggaggttccgaccaatgtagaggttccgaccaatgtagagcaacaacaagaagcgacaggatttcatcagtttgaggagttcgatacaaccttctacaataacgatcctattgtagatttgaatatggacgatgaacatgatttggcagtcgatgaagccgtagcgggaccttccttgaggttagagtgtgtaccgagtaaccatggtacacagcgagaacgacaacctcgtagtgaaaatcgcactacacctggaactagcagtagtcgacaaggcagaactgaagaacatgctcattctcgtcatgcaaccttctcaacgttctcctcttttgaagtttgtaccaagttcaaagctcctatgtggacaaaggaagatataatggaaaatcatgagctaactacttgttta

SEQ ID NO: 334860 - DNA, 614 bp, Cannabis indica
cttggacccgaccactactcagtgtctagatcaaggacatagaccagaacccgaacccaaactcgaactcaaactaagacccgaacacataccaagacccagacccacactcgggaacaaaaaccgaaacatgaattagaacgggaccaagatctttgaacgggactgggaccaggacctggatccagacccagcctcgaagcctacctcagaccgaaactcggaactgaaccttgcctcagactcaaatcatgacccgaacccagagtcggatccaaactcgaccaaaacccgtagcccgtgacttcaaactggaatcgaaacaggaagcggattaggactgaagaataaaccatggccaagacatgaacatagagccaaaactgtaaccggaccaagacccagactcggtcaaagagccactatggattggatcaaaaatctaaatccaaacccgaaccaggactcgagacccgaacaaagacctaaattatgggatcgaaacccagactggaccccagtctcggtcttggacctagacccaaactaagaccctgacttgggacaagaattgaaacaagactaggacccgtgattgggatgcagatcttatc

SEQ ID NO: 334861 - DNA, 1426 bp, Cannabis indica
accattgatattgacttagaaagatatacagtaagttcaggatatcttatctaagatcaatatcggtcccttacaatgtatactccatacatccgatactggtaaactttgccaatgccctagaaagaacataatacttatccaaggtgtaagcatacctatcgctgattatcatgccagtctaaatctagtgaactgataaatcaggaaattaaatttttgaatatataatcatgactatattccactgtggtgataacactataatcatgaataaatacatatgttctgaacttaatagaatttatacattaaacaatcatgaaataaatcatgtcaaccatgtaacataaaatgtagtttctgatctttattaattagtaaatctgattatattgaaatgggttttatttagggcacaaaacccaacatactgttgtacgaacgttctggactcaatatgcatgggatgcaagatagggttatgattgggtgtatggatacctagttataatatggtttaagttatgttatgattatgcttttcttactgagtatgtcgacttacagttattatttacatgtgtaggtaaagtcaaagctaagactgagcagcaatgagtgcgagcaggtgaagattgtacatatcgggacagttagaactggagtgttcgatcttcagggcaataggctttattttgaatagtcgctaggtgacaaatttttgtaattaatgttttgtaaatagttataacttttaaaatacgggatccctgtttatgtaaagtctattctattttaagtaaaggttaattgagtaaagttttaaacacgttttttaataaactcgctgattaacaacggatttatcacgataacacgcctaagctagtagggtgttacaatttagtatctgagctgtcaagttgtctttcaaagattgtcacaatatgtacaatcatcatcaaagataagctcgactcacggttcagtaagtctttattgcttcagtagtttattttattagtatattatagaaaaagcttgttaggaagcaagcatgttagtagcctgatagttgaataggcgcatgtttcattttctcaagtaagcggcaattatcaatttattcctgatcgcaatctgactaggctagctcactgtttcgcatgatgttatattagaatggatgccaggtgaaacatgataagccagggtaactcggtcggatctagtggtggttagggagttcagtttcccttgaatattcgtggtcgaggcagaggtaggggtgagcaacattcggtttggttagttttttacacaaaaaaaatctgaaattcaattttcgattttcatggttataatctgaaaactgaccgaccattatacaaatgtaaaaaaaaaactgaccgttttaattcac

SEQ ID NO: 334862 - DNA, 1115 bp, Cannabis indica
aaaaagagacggagatcaaatttcttagactgacaccctcccaagttattactgaccctcgcgtatgttaagtctttgggtatcaagtttgttttgtgttttctgtattataagctttgttagtgtatctgatagatcttttaaattctgatcaataaattatccaactagtttttcctaatacatttttatagttttgtttagtttgcttttaatgatgtttgattggcgacaacttttaatttttcctatcttctcacttttctctctaaatttttcgtttcttcctccttttcctctttaccaaacaaagggagcctaggattaatatgtactgctaaataatcttcttaacttggtgtctgtatcaaacatttctattttgttcatttttttactttcaagtctttccatgatgctagcctttgttgagaaacaactattattgtcttaactaataaattttctttctaatacctgttatcccttcatgtcaattttgtttgttataaaattccagtcataatttaagctctacaaccatgtggactacttgactgtcaacgtcttagaaatttaaattttatccaatccttagttcatttagcactcatggtgccttgaatttattttaaagcccattcttttgatgtatatatactctaatgtatgtatgggctagtactattatttttgtttatgcaactaaataggttgaggtgaaatttgattatgtactattttttctgcccttatggtttttgtacggttgaaggcaatgttgttaatggtatgcacctggaaattaactggcacttctacttaaaatgatttacttatttgttagtaattgcttccttttcggtaatgtttagaactaaacttttgttagtgagcctctttttttaaatcttttttttaacgacaaacagataattgtatttagggtaaatatcattttggaccctctgttttacaaaagttaccaattggaccctgtgttttgttaaatgacaaaatggaccctgtatttctaaaatagtaaaaataggaccctaaattgattttttgtcaaataaagtttaattataatccgatctaaaagtgctatgaca

SEQ ID NO: 334863 - DNA, 538 bp, Cannabis indica
ttttcagggcctttttcttatgattttttcgcccctttttaatctaacttgccattatttataatcacatagtaggtaattaattacaaagttgactgtaatctttacaacgtttaccccatgaaacgtggggtttgattacatatcacgtagtataaatgcagttattatttgaatatcacaacgtttaccccctcaagtactatcttgcatagcaaatagaaaagacgcttaaaaataataaaattaaataaaaaataatataatataatttgaaaatgtttataattgtgtatttaaatgttaaaatacaaaaataaccctatatggtagacccaatcccatataaaggcccaaaactaaaagggtaaatggcggcaaaactcccaatactttggttttggtttcactaaacccccacaacctaaatttctgcgggtaaacccccaaaaccactattctgttagcaaaaacacacttccgttgaaatttagctgttaactgccaagttggactggaccgaggacacgtggcacaa

SEQ ID NO: 334864 - DNA, 1041 bp, Cannabis indica
aacaaatttccattttcaatttatactaaataacatattaattctaaatatatgtattaaattaaaaatagaaattgaatgaacgtaatttattgactaaattaacacaaaataagaaaataattaatattctaaataaataaaaaatttataaaaatttggaattttcctttttttttttgaaaattactgccccgaaaacgacatgttgtttttagtctatatgcaaaatgatatgtcactttttctacaaagaaggttgcccacaacgacgtaaaacgacacatcgttttccgcagtgtggaaaaacaacacgtcgttttcatgaaagctgcctggttaaaacgacaaaaacgacacgtcgttttcatgaaggctggctgcttaaaacgacaaaaaacgacacgtaatttttccacaatgtggaaaacgacacgtcattttcatgaagtctggctgcttaaaaatgacaaaaaatgacgtgtcgttttcatgaaggctgcctcacacatggaaaaacgacacgtcgtttggggtcgtcttccttagccaactgggttgtttttgacccgtttttcagccacatgggttcaatggacccgacccaaacccgaacaggaaaacaaattccgacgataaaaatttatggaatcaatcccatttgaatctccatgcataaataaagagattcatgtaggttttaggctattaaaacacgtaaaaattggactttaattttaataaaaaagttctagtccgtatgagttcttaaaaataaattttcagatttcaatggttttttacatgtttagatcgatctataatactatatgaatatagtgatgtatatagagttcgaaataaacaccgtaaaagaaaaacaaaataaaacaatcaacggaccaaaaactccaatttttcatgtttatatatacacatatataatgtatataccgcataaaaatatcataaaggtatgaaagagagtatcacatataattttttatgcaataaaatcatatattaaacgtataatatata

SEQ ID NO: 334865 - DNA, 728 bp, Cannabis indica
gagactattattcgtcctccacgcatgactcggcttcagatccttcagggtcttcttgtaggtcctcttctgggtgttcctcgaagtttatttccatttccacatctgctggaattggtgctggcacatcctcggattcagagtctgactcatcaatttctacttcaaaatgatagtcaggtatgtcatcttctagttcatggatgttggttgttgtgggtagatctaagtccttgctcttcggtattggggaataatctggctcattgggaccttctggcatttcctcatctttggattcttcatctgagggaatctctattatttctactattttctctgcttctatttgaggtgggctttttagttcaagttccaacatttctgctgtcacttcaaaatagtctggcatttctgattcttccaaatctcgttcagttgttacgttcacagattctgttatgtcctccacactgtcgtcacttagcttatatcgtatgttcttgacgcgttcttcttccatgccgtttgtttccacaatataagtcttttcgaaaacgaagttgtggaagtcaagcgtcagctcacatatgaatgctgcgtatctaattgcgtcgccaagatttgagacacggtgccagacttcatcgatatagtaaagaagttcggggacatgtgacaaagcagcccttagcactagaaacttttctcgtgatttgattaaggct

SEQ ID NO: 334866 - DNA, 636 bp, Cannabis indica
gttgggattataattaattggagagttatttttttaatttttttttacatatatattaaaacaatatatgctatatttaagcatatattgtcaaatttcccgcagaaattacaaaaaatattatacagtttatactatcttttactgcccaataatgccacatgttattttgcataccttttttttttattattaattatgtttgttttaaaaaaattgatgtgatgtttatagtcaaatcatgtcacctcatattatttttttaaaaaagtaacaaataaaataaaaaaaacttaatatattatatttgttttgtaatcacaagttacccgttatttgacattttatcattttatatttattttcatcatcatctttatattaagctattcatttctctcccgtgttcattgcaactccttaactattttaggcatgttaacgtgatttttaacttactgtggagctcgttgctaatcaacgaagttatcgaaaatcgtgattaattaaaattttagtcatttaattaaaaacataaaataggttacatatataatttcgggatcccgtttacaaaagtgtttctaaatgtttacactgtacatatataaaagtctgtcgcctagcgactataca

SEQ ID NO: 334867 - DNA, 1170 bp, Cannabis indica
ttggaatcataccaagacccgaacttggaaccattttccagaccaggacctaaaccctaactcggacccgagacccgaattcgcaacagaaccagaatcatgaccctggaataagaattggacctggacccaaaactggatctagacgcagaaccgaacacagacccaaacccagaccaggatcgatactaggacccaggcccaaacccggacccagacttgcaccaagacttgtgacttagaacccgtgactcaagacctggaccagaacctagacctgtacaagaactcaggcccagacccagaccttgaccatgacctggaccaagacacagactgaagcccggactcagacccaaacccagacctagacccggacccaaacctggactagtactataactcgtacttgaacacaggactaggacccggacggagatcaagactgggacccaaacccgaactaggaccgagacctaaacctggactaggactagaactcagactgggacttggactaagacctgggactgggactgggacctaggacccgatactcagacctgggacctgagaaccgaaccgtgacctagacccagaccaggccaagacccgagacaaggaccattattgaacacagaccgggacctacacatggattgggaccctaaccaagaccgggaactactactttgacttgaatcggggaccaagacccatgacttggacctaagacctgaaccaggacccaagacatgagctagaactggaccaagatcaagattttgacccgggataggacccaagactcgaggcttggacccgaccgatagtcgttgtctaaattaaggaattcgacctcgacctggacctagacccagaccaaaaccagaacccatacaagaactcgaactagactcgacatgtggttggtgtttggattggggaccaagactcagacctgaaccaaaacacggacctagatccaaaccaggactcggaccaagacccacacccaaaccttaaatcgtaccttgtgaccaaaaattggacccagaactagaagcagaccattaaaccctaaaccctaaaccttaaaccctaaaccctaaactctttacagttacccctaagacctaagccctaaatcctaaaccctaaatccctaaa

SEQ ID NO: 334868 - DNA, 973 bp, Cannabis indica
atctcttagtttcgtgcaataagtttatatcattagtggcaagcaatatgtcattgacattgttatccaggtttttgcacattgacgtggcgataggatcagatgacacatgtcccatagttttgatacatgggtggaggaaggtacccctagtagcctgcacatgattcgtaagtatttacaattgtttgttacttgagcaatgttgtagagaagacatccgaccaggtagaagtgtgtttgtgtcgagaaactttagaataaccttgttgtgtccagaaatgaaggtgatccctacaatcgtgggattgagtcagagaaatatcacaaccgtttctagtttcctatttcttatattgcaattatgtaatcaatgtaatttcctattttgatgaattgtaagcaaaagggaaaccatccctattactcaaagattagttgtaagaactttcaagaggaagaacactttgttccttctcttaagtcaatacaatacaaggggaataggctattaccagactcacagggccaaacctctttaaaatatggtattcactttaccttattgtctttgttctcttttaattatattattcaattgcttattatttgcctcactgttgttggctaaaagcgaggtcaacattttggtgttatcattgagagcaaaaacacaagttctttgtcttaacctttgacaggtaaacaggatggttgtaaaaacccgtagaggaggccttgatgatcagggcgacccgatggtgacagatcccaatgtgcaaactcttggaaacaagaaatgaccaccagggacaaaccctgaacaagttaatacagaaccacctactataggccatggagtgactttccctttggctgggatcacaccaagcgtgcaagagactgaaaacaccagtttggcagtcgatctgtaacgccctgtccaacagggacgccacgtgtgtgcacttta

SEQ ID NO: 334869 - DNA, 920 bp, Cannabis indica
ttaatttcgcaatatttgctttttggggggaaatcgaagtgtttggggtttaaattaattacactctttcaaaaattggcttaaaaatatggttgaaaattctcataatttacttttaccacttttctcactaagcaacttcagagcaaaaagagttttatctctcaagtctgtcgtgggattctagccgaacgacctaaatagcttcatcctaacaacacaaaagcttcaaacagtgagtaagtttctcatctttctctcctttaattttgtatcttcaattttttggcttccattgtagaaaatataattgttattaacttgttgtaggagatacatagaaaatctaggctcgatacttcgtaatttttactgtagtagatcgtacgactttgctgtttaactttaatctcgcaatggtcgatctccaccttgcccattcaaagcttcgtgaaaattaacccttaattcaaaaatttcaaacttttgggttacgaacttaacctttgcatgtttttcttctttttaatccatcgagtagacctggtcggtatatttgcctgtttttgttcgatatcccggcaaaatactcatctcgtgtattgtcttttgtagatgaaccatggtgagtttttggaggcgaacaccgtatcgaccaggatctgctccagcttttgtacgaggaccaacctcatctttgcgccaatatgtcctcttttagtgacagaatttctaactcaagatttgaagattgggaagtgagtagtgaacgttctcctactccagaacccgaggtgcaacatcacttttactctgagcagatcgcaggtgttgacctcacttttaggcaacaacagtgagtcttatttagtaagcgataagtaatttatagcgatagatatatagtaaagcaatgtaaa

SEQ ID NO: 334870 - DNA, 564 bp, Cannabis indica
atcgtttaatttcgttttaagataaaaaacaattggtttcatacaggggttttgtgaattagaataattatgaaggttctcaccttataagattgttctcgggtagtcatgggactatttttgatcttttcttgttgaatttgaggtgaatttgagttagaaattgagtttaaaactttttaaagtttagtccgaacattagtggcgtttttcatttaagggctcaatttttatttctgttacgtaaagatggtaatatttatagtatatatgcgctctatgaagtttaaagtgatttggataagtttttgtagtgtgtgcaaaaattaagattttcgagttttatagtttttagaaattactaggagatcaaaaatcgtatttctgtcataaattttgactcgggtgtccattttggatgttctctatattatttcgaagcttgcaacgagctctacaatatgatgtatgttttagagctaaaatataagttttatattagtgtatttataccacgaatttggtagaaaaacctaaattgtcttatgtgaatattaagcagtg

SEQ ID NO: 334871 - DNA, 793 bp, Cannabis indica
ctctgagtatgttgaagaaaggatcgcactggtccgtggattcggacatgaatctgtgtagtacatcaatatgtcccatcaggctttggacttctttgatttttgtgggtgacttcatgtccaaaagggcttggatcttgtctgggtttgcttctatttccctagcataactatgaagccaaggaattttcccaagcctactctgaatgaacactttagggggttgagcttcatgttgtactctcagaggatcttgaagcattcattaagatcctccacatgccccaacctttttgaacttgactagcatgtcgtccatatacactttcatgttacaaccaataagatctttgaacatcttatatcaaaattgattttattttcgacgctaaacctttcccaatctttaattttttggttggaagagtgggatcagtttccagctcttccaattcttccacaggccaaagatttctacaagatctcgaaagcgaggatctatgtctgctttcccactttgggctggactcttggtcaaagctcttcgcgggcatcttttattgtttggctttagataaagccaggttctaacagtgtcggccagactattggtctccccttagacatcatacccgatgcattgttgggaactttaggcattggtggtagatgaatgtttccgccttcaggtcgtatagggtaggtcgacctatcatcgcattgaaggctaataggatgtcaattactacgaattgtgccatcaacgttcttgtagtgggattttctctaactg

SEQ ID NO: 334872 - DNA, 687 bp, Cannabis indica
gtctcccttaacagttcatcatgctatttctgcccaagagtattcccggtgtaggcctataggatttgacgagcgtcttcttagatttaggatgccccccactcggtggggtgatcatgccaaggccttttatttttccaacttaggtcattttctaggccggtcccggatgggttccggacctcctgcacctattcccctggatcattcagcttatctgccttccagctggtttctcccctcgaacaactttcttggggatgatgaagccagtattgtagtgcaagactttgctagggctgagttagatagtcagggtaggactagttttaccgctttattttcatgtgcatactttcttatggccattctgacacttagtttatttgtctttttgaagcagcccagccaatggaggatcttttggtgactcttgcccaaacatatagcccagactctgctcttcctccagcacccgcccagacggtgaaccaggggaggtcttcttctagtgtgcccttaggccaaatcgtcttaatcgatgaagacggggaggtcgaggaggaggaggaaggtgagatcgtggccccgttggaccgaaagcgcaagggcaagatggtggaggctgagtcttccaaaaaaacctaggagggtggacactccggccgtcagctctgattcagggat

SEQ ID NO: 334873 - DNA, 1483 bp, Cannabis indica
aatttctaagagcaaacctagacgattttgcctggtcacatgaggatatggtcaaaattgacccttctatcatttcgcacgtcctaaatattgatcccaacttctgaccagttcaacaaaagcaaaggctattggacaaagagcgagcactagccctaaaagaagaagtagaaaagctacgcaacaataatttcataagtgacgctttctcccaaaattgggttgcaaatcccgtactggtacccaagccgaagaagaaatggcgagtgtgtatttatttcacagacctcaacaaagcatgccccatagactattttccacttccaagaatcgatcagctcgtggatggcaacagcagagcatgacatattaagcttcatggatgcttatttggggtacaatcagagcaaaatgcatccaccagaccaaaaacatacaagttttcgaaaaaaatatgggtctatagtgttacaaagtaatgccgtttggtcttaaaaatgctggagcgacataccaaaggctggtaaacaaaatgtttaaagaccagatcaagcgaaatatggaggtatatgtggatgacatgctcgtcaaatctaggaaggctggggggcacatagatgatctagacgaatgcttcaaagtcctcaggaaatacaaacatgaaaactaaaatcccttaaaagtgttccttttggagtcagctcgaaaaagtttctgggcttcgttgtcaatgcccgaggaagtcgaagccaatccagaaaaaattcaagccctcctggatatgaagtcaccaacaaaaaccaaggaagtgcaaagtttgactagtcggattgccgcactcagcagatttgtttcaaaatcaacatacaagtgttacccattattaaacatcctgcgaggaaacaagcaattcaagtggacggaagaatgtgaaaaagctttccaagagctaaaagcaaaattcgcaaaacctcctgtactctcaaaacctctagacgaagaagaacttggaatatacttagctgtcacggagcatgctgtgagtggcatgctaatcagagaagagaacaacatacaacaacaggtctattacatcagtaaaagactcattgaggtcgaaggccgatacacattgatagaaactcgcttactaccttattctagcaacaagaaagttaaggccctatttttaagctcatcaagttcgggtgtacactgaccaaccattacgccaaatattgcaaaagtcggacccctctggatggctactcaaatgggcagtggagtttggtcagtacgaaattactttccaaccccgaacaacaatcaaaggccaagccttagaagacttaggtggtagaaagcacatgcaaagaagaaagcgtaccagtaaagcaaccccgcaccggtacaaacacctcagccaaataacagtgaatataagccgacttgaaaactacacgtagacgggtcggctacaaat

SEQ ID NO: 334874 - DNA, 525 bp, Cannabis indica
aacactcgtacaatgtcggtacgcattgtatatggtaaagtggatgtaccctagtaaagaacattcttactcatttattaagccttttaaataggtgtatgagcgcctaaatacaagtcgatattatatgatttgttatacgctttacttactgagtctgacgactcacagttctgctttcatgtgtaggtaaaggaaaggcgaaggctgaataggagtgagcttcgagctaggatgatgttgtacatgtcatggcagcgtgacctggagtgttcggtctcaagacattggggttttattttgtagttgctgtgcgacctgactaaatgtattttgaatattttgtaaaagtttaaatacaggatcctgacttttgtaaataaatatataaaagtttataaagtttaataattaaatctaaaatttaaatttgacacaattttaaagaaaatttctttgattagcaaagatggcactgtagcgcgcctaagtatcagggcattacaattttggtatcagagccgc

SEQ ID NO: 334875 - DNA, 634 bp, Cannabis indica
taaaaatatagattgtcactaaagagtaaaacccaaaattttctaatttttattaatataaaaagtattggcatagagtgacgcgaaaagcgcgaatggacaaatataaccccacccatcttgcgtgtcactatatcataatctaatttttttatacaaaaatagtacagctataattaataaataaataaaaaataaaaaatatatttaatactgataaatccttattcacgccagtactctctctttcttaatcaattacaattctcaatcaattaaaaacatttatcaaccaatataaaaaaataaataataaaatataaaataaatataataataaaatgaattattctaaaccctaaacaacaatacacacacgcagccctctctttcaaaaattcaacttttcaactttttctcctctctcttaattacagccgcacaaataggttagggtttcacatgtcttcttctcgttagggttttacaatagctcgttgtggcctgtttgtgcggcggagatccataacgagcttaatcatctccctcgttttttctctctgtgtttagccattttaaacctataaccttgtatattaattttttgtattgtctctatctctctctctctctc

SEQ ID NO: 334876 - DNA, 778 bp, Cannabis indica
caactctgtataagaacattatttaatcccagacacaaataaaaagtaacatgaaccttttaactcaacttcaaaaagtatgataagaatgagatcctaactaattataatccaaaagcataaacataatttgtcaaattagaatgaaagaagattaaatgctagaaaagaaaaacttaacaatattgtacaaaaatatgaacaagagagattagacaatgcaaactcccaaagactttctgagggagtcaaagcgacttgagtctagggccttggtgaaaatatcagctaattgtttttcagtatcaacatattctaattgcaaagatttattttcaacaagttccctgataaagtgatgccttatatcaatgtgctttgttctagaatgttgaacaggatttttggaaatatttatggcactagtgttatcacaaaagatagttaaaacacccaattcaaatccataatcaatcaacatttgttttaaccataacaagagtacaacaactaccagcagcaatgtactcagcttcggctgtggacaatgaaatggaattttgtttcttgctatgccaagatactagattatttccaagaaagaaacaacctccacttgtactctttcgatcatcagcattgcctgcccaatctgcatcactaaaacatgcaaggtttgaattagtatctttagaataccaaattccataatcaagagtactattaacatatcaaataatcctttttacagcagatacatgagattccataggattac

SEQ ID NO: 334877 - DNA, 1456 bp, Cannabis indica
acttctaaattgataactaatcagattgtaatgagttttatttagggcataaaatccaacagtcaagacttctggatgttgagtagatgactcgtacaagcaagataaacctctaacaccgtgtgcatcccgatagccccaagccaatcttctggatgagtagtgaacatacatcaagatattcagctatgtattacattcattaattattagatttcacaatatcagaccttaattctcaggatcatatcagagaatcatatcttctgaatatggaaataaagtaatattgtcaatggagcatttatgtgtctttattatccacaaaagtaggacatggttgtctaattatcaacatgatgtggcatccatgtcagtagaagataaatgcctcatggctaggcttcaccaaatgagcccaaagttaatgtattatctatatttaccccattagtgggcaaggtttacatatcagagatctagcactataaatataagaaaacttattcatggaaatggttagaatctcatttcttgagtgctcaggcaaactctagggttcaaatacttaataagacacttgtgtaaatcaaaagggcttttctagtcttgtcataataataggaaaacttacaaaaatactagattttgactcaatctttataaaaaatattgccacatggcaaatataacttttatactgccttgggactttttttttcttttatactataaataccgaaaataaaaaatgaggtcttcatcttccacatccacagacagaaccaccacatcaccaccagaatagtcagaacacaaccattaaatctagtgagatgaagcagaaacattaaaaccattaatattggggctatcatggtttttgtaatgttatttctgtccactattattttgtatgtttaacaaatgttagtttcaaattacacaggttaaaccaaccactaaatatttgtttgaggtgaccagaatgaaagaatcatggacagtaatactcttaccttccattaaaatggtgaaatctagaagaccaaaaagaggatggaagctggctggaaaaagaaacaacataacaaattaaatgcagcaaatgtgggcagctgaggcataacaagagaacatactggagaagacatcaaaaacgaaaagaagaagaacaactaaaaaatgatagtagaacaacggaaaaaactgaacatatattggagcatatgatactgatgaaaataacttacatacaaatttcattattttcctattactattaaaaatagagcagtacaataatatttagaaaaatgtaataaaaaaatgaaagaaaataacattaaaacaaccttaaaataataataaaaaactaccaaaataaaacagtaactaaaaaggataagttggagaaagatggtggacttggaagtacggtagagatggagacagc

SEQ ID NO: 334878 - DNA, 1176 bp, Cannabis indica
tgtttaaacaacatacttgtgagtagatctaagatcctggtaaaataaattccaacacaattgtgagggtgaggtccccacagtggaaatgggcttggatgaagtcgaagaaacacaagctggggaacaagattcgactgcattcgagacccaagcaagacgggtggcggagtatgtggaaagtgcaaatattattccaccatcctcacccaaaactgcaccagacccctccacatctacaactgtgcccccaacccctgcctctgtgccgccaaccgctgttgcagccaatgagtctgagtatctcttgttggctaagagattggacaaggtagaagcgcaacaacttgcgattcccactgcccagactgagatgaaggatgacttcaagagaagtcacaaagagatgaagaatcttatcatggatcaaattgcgaccatgataagtttggtacagaagcaccttctgagccgacacaaccatcagcgccggcacatgaatcatcgccaacacatccatcagccatggcagtgccattacagacggtacatccttcaccgccgagagatgatgatgatgatgatgatgtctacccagaagattggcaacctgacgtatgtgacgttccttctactcctgcaaacgccattgtcatttcgctgggtgatacagaatctcaggatgtggaagagttgcaggggccaccagctggggtggacttctgcagggttaggcgaaagcggaagccggttttcttgaatgactacacagctgggaagaagaaacaacgacatgggcccgtggtagtagacacactgaaaccggcggactcccggctgttaaaatttttccagaagtggatcacttatgctagggacaacggccgtcctagggatgttcacactggcgtagccacttgatcctggttcgtgaaattgatggtgctgaacgaatggctcgacgatgctgtaagttatttcttaacagaattaatttattgtgtttttaaatgtttgtgcgacttatatgcgatttatatgcgatgtttgcactttctgttaaatctgtatatgcgacttttatgcgattatgttgcgatgtttgtgcgattattcattaatttatgtattatttttgcgacttatgtgcgattaacatgcgatttttgtgcgatt

SEQ ID NO: 334879 - DNA, 582 bp, Cannabis indica
ttcctgatgtcccttctcattataattcgaacatagaagaatatgactatcaattgcacttgaagaagcagctttgttagaagcttcatgcttaatccttttcctctaattaaagttggaaaaaccaggaggtggcattgcaatcagatttcgttcatgagctcgtaattctgcttcgagcttatccatgttggaagagttaaaattgtttatcatgtaagatacaaaaaatccattatactctggaggaagactactaagaatgaattgaacccattgttcctttgataattcaattccaagtagatttgctttttggaacttcagattcatcatccataggtgcgagtttatgcaactaccagggtgcattttcatactatagagtttatttgctaagacattgactatgagtgggttgggtgtgggttattcatattggcactacaaatatcaataaacaaaagtaagattttggttcaataaattcatacccaggttcagaaattaacaagtaatcacatatgtttataaaaataccaaaattctaacatattttattttccgaggttttcaacaaac

SEQ ID NO: 334880 - DNA, 747 bp, Cannabis indica
tttagtaaccatcaatgcgtgttaattccatttttggaatttttagattgacaaaaaaaattataaatgtattatttattttttggctgagtttttaattttatttctacaattttgtatttatattggttgaattataataggtagaaaatatgactagcttttctatttatgaaaagtaaggcataaaggataagtttaatgattcaattaatatctattgatctagctgtgtatatatgatcctttgtgagttttcttaaatgtttgatcagattgaagcaagactttccttttctattaaaggaaagtcacacttactgctcacgattctataggtacataggaattttttgtgctgattgaagaattattttaggaaagtttccaagtgagttgcggtcttgttcagaccatgtatgagctatcattaaggtgtatattgactataaatacaccttatatcagctaggtcatgtatctctttcatacactttgaattgtattcatatcttttaaaaaaaaaagagtcttcattttgcagagaagagttgttcatctctttttctgtgtttatgtattatgtattgccttgagtctataatcaagtctataaaggatgacaaatatcagtgctagctttaagagaaggttctacaagctttcgagagatagcttttcaactctttccttgggaggaagcaagcactcttcaaggagattgaagggagttcgagcacttgaagt

SEQ ID NO: 334881 - DNA, 479 bp, Cannabis indica
gtcacacttactgctcacgattctataggtacattaggatttttttgggttgattgaagaattattttaggaaagtttccaagtgagttgcggtcttattcagaccatgtatgagctatcattaaggtgtgtattgactataaatacaccttatatcagctaggtcatgtatctctttcatacactttgaattgtattcatatctttaaaaaaaagtctttgttttgcagagaagagttgttcatctctttttctgtgttttatgtattatgtattgccttgagtctataatcaagtatataaaagatgacaaatagcagtgctagctttaagagaaggttctacaagctttcgagagatagcttttcaagtctttccttgggaggaagcaagcactcttcaaggagattgaagggagttcgagcacttgaagtttcaacaagattcaattagaaggtggaatacatcaagcttgcggc

SEQ ID NO: 334882 - DNA, 2026 bp, Cannabis indica
ctgtgggaagtgccccaattagatcaatccccatatagcaaatgggtaaggcaaggtcaacatcctcaattttgtcggtggtacgcaaggtatatgtgagaatctctgacacttatcacactttatgacaaactcatgggtgtccttgttgatggttggccagtaatatccttgtctaatgattcttttttatagactttgccaacctgcatggtccccacaaaagtcttcatgaatttctctgatgatctcgttcgcttttgtaggaagaacacaccgaagtagaggccttgaataacctctcctatacaattttccttcaactattatgtagcaaggcactgaattcaagagtttttgtgccttgtttttgtcagttggaagttgtctgccgagtagatagttgattataagaataatccatgtgggtgagctatttatcatctcgatgtcttcctcttcccatatacttgtctgatttagcatttccactggaactaagtttagttcatccaagtcgttctacgaggctaattttgcaaaggcatcagcattaaagttttgttctcttgggatttattcaattttaaaataatcaaacctttccaagttcttccggactctctctagagacttagccatttttaggcccttagcctggtattccccgagaacctaatttacgatcaattacgaatcactatgacatatgagattcttgaccttcaatgcttttgctatcttcaaacaagcgatcaaggcttcatattaagtctagttgtttgatccatcaaattgaaatatcagagcataatgaaacttaaagccttttggcaaaattaatattacccctacacccgagccctgctcgttggatgcaccatccgcgaataacctccaagtgtccgcgtctcgctgaacaagaggattttcctctagagttattccttctattaggaaatacgccaaagcttggcccgtggtggatgtctgagggtgataagttatgtcaaactgccccgttcaatcgaccattttatcagtcttccagatgcatctggttttgataaaacttgtctcaagggttaatcagttaacactttaattggatgtgcctggaagtaaggccataacttgtgagatgcgtggattaggcataagacaagtttttaaagagggggataccttgattgtgtcccccgtaacctttactgacataataaatatgttggcggtgctttccctcttcttgcactattgctgcactaatcacgtcttccgagacagctagatagaggagtaatgcatcttcagttactagtttcgccaaaaccggaggtgttgccaaatgcctttcaatgctctaaaaggcttcctcgcattcctctgtccattcaaatttcttgttgcctcacagtacatgaaaaatggtagacacttatcagttgacttcgaaatgaatctgttaagtgcagccatccttcctgttaaggcctggacttccttgggcttggttggtgatggcatatctatcaaagccttaattttctcaagatttgcttcaattcccctcgcgttgaatgtaaattccagaaactttcctaaggaaactccaaaggaacactttttcgggttaagtttcatattgtacttccttaatatttcgaagcactccgagaggtctgtagtatgaattcccatcagtatcgatttcaccaccatatcatcgacctaaacctccatgttccgcccaatctgattcatgaacatttcattcactagtcgctgctatgttgccccagcgttcttcaacccaaaaccaaatggcatgaccttatagcaataaagtcccatgttggttacgaagcttgtgtgttcctgatttgggacatgcattttatctggttatatccagagtatgcatccatcaatgacataagctcatgcctagcaattgcatccaccaactggtcaatccttggtagtggaaagaaatcctttgggcacgccttattcagatcagaaa

SEQ ID NO: 334883 - DNA, 459 bp, Cannabis indica
attaaactaagcggtctttacgttagtgttgtgattggtagttctctagctactaagtttcctgagtttagagattcagcaatgttagaagtcatagttgtatacctactgtgtttgttgtggtaccttgaccatttgtggtagcaaacttgttgtaaataaggtctaacacgattgtccaagctgtcaagcttactcatacggtattcaaattttctctttgtgtatgtttttgctgctgcaaagaatggtttatcgagcttgcttgcattcttcttgaaggttgctttcaggttgcttcataggtggtatacacagtagccatgcattatttctaaaactacatgagtagttaccttaattatgctttcatgtttgtctgagatcaagcactgttcttctctgaccccatatgtttcccttaattttgtaaaaaactattgccatgagttgtttttt

SEQ ID NO: 334884 - DNA, 780 bp, Cannabis indica
gcacagtatgtttaaaatcacgtaatacgcctaagctagttagggtgttacattaaacatgtctacataacgacaaataacacacatataacagtagtttgttcatccatcccactgcggcacatacattcgcagaatctacttcactaggattgaatattgaagatattaaaactccactaaccattaataattaatttataagagatgttacctcggatgttagaattaagtgtttaggccaaggaaggaacaggtgcggtatgtccctaacatatctgcacccttcaattgggattgggatttcaccgtcctcttgcagcatttttgaaaccagaattcgggcatgtgaattatcgtagtccgtgcagtaaaaaatgattttaccaacatgctcttacaaatacgctcgggccacaatgttgtcgacgttgtcagagcagagatatacttgctgataaagggccacatcgtcatcaaaattgtacaggagagctggctccttaagttaaataaactcctcagcatacgtttatggttgaccctcatcctcacgagtgtatggttgtggaacatacgcctcaccagccacctctccttcttccttttgttcggcagtgtttctcttttgtttaaggcattggacttcggcttttaatttttcaatctccttcgcttgccgagccacaacatcagacacttcccttttcttcctaccgaacagtttagatgccctggtcaagaacattcaaatcataaaatgcaaattagctacgattt

SEQ ID NO: 334885 - DNA, 563 bp, Cannabis indica
gatatgttggtgaagtcaataaaaagtggagaccacgcaaaagaactcgcgaagtgctttgaaatactaaaaaagtacaatatgaaactcaattcaaagaagtgttcctttcgagtttcctcaggaaaatttctgggattcatagtcaacgcgaggggcatcaaggagaatcctaaaaaaattaaggcattgatagatatgccgttaccaaaaaaaccgagggaagtataggccttaacaggaagaatggcagctctaaacagattcatctcaaaatcaactgacaagtgcctaccattcttcaatgtgttgcaaggcaacaagaagttcaaatgggcagatgagtgcgaggaagccttcgcaaacataaagaaacatctgtcaacccctcaagttttggccaaaccgataactggagagactttatttatctacttggctatcttagagaatgcaattagtgcatcactagtgcgagaagagagaaagcaccaacaaccagtttactatgttagtaaaaggttactagggccagaatctaggtatccctctcttgaaaaact

SEQ ID NO: 334886 - DNA, 473 bp, Cannabis indica
atcatagtcttgtaggtgcagatcggggttgtgtcgtcagactttattgcgtgtggcagtctcaacacgtttcctcccatgcgacattaaatgcgagatgactgctcaggggaagcctgacacctcgcggagatgctttgatgttacttaggcctccgggagcataggggacttcgtatgccttctccgggaggcaggtcccggatgctgcctttcttcataaagacttaggaattaattcaaatgttaaggtcttttggttcacgtgtccctgtctggttggtccacgtatattggacaaaatcaggggcaacacaaactatttaaataagattgtacaaaaaaaaaaactatttaaataagataaaaaaaatagttgtagaagaaaattatagaacctgccacttaacttatcattaggattacataattttatagatacaagagcatcacgaatgcgaataaagaaagaa

SEQ ID NO: 334887 - DNA, 614 bp, Cannabis indica
aatctataggacattcactctttaaatgtaaatatgcgtgttctatttagacattcagatttgatgtttgatttgaaccttgccaactcaaagcatagaggagactacttgatgcacctttcgaccatttactctaaaactaatatgaaatttataaattgcaccatgtggtcgatttggtccgaaagatacaaagttgtccatggaggtactgcaagactagtagcaacacttttttttttgagaattacctacgaaactaccaagaagctcaagcaaaataccatacaaatggtaactctgtttcaaggcctttgctaatccaatcttcagttcattggcatccacgtgcaccaggggaattaaaactggatgtggatgcaacaaaagatcaagctataggcattataggtgttggtgctattatccgagatactcatggtaatgttgtcgttgcattctcaaaacttttgattggaaattttgtttacatgaaatggaagccaatgctagtttttacaatttaaattgggctcccaattgtagcagccaatcacttatgttgaaacagttgcattgatgctctccaatgctttttttttttttttttacaa

SEQ ID NO: 334888 - DNA, 527 bp, Cannabis indica
ttttgggtatcaaacggacctccccaaaaggtaattttaatgtggtcgatttcccctcttttgcaatcttgctctaggtttacatacaactgcattgatattagtaaaaggggctttagatgtacgtggttccaagttaatgccaaataaaaaggattttggctacaattttccttgtgatggtccacgacgaggcagtacttgtgatatttcagcttaggatgctttttatttggcagttttctagatgttaaataccattggatgagagaacaaactaatgcttcgttccagtatttcgattgaaataccgataaatggtgttttttcgaaaaatagtattcttgcttattttgatgatcctcaatacaaaagaaagagtttcagaattactaaatatgggattatatatttgcattcaatcttcaaaaaagagggtgtaattgagtatgtatgatggaagcgaatctatttcgagtgaatggataatctgagatagaacgagaaaaattgaatttgattaattc

SEQ ID NO: 334889 - DNA, 822 bp, Cannabis indica
aattggtaatgtttattagtagaggattgttttattattagaaccacatttaagtttagaaactcaattttttttttttaaatagtgggtataattaaattttttttacataatacactaaaaatttgaaaaaatataaaaatatgttaatacggaaaaaaaattatttttttcattttttcatttacaaaaatacgctcttgaataaaaataataaattgttcgatattattttttgattgttttatagttcatttatagttattataagtgttgcccctgattttgcccaaaatatgtggaccaaccggatgatgacacgtggatgggaagggattagcatctaaataaaacagctaagtcttctcaaagcaaaggattaccttagacatgcctcccagagaaggcatgtaagtctcatatgctcccggagagcaagatggcaacaaagcatctccgggtggtgtcagattccatctgaacagtcatctcgcatttaatgccgcatgggaggaggcgtattgaaactgccatacgcaataaagtctgacgacacaacccccaatctgtacctactaggctatgatcaataaagtctagtgacggctactctgtgaggaatcacatcagtcaaaaaggattaaggactgccctcataaaatccctacagaacctagggattagaccatgcattacccatgatatattcattgggaatgtataactttactaagagttacagaaatgcatgtaccttaattctagggatcaccccacaaaaacactataaatacccccaaagctcattaaagatgggtcgag

SEQ ID NO: 334890 - DNA, 508 bp, Cannabis indica
cagatacaacctctcaatattgatctccccttgttgtgaagaaggaagcaagttattaatcacaaatttgttccacattttgccgaaataacttaaactggtatttttgatatgcctcggagtaaccatatccttccccatcatttactgtgtacctggcttagtcatatctctcaacattttatcatagtccttgttctctagatcactatggtacacatcatcttcaatttctggaacaacttaaattagatattttagaacaacttaaattagatatttttcaaatatttattttattacattttaattattttcgaaattttatatttttatataatgattttcaaaaattaaatttgaaaattaaattaaagttgagaattaattatttaattaattttggatcaacttaaattaagtaattttcattataaaaatatatggattaaaataagtgattaattaaaaatacattatttaaaataatgagctttaatcaaagaga

SEQ ID NO: 334891 - DNA, 848 bp, Cannabis indica
caaaagttacaaaattgagaaaaatcaaagaaaaagaaaaatcaatttttcctctcaagtttcctccctctttcagccctttgagcagcagggatttgccacttttcctttgtgaattcaagttctttttgtgttcaaaccaagctaggttagctcttactttttctctctttaaatttcttgaaaattaagaaaaagatggtgaattgcatgcttaatttggagtgttgttgctgctgtgtttgtgtgttaatttctaaagtttaaacttgtttaattgagtagaattgagctggttgtgatgcatgctagttgtgttattcaaagctttaaattttggctcaaaaactatgattttcaaggtaatttgatggatttcgtggctgtagttgttgtaattgtttagtgttgtttgcggagggttttatatgcatatttgagtagtttaaatcaagttttaatgcatgtaggtgagctttagccaagtttgagttttgaactcaaagcttggagctcacatggcatttttcatatctgtgagttctgggttgttttgatgctttggaaatgtttatttgggtatttagaacaggtctggaaggtttggtttggattgggtttattttgagtgagaaacgaaattttgaagtttcctgctcagaaccggaatttcggttcagcaaccagaattctgaatggtgttccaggaattcccagaaccaaaattctggatgtagaaccggtctgtcggttgggggatttttgggaaccctagttttttccatttttatgttgtttagggtattgccatgctttttatcgatagggaaacttttagtttctagttt

SEQ ID NO: 334892 - DNA, 552 bp, Cannabis indica
gcacagtaatcaagatacatccctttggaatctccaaggtaatcaaaattttcatgtgtcgattagccttcccaaaattcatacgaagacctcaagggcaatcgtttccaggctctccaccaccttcttgagctctttcttctagtctgcttagtctggacgtcccctccaactttgagagaagagtgcggagattctccctcttgtctttaagctcaatgacctccctagacaaggcgtcattatttgcctccagctgctcggtcgagggcatctcttggatttccttagtcagatcctcaaccgggctattagcagtaaggagctttttgttcacctcctggagctccttcctcacatcctgaacttcctcttcaactgcatccacctccctctgcaatatgttggtggtggcaaggttcttggcagtagtggacttggctcgagaataggcgtaagccatcttcagattgagcttcacaaaaaactgttaaaattcgagctaacaaaaaaaaataataatttcaagcaacttaaatttgaataattttc

SEQ ID NO: 334893 - DNA, 638 bp, Cannabis indica
tgcatcaaattagaatcgatggataaaagaaatgggaaatgatgtgttttaaacagtaatgacaaatatttctcaagtatgggtacattgtcaaacttaatatggtgtgagtacaaagatttgctaagtatggtgcaatcttaaagttaatatattctcaaaactaaaataaacacaagtctgtcaacataataaccagttccaaacgtgaactaataaaaacagatgtctaaatccaaatgttcccaaatccaaactaaacaacacactaataacacaacctaataataacacaagtgctttttacagactattcaccatatgaaatcttagccttgctagaccgaatcctaggggaggctcttgaggggggaaacatgtttgcgtggcaagacttcgccgtactgaaccgaggatcgcgtggagactttgacggactacgcaaaagggccgaggatgatgcaaatgagctgccttgtgcagccctagatcttcaaccactttggtacgaatttcattttgttcatcagttatgatcctcgcagcgatttccaaacgtgcctcaatcgggtgaaactgtgggacaatacagaaacaaaaacaaaaacttagaaaatgtaattaactctaatcaactt

SEQ ID NO: 334894 - DNA, 900 bp, Cannabis indica
aaaaggcaagagagagtttcagcacctgctgaaacaccagaaatcatggctgacaacgccaatgttgcacataatggaggaaacaacggtaataacggaggtcattgaagatcaagctaatggccgtagcttgagagattatatcttcccaactcttacgggggttcagccatgcatcaggcgaccgtcagtggatgctaataacttcaaaatcaagcctgccatacttcaaatggtgcagtcctcagtccagtttggtggactcctttctgaagatcccaatctgcacttatcaaacttcatggagttatgtcagactttcaaagtcaatggagttagtgatgacaccatccgcttgagactttttccattctcgctgagagagcgagccaaaagttggttgatctccttgccaccaaattttatagcaacatggactaatctggcaacgaagttttcctccagcaaagtctgctaagctgcgaggggaaattaacaatttttgtcagcaagataatgagtcttgggagaggttcaaggatcttatcagaaaatgtcctcatcatggcattgagaagtggatgctgattcacaatttttataatgggttggttggtaacaccagaacactcatagatgctgcagctggtggaccattcatgaggaagagtgcaaatgaagcctacgatttgttagaggagatggccttgaacaatcaacagtggctaactgaaagaagccaaacaaagaaggtggctggtatgcttgaggtggatgccattaccaagttgacaactcaggtagatgccctaactaaattgatagatgtgtaagcaaaataagtctacaggtggtttgtgagttgtgtggaggtcctcacccctatgaggaatgcccggt

SEQ ID NO: 334895 - DNA, 598 bp, Cannabis indica
ataataatatatgacatatttatatagtttgtatatgttatgtacctcagccaaaaagtgtttccggttcgaagcttgaattaaatcttccatcaactttattacatactatccaaaaagtgatgatccataattcaatcattttatctaatggatcccaattcacctcttcaatatattcacttacttctttaggcttaggagaggtatttggtctactaggggaatttttccgatgactataccaaattgtatagcttttgtcaatcccattgaaaaataaatgttccttgactttacataaattcaacttttttacatttccacacttaacacatggacaaaaaatatcatttgggcctaccataatttccatacaaaatcttattaagaattcaaccccatttctatactcctcagataacctacttgttgacatccatatttttcttcctacatcattcgtatgaaattacaaaaaaataaaatcaaaatgaagaacataaaatttcattaacaatacgatcaaatcaaacaagcaaacatttatcaataataacaaataaaattctaaaaaaaattggacagcatttcccct

SEQ ID NO: 334896 - DNA, 746 bp, Cannabis indica
ttgacttagggttggtatggggcctgactgctggaattttaaatctttttcagaaccagaatgtcttcatccggttccatatcttccaagaagggatgaaagcgcctggccaccctggaagaggtaatggtgggtcccgtcgcccaggaggggtataggccacgtgccacgggatgggaagcggccgagcttcactctaccttaacttgccctcactagctggagcaaattgtggtggtggccgacatccagcctacgacttccgggacgtaccaccggccgccccgtgacgcggagacgcccaatcacaattacggaggcttcagagcttggagccagacgcatttgatgaccggggctatgcttccccttcaggattatttcattaatttccttgtatttgtcgaccttgcgccataccaacttattccacaagcttaccgcctgctttcaggcttatttattttttactctacccggggatggggctctcccagtccggcagagatactgtacttttatgaactcgtttctgtccccaagaagggggacaaacttaaggacgacttttatggcttccgggcccaccctttgaatgagggcccggtccccttcaaccagcaaaaacacgtcaaggagtaccgtcaccgcttcttcttctcctccgggttcctggctgtggaacacccagagcttctcacggagtgggttaggatccctccgtatgagcgaacagagccaactca

SEQ ID NO: 334897 - DNA, 834 bp, Cannabis indica
aaatttaaaattttaatattttttttttcaattttttaagcattttaaatataattctattccatttttatttttattatcattcttattcttatgttttcattccttccaactaaatatcacttaaattattttccattccatatttagatgtgcctttttgaagagaagggaagttctaatttaattaatttactatatttctgcttattagtatctttttcttttgagggtaatttttatttttattgtttttaaagtataataatattgagattttatgtcctaaataaatctcatttcaatataatcttattttctatcaatagaatattagaagtcatttaagtttacatgttattttcatatttataggttaaaataaaaattttgatctatccagaacatatagttatccacagttacagtgatgtcatcacagtgaaaagtaattgtgattgtattcttcaaagtttaagtcctatcatttatcagtgcattggatttacactgacgtgataattaatgataaaatttacttacacttagataagtggtatgtcctttctagggcattggtaaagtgtactagtatcggatgtaagaagtatacatcaaattggaccgatattgagtttggataaaatatcataaacttaccgttatatctttctaagtcaatattatttagttgatcttagatcaatagatcttaatcttgagatcgttaagtctagcttaattgtattatttgtgttctttgagttattcgttaaagctgaccaaatgaattggtccaatacttacatcttgggaacatggtagtacaattaa

SEQ ID NO: 334898 - DNA, 609 bp, Cannabis indica
aacataaaaaaaactagcataaaatttagtatacgtgcctcgcacgtagtttttgctagtacatatatatgacctgttacgtggtctttcgcaagaccgtaggttatatatacatttatatattattttgtcatatatgcttatatacatatttcagttgcgcttacaattaattatatatgctacggtaaaattattttaattaagatattttagaaacaattaaatttaaattttagtgttggtgttagtttataattaatattttgagtaaattaatttaaacaatctatcgccaaagtgatctcttttgtgtagattaatttatttaaatattaggatgattgtgtgtttgtaattgatgcttatattgactagcccaaaggtaagtgaatattttgctagatttcaaacatacatgtggcgataaatgtgtgacaattataaggtaatttgtgtgagcaatacgttaatccaaagattgacctattgtttggcacattatggtcaatatttaattgatacaccaagagtactgcttacagttaatattactgtgtaagacttgatattaatgtgtgcttggtatcttgagatggggattaacca

SEQ ID NO: 334899 - DNA, 541 bp, Cannabis indica
tgttgcgaacaaattggttgagttcctcttgtattgcattgagccattcttcaaaagtcatggcttccttcacatttttcggttcaaattatgaggcaaaacagagaaagctagtcaaattaacataccttcgtcgagttaccatgctttcttcaggattttcaagaatgagatctttgggatgatttagtttaactctggtgcttggttccttctggatagaattagtgatgatgtttggatgagtcgagataggttgttctagttctccactatcagatgcagcgacaggttcgtcatttgcgtcgccagaaatgggttctgcgacatcagaatctacttttgcttcttctgatggagtatccataaagctatctatctcggattctgtggaaaattttgaaaaatctttaaaatcatcaacaaccacattagctgattccaaaacagtttgagttctcatgttgtaaacacgataagctctattgtttaaggaatatccaataaaaacaccaacatcacttttagcatcaaatttacc

SEQ ID NO: 334900 - DNA, 1265 bp, Cannabis indica
agatagctttatgtacaaaacagtatttgagcgagcaaagcttcctgatccaaagtttaaatgtttgccatcagaagaggattggattagagctcaaaagttatgtgaaaggctagaagtttttcatgaggtgacagagttattttcgtgtaccaagtaccctactgccaatctattcttcccagagatgtgtaaaattaagaggaaaattgaagaaggaatgtcatcaaatgagttatttattaaggatatgtcaaatcaaatgatgtttaagtttcaaaagtattgggaacagattcatgggattatgactattgtagtggttttggatcctagatacaagtttttgttgctccaattttattttcctcaactctatggagatgataaatgggaggttgaaattagaaaggtgcgtaggctttgtgatgatatattcaatgagtacaaatctaaatgtcctactttaagtgaaaacaattcacttgtggaagggtcatcatcttcttcaacacaaggtcatctatctaactatgacttatatgttagagcttcatctggtgcaatgtatgaaaagtcagagtgggatctctatttagatgatcaagtgttacccatgactgatgaattctttgatatatgcaactattggaagataacaggatctaaatatcttgtgttgaacatgattgctagagacatatttactgtgccggttagcactgttgcttcagagtcctcattcagtactggtggtagacacgtgagtccacatcgagcgagacttcatcctactactttggaggcattggtctgtactcaaagtttgttggcaattgacaaacaatgtataattatttatttcttattatatttgtttatacattaattaataatattttattatattattttaataattttttttacagacacaaaaattaaactaatcaccgtaaatgaccaagctaataatgtagatcccaatatggcaattgttttcatttttaaaatttataaattaaattatacttttattattaacatatttatttttacagtaaatcttgaagactagaagcataacatataaaaagtttatagttaatttcatgtatttttttagagatttatttcatgtaatcatcatactacattattattgatgataatattagtgtactttcaaaaattttgtaaattttttaaattttctatagtaaaattacatttttatgtgataagaatttgatattctttttttt

SEQ ID NO: 334901 - DNA, 553 bp, Cannabis indica
ttactgacaatgtgtccgagaaaagacatctgagatagccaaaactcacactttttgaacttggcatacagtttattttctcgtaatcactacaaaaccatctagagatgttgctcgtgttctgcttctgattgagagtacacaaggatctcatcgataaatacaataacacatatatcgagaacatccttgaagaccctatcattaaatcgataaaagttactggagcattggttagtccaaaagacataaccaggaattcatagtgcccgtacctagtgcggaaagtagtgttggaatgtcctcctctcagattctcaacttttgatagcccgatcagagattaatctttgagaagtccgtcttcccttgaagttgatcgaataagtcatcattactatgtaatgggtatttgttcttgatagtcagtttatttggttctcggtagtcaatacacatgcgtagggatccatcataagcacagagcatataacataatgtttgatatattttaccaggatctagatttactaccaagtatgttttattaaca

SEQ ID NO: 334902 - DNA, 556 bp, Cannabis indica
tcagttatttaattctaaactttgatgattcaaatagttttttaataatgcgtttatggtgcagaattatggctctttgtctctttcttggagaaagacagaacatgatttttaaggcttttccaatttttttttataattgaaacttactggattttgaaatggagatttaaacctctcgaagtctatggacacatttaattttcgaagacagaaatactaacccaaggcacaatacagattaatgaagaaaagataaacatccttatattattaatttcacttaaaatggcatgtaactccacgataccacaaattctgccttcaatctatcatcaattccagagaaataatttcttcaactcaaaataaacctctcacttttatgcactaaaatcgattataagataaaaaagaaattgttcagagtctctcccttaaatctttaaacttgataacgatatccaaatatcagttttcaatattttaataaatccatcttccattccctaaaaaaaaaaaaaactaaataaataaattcttttcaaataaataa

SEQ ID NO: 334903 - DNA, 1032 bp, Cannabis indica
ctcattggctgcagtagcggttgacggcacataggcagaggttgggggcacagttgtagatgtggagggttctggtgcagttttgggtgaggatggtggaataatatatgcacttccaacatactccaccacccgtcttgcttgggtctcgaatgcagtcgaatcttgctccccagcttgtgtttcttcgatctcatccaagcctatttccactgtggggaccgcaccctcacaattggtcttccaatagtcaacctcccaattccgaggatataaaatttaaagaacaaccatctgcaaaaagtgaatatcacgttaaatcttaattatgtcgcatataaatcgcacaataatcgcacaatatcgcccaaaatctaataaactttataagttattgtcaccaaaatcgcataaagatcgcatagtaatcacattacatcgctaaaactctattatacataaatagaaaagtttataagctactctcataaagaatcgcacaaagatcgcacaataatcgcataaagtcgccaaaaatataaaacaattcaagtgaaaatttataagagactgccaacaaaatcgcacaaagatcgcataaagtcgccaaaaatataaaacaatgcaagtaaaaatttatttagagactgccaacaaaatcgcacaaaaatcgctcatgaatcgcataaagtcgccaaaaaacacagattacacttaacaactgaacatttataatgcactgtcacgtaaattgcacaaatatcgcacaacgtcgcatcaaatatcgcatataaacacagattacacttaaatcaaaaaataagtgtgctaaaatagagaaagattcacatacccttttctcaaacagtgcagccacgtcaggtttcttcacattgtgtttcgtgattgagtcgggggtgctccagttcaacattcgagggaatcgagtccctttgcactggccatacttcttccccaaaatttgcatggcctcaaatgcccaatattgcagggcaggagcatatccgtaca

SEQ ID NO: 334904 - DNA, 1334 bp, Cannabis indica
atattatcccaccgggatagcagtatatatgcccggagcccagccatcgggtactgtcccgaccgcagctccgccaatgagcggcatacaattctccgctacttccggatacagccagggccaggccctggcccccacgtcgtcccattttgggaatccctcgaggataaatggacaagctccctcgcactccgctccaactgccagcctggatggtccttcccagggctcgaggagtaaaaggtcctccaaaggcagcacccggacggaggaaaagcgaaaaaaaagagggtacactccccaatacacccagtacacggagatgacggactcccaagagcgtgtgtactttgctactaggcaaaatacacactatcagagaccacctcctctgtacaaagatagttcccggagggaccccaacaaaagatgtgagtatcataacgacattgggcatagcaccaatgaatgcaagaatctcaaagatgagatcgaaaacttaatccaattgggacacctctacgagtggatcaagaatcggctgcctcatctcaatccaggtcaggcgactggagctttgccacagggaacaccagggggtgcagcaggagtattggctccagttgctcccactggagatgcccagcatatccccggtctgccactcagacctaatgggatagtggccatgatctcaggaggaccccatatcggaggaacaacccgcaaagaattaaagcggtatgcaggggccgtgaaacacaatgaggtttgggaagttactcaactcccagctcaaaggccccggctgatggatcaacccatcacattcacggaagaggacgctaaggcggtgcgttttccccaccatgacccgttggttatagagacccccatcgccaataaagtggttgtcagagtcctgatcaacaacggaagttccgtgaatttacttttcaaagaggcctttaccgcaataggcctgacggaccgagacctctcaccaagtggttcccaacttacagggttcaacggaacgacacttatccccatggggaaagtgagacttctagtcaccttgtgcccggacacccgccagagcacgttcaagtactgcaccttcgtggtggtggactgcccaaccgcatacaacgcaatcctcggccgatcggccttggtagatttcggcgcagtcacatccatacgacacttgtgcttaaagttcccaacccaggaagctgggatggggatggtgagagaaaatcagggggaggcaagacaatgctgcaacgttgcgaccgaccttccgtactgatggtccgggaaaccattga

SEQ ID NO: 334905 - DNA, 1141 bp, Cannabis indica
tcctatcggcttgtctatggaaaagcatgtcatttacctgtcgaacttaagcacaaagcttattgggctatcaaggccctgaacttcgatctaactgcggcaggtatgaatcagaaactccaattttctgaaattgaggagttgagaaatgatgcttatgataactccaggatctacaaagtaaagctgaaagttgctcacgataaacagatcctgagaaaacattttgagccaaatcagaaagtacatttgtacgattctcatttgcatctccaccctagtaagttgagatcaaggtggactggtccatatgtggtgaaacaagtattccccaacggttctgtttaggtcgaggacccaaccgatggcaggacttttcaagtcaatggccagacactgaaacattacattgagagtatgaactttgttgaagaggtccttcttgaggaaccagattatacactctgaatgtttgtttttcctatctatatgctgtagtattttattttatctttatgtttttattttattttgcactttttctatgttgttttgagttaccattatcaggttatctccgctctcgccccatgcatatcgtcaataggtgtactcttttccctatctttttcatttcatattttgtgacattgaggacactgtctaattttgagttgggggtggtgagctctggtgagcgttcatttggaaaattttaattatcttgttgaatttttaagtcaaattttttcaaaattatccgagcatgattgtaaaattgcggtttgagtcaaatttttgctatgttttgttaccaagttgtgattttcagagttattttatgcactttccaaacttgtgaagaaattgttaacacatatagttgagaaaaattttgagtgtaaagtttttcatttttttgtgagttgtgagagttgagaaaataactttttgaacttttattggtcatttgagttggcaaagttgaacttttagaatttcaaacatgacatttactagagggattaatttcttttgtaataaagagtctttattttatttcttttgtatttttatttctttgtatatgttgtctcttgtcaaaaaaaaaatcaaaaaatcaaaaaataaataaataaat

SEQ ID NO: 334906 - DNA, 610 bp, Cannabis indica
aatgaaactgttgaagggtttctacctgaagacgtgccaggtgtaggtaagggtgtcaatgacatatgtgtaccgagcataggtacgggctcacctgattaggagatgcaattatgtgatatgtgggtgctaggctatggcacgggcttgcctaattaggtaatgcaataaaggatgatcagactaaagcatcgacttgtttgattaggcaatatgatgtaatgaagatggttactttatgaggtaacttatatataatttatattattaaatgaatataattccaattattagtataatgattttgtattactagatatctgtatactaattctttttcatggcagatgccagtagtgatttggatttcatcttatgaacaatgcgtaatggtttgattcttattatgtataaatgataatattcgaataataaactatatgattattattattattattattattattacttttcttgttgagtccttgtgactcaggtgtgctccgtggtgcaggtaagggcaaggagaagttagagctaccatgaggtaactaccttctccagtaatgtacatattgaccccgccggcctgtgtgccgagttgcca

SEQ ID NO: 334907 - DNA, 816 bp, Cannabis indica
acaacactatactaacactccacaaatcatattagttagtagtgcaacaaataaacaaacatatattcttatatatatatatattcttacactatcttacctcgttccgtgctcaagtgtgccggtcagcctgagtggaaacgcagctagacgctttacagggccctaaaccataatattcaaaatccgatgagagacacgctaaacgctttacggggatttaaaatacagactaagcttaaccctatcgataaaaaggatgccagcaccctaaattacttgaaaacgggaaaaactagggttcgggaaaaagtcccaaccgacaaaccggttcccaaccggaaccccagttcctgggtaccaaccggtcgaccggttgcacgaggcttctcagaaccggtcgaccggttctgagctgggaacaaaaactcgacccttttaattcagaacgagcccaaacttttcaatactttccagaacacctgtaagcactaaaataaaccagttccaagcaacaaatcttaataacaagcactgaacatcaattcaccattagagagctaagtttgagttcataaactctaactttgctcaaacctcaaatcaacttataaattcactcaaataagcttaaacaacctcaacccattaccagaataccaaattaaactatttcaaatcacacagcaacctagaatctaaaattacaccaaaaacctaacctaaactacaaaacctcaaaagagagaaagtatgaagaattaccttaagcaaagctttcaatcacaactaatatcccttgattcaaactcacaa

SEQ ID NO: 334908 - DNA, 861 bp, Cannabis indica
gacacatgtgcacctatggcgtcggttaataccaaataactgatgccatagggttatatatcagaacctcagcttcgtcttcctcatttcacaacttattgaacacgaagaacacatcagccatagcagccccttacccacgaaaaaaccctcgccaaccacccataaaaaagcctcattctccctcatttcttcaccatttcaccccatttttattttaaaaccttctattttcaatacctaaacctatactgtaaaaaggtttagttttttcccctctatcactataaccgaacctattataaaaaaaggtagtggtataactccggccaccgattttagcgaaaaaaacgttgaatctcaacgtccattaaggtataaatatgatttctagtcattttattaatgtacattggtattatttcgtttttgtaaattttttttggaatttttctattttattaatattatattgtgtgtgcgctataagtggccagatttttgtcgcaatttgtcgtcggagtgcgtttataaggtaaatatttattaacttgatatataatatatatatgcatatattttgtgttttattattaaatatgtgtttatatatattgtgtgtatatatgctatactatttgtgtaaattgtgtaattgtattgtatatatatttgttgtgaatgagaatgaagtagtagggattgaattagtttagaaataaaatttttaaaattatgttagtttgatatataattgattatatatgtatatgtatatgttatttttttcaaaaattaatctatagaatttagtaactagtaagttgttacattttttaatataactagtaagtaattaaa

SEQ ID NO: 334909 - DNA, 513 bp, Cannabis indica
gaccgagatcctgacccagacccaaacttggactcgcactcgggacccgaacatggacttagacccgaacctagaccaagatcagggtccagacctggacacaaacgcgaactcaaagtctcgaactcaactcaaagtctcaactcaaagtctcgaacagaaacgcgaacccggacacacactaagactcgaactcaaagtctcacacctaaaataagacccaaagctagacccagacccggacccaaactcgaacccacaccaggatcagaaccaaggacttagacctagaactgaatccagaatcacattgggattggaacttgggactcggacccaatctagaccaagacccaggacgcgaacccactaccggagcctgatctggacctagactgaaatacggacccgaaaccaaactcagaccaagactcgaactccgacccgaactcaaaccaaaactcgaactcagaattgcaaatggaactaaaatcgaacaaggactaggaccag

SEQ ID NO: 334910 - DNA, 886 bp, Cannabis indica
ttcaaatttcggtagcataaagattccaatcacgctgattatcatgatagtagaatctagaatttacagcttgagatggagaaacattaccaaaagatgaactctgcataggttgcttgcctttggcagcactattggctttggctgcagaataagcactaggaggtgttggagcggatctggtcaatggaggctcaggttcgagatcaatttcctcactttcaaaggagacaccaaaatcttttggaagctctttttcagaaggaatagacacgaatttggtctcgaaatcatcagagaggacctccattggttcttcttcttcagaacttgaagaagtcgagggggattcaatttcagcttcttggcaggaggaattggtctgtcatggcttcatttagtgcaaagttccttcttgagagatgcttgttgggcacgggtgcaagaggatgggcctgttggagttgatgcagcaacacccttcccagttacagcaacagacgatgtagtggcacaaggaggagaccccttttacgatgaagacgatgaagtgcagaatttgtggggtcgcatagatttcctagccacttgtttaagaatctatttcagcttgggcttcacagtctaagattcacgctgaggaagcgatgaatctcttgggtttgatgtagttgcagtagcaggatgcaattttggagccacaggagtagtacttgagggggcaggttcggattccaccatcttgcttggatgccctaggttctttgtcttagccatgggaatctgaaagtaagaatatgaaacaaagaaacaaagaagaggaatcgggtaggtggtgaaattaaatgacaaagaaagttggtttaaataatcatgtgagaatgga

SEQ ID NO: 334911 - DNA, 500 bp, Cannabis indica
agtgcacctcttgaattaattttaactaatgtatggtcatctcctatttactctcgtcacaattttaaatactatgtgatttttgttgaccactttactaaatatacatggttatatcctcttaaaaagaaaacagatacctttgagacctttattcgttttcgtggtctagtggaaaaattcttcaacaaacaaataatacaagtcttttctgataatggtggggaatatgaaaaacttaatccctacttaacatctcatggtatctcccatcttacctcacctcctcatacgccagaacataatggttttgcggagcgtcgtcacaaacacatagttgaaactggtcttgcattactatctcatgctcatcttcccttgacatcttggcctcatgcgtttgctaccgcaacgtatcttataaatcgtctccctactcttacacttaacaatgactcaccatttttacgttatttggtcatgctccaaattatcacaaa

SEQ ID NO: 334912 - DNA, 707 bp, Cannabis indica
gttggaaaaataaaattccttcatatgatctccccaccgggtcgagggcatcctaaacctatggagacgctcatcgaaccctacaggcctaagactgttatattggccaacagaggggacgtaatgtgctgctaaaggacacttaccggagccggaagtactggcaccaggagccccagtgttcggctcctgagccgaaggcttgggcctggagtcccttctctcagccgagtccccaatacgaaggggcttcccagcgatcatctggcttctcctctcgactgggctccccacgcgaagtggcctcccggaagctacttgagccttggagtaagctttctcttgagcctttcggtagagatactcctggtacttcttctcggcggtggcgatgatttcgtcccggaaggtcttctccgcggtcggcaccctcacattgggacaaataaccctggagagattagagtcctccactgattggtgcggaaggatgagcttggccttacgacaattctccgtcgtgaccaggcccccaacgtcgaggtccgcccggtcataagttgcaaaggcctgggctctccgaagaaagacctgagtaggcgcggtacgctcataagggggaatcctaacccactccgtgaggaactccggatgctccactgctcggaacccgaaagaaaagaaaaaacgatggcgatactccttaa

SEQ ID NO: 334913 - DNA, 664 bp, Cannabis indica
agtgatttctagtaggtgacctccgttctcccgattgagtcccaagatcctcctcattgtcatgaggtatttcttgttcatcagtttccgattgtctcccatctggttgtttgtcttgattttcagggggtatctcgttttccctgggttgttcttctcgggcattttcttgtctcctggttcgtgagccacgaggtctgcctcgtggtcttctcactccaagttcaagttgattttgagctttcgtcccctatgccgccctggccgacgctgcatcacgctctaactcagcgttttgatgttgtgcctcttccagacggcgtctcaggcgacgactttctgtttcacaagttccttctcccatagactgggcacctccacgattgagctcttcatccctcgtctcagggtttcggccacccccacgctgagttctcctcaagcgtgttgtccgcatactaggaccaacgtcgggttgggctctccgggaacgtgtggtccgtgtactagggccaccctcaagttaagtcctcctagaacgggtggtccgtttggactgcgggttggtagaccttctgaagcatatgggctatttcccagaatgatgattagtttcctcatgtggggtgttaacattttttggattttcagccatgaaagaggt

SEQ ID NO: 334914 - DNA, 819 bp, Cannabis indica
tttattttctgggatattacaaaccatctcctatgattaattcctcgttcccatcatatggagcatgaagagaaagattgttagtgtcatttgtcacatggtgggaagctccactataaagaagccaaccacctaaagaggaagcggcagccgttgccatgtttacttgaggagtttgataggaaacacgaccagcttgaggtgctcgtgcttgtgtaggtgtcaggatttgaatcgcaggaaattgagccttaaacataggacactgattcaaggcatgaccttgaacctgacaccattgacattttccaagatatgggcattcttgactagtaggatagttttgacgaggagtaggcatcaaggtaggtggagcagcccatggcttgttagtggtaacatgtgatttaggttgggcagccacggctgtgatggggaatacagacgaggagggagtcgatgattggatcataactagctcattcatgattaatttttcatgtagttcttcaaatgatataactgtatcacgaccattaacaacattaactactgatttgtaagcttcataatcgagacctttaaaaattttatgaacaatatcgtcgctatccattggttttcccatggctgcaagttgatcagtgcattgttttattgcttgcgtatattcactaatcgtgaaagatcccttagttaatttttccaagcgatatttgatttgcttgaaatgacccctagaatggttagcaaaagtagattgtagaattgtctaggcttcatgagtagtagttgtttgagagacaagaggaacaagat

SEQ ID NO: 334915 - DNA, 773 bp, Cannabis indica
ggggttgatgatgtacagggcggtgctgaccagggagttgttgatggtatggttcttatctcagactcttgggctcatgtgttatttgatactgttgcatcacattcctttatatctttgatgtttgctagtatgttgggtttgagttgggaaacatttagtcttgcgttacatttgagtgtacctgtgtggggacatagtgaggtatccaccatatgtaggtcagtttgtattgtgttcaagggacacaagttatctggaaacttattagtgttgcctatggggcaatttgatgtaattcttggtatggattggttgtctaaataccaagctattgtggattgttcacgcaaaagagtgactcttttaacccctagtggtgatttcattgtttatcgagccaacatgagtgcagtgagacaaaatcctatcttaagggcatgcttaggtggaaagagaaacttagagtgttatgggaatctgtttgcgatcgatgatgagtctaggaatttagaccagttcccttggatatcagtggttagtggttttccggatgtgtttccagaggatttaccagggttaccacctgatagggagatcgagttttgcattgatttgattcccaaagctcaaccagtttctattgcgccttatcgcatggcacctgcagagttggctgaattgaaaaaacaattaggggagttaatggataagggttacatcaaacatagtattctccatggggagcgtccagtcttgtttgccaagaaagc

SEQ ID NO: 334916 - DNA, 553 bp, Cannabis indica
cgtatatgttactttcacatgcaagaaatgggttgattttgtaaaacgatccattatgcacaccgagtcgtacattcctatggttctgggcaatcaaccacaaaatccattgtaatgtcttcctatttccaatctggaagtgttaatggctgaagtagtcctgccgatcgttggtgttctgctttgatttgctggcaagttaagcatttggacacatattccactacatcccttttcattatgtaccaccaactaatagggcttcagatcttgatacatcttggtggtacccggatgtaatgagtaagaggtagtgtgtgcttcatccaaaatctccttcttaagctcaacattactcagaatacgcacccaagtcttaaataataacattccattgctcaaaattgagaagtccttagctttgtctgataagacatcttctcgagttttaaccagttcaggatcttctagttgagccattttgatcctctctaacaagtctgactgaagtgtcagcttatgcacttctccaattacaaattcaatgtttgcc

SEQ ID NO: 334917 - DNA, 922 bp, Cannabis indica
taaaaaaataaataaatgaaataccattatattaacatccccatcagccaccccatcaaccatgatacaactccccccccccccccttctcatctccattaatggcccctctccatttttttttcaaaaaacaaaataaaataaagccctcctcccttctctctagctccgccgcctacaccccttgagtacgtctgaccagccaactcgcaccagcccaacccccgtgaaggacgtcggccatccttcatgcctcattccaaccaccgcatcgcccctcctcgacctccctttcattgtggattaatgggtaagtgttttttttaaaatatttgttaaataattgtaaagtatagcatatttcggtagatctatggggttgttcgtagaatttttgtcaaaatcgtgagatctcttttttcagagtattttgggttctgtatttatctcgattggctattaataagttctcgaaaggctctcgaagcatgttacaagatcagggatgatctttctcgaatgcttttcgatatattttttataggctcttgaagtcaatctttatcgatatgatatcgatgatatgtcgacatttttattgagtgtctcaactgcctcaatgtcatgacattatatcgatagaatatcgacactttgttgatttttctcactgctcgaaatcttgacactttttatcgatgggatatcgatgagatgttgataggttgtcgattatattaaatttctctatttttagaattgttccctaacgaaccttttgttgtttcaaattgcaggatcaattgtgttgcttgttatatcgtacgatgatgtttggtgtgttgagggttttacttgggtttataaagctgaaggcagtttgacgttgaaagttagaactgacacaaccatacaacaattg

SEQ ID NO: 334918 - DNA, 572 bp, Cannabis indica
aaattcctacagtggtatcagagccaaacaaggcacaatctgcagcaaagattaatcaagaaagcataaagaaatcatcaagaaagcatcaagattcacattcataccagcaagaattcaaacacacaaaaccaagattgcaaagaacaacaccaggatttttctaaactcattatctatataatttctttgaaataactttatacatatacaattatgagttccatgaaggttgatatagataagtttgatggttcaggtgattatcgtatttggaggaagaagattagggctctattggctcaacacaagctgttgaaggttcttaaagatccggtggaatggtcagctgatacaaccaaagaccagcaagaagagttgctggaaacagcaaccggattgatcattttcaacctctctgatgctataatcagattggttgacaaggaagatacacccgccaagatttggaacaagttggaagagcaatttcaaaagaaatctttgatcaacaagatttacttgaaggagagaatctttggttttaaaatgagtccatctaaatctctaga

SEQ ID NO: 334919 - DNA, 1167 bp, Cannabis indica
attctattgaaatgggttttatttagggcacaaaacccaacagttttggcctcgaggttgatttgttctttttcgaaagtacttttttcctcgtttccgatagtggcgaagaaaattcttgagatacttcttcaatattatggttggaaacacacaggttgatacttctttaatatgtcaacctgggcgatgggtgcctagggcacttggtgcctcgggtgctcaaaactgaaagtgctccaattctgactctattgcctcaaatatgtttgtgataggtctaattcatgtcccagtacaaagtttgagcaatttgaactaagactgactcagaatccaaaacctttgttggaaagtcaacttaggcactgggcacccacgtcgactttcggggtgctatttcgtgtatttttaacttccatgccttagatttgaattcttcctgtctttgtgatacagaatactgaaagatggtgggttagaaacaacctagtgggatccaaaaatccatttcatagttttggagtcaacctgagcgtaggcctagggacccctctgtaacgcccgtacttttcataaaaatattaattttatttacaaacgttaaaatgcggaaaaattgaaatgtttttttatttataaacataaaatattttatatttgagcttagttaggactttaaggacataataattaataaataaaaataaatacgatgttattttaataacacttaataaaatgaatggagcgtgccctagaccaccctcagttatatggtcctcaacgagtacacacacaagcctccaaggtctcacttgccaccgactttctaagttttacaaccttagtctgcacatggtaagtttgataagggtgagctactaaactcagtaagaaaatgcttgtcacgtagtcacataaattaaaaaaatacatataactaaaaacttagatgcacatatttagacaaatagtaatatatataagcttaatcttgtcactagtaactaatcactagtttctaagctaagtcacataataatggttacgcctgagtccgactttggcaaataaatcaaactgttagactaaatggtggaggactgggttcagtaaaattgtacccactactaaatgagccccttgttgggttttatcccctaa

SEQ ID NO: 334920 - DNA, 1440 bp, Cannabis indica
aatggtacgaccaaggctcaggaaaacattgcctttgcttcgaaacccagtaaaaagaagtggaagaatagcaagaagcctcttaaagctgttaacacaactaataagaataaaaaggcttttgattcaaaggtaaagcaaaaaggaaagtgcttctattgcaataaaaatgacagctagaaaccccagtgtcctaagtttttggcaaagaaacaaggtatttttatctatgttataaactcatgtgttttagagaattattatcctcattggttattaattctggatctactaaccatgttgattttcttcttatttcagctctagctgcttaaacttggattgctatcctagcgagttgagtcggatggttggacagaagggtggagattttccaagtgaagatgaagctcgaaatcctctttaatttttgatttaattgtattagtttatgaacaatttagtttcaattattagtttgggattttattccctattttatatttatgcagacatatgacatttttgagattattaataaaattttctctttaagaaattttcattatggattgcttttatgaaattgagcttcatatttctttaacttgtatgccaataccaattatatttatatgtttatcatgttgtatgtgtttgagttttattattgatacaaaatttatagtatgttattctcggcaaagattttgtttatgaataattgttaattcttaagcaattattaagattttgtttaataaaaagatcttctgatctgataggggtggaagatgttaagaaataatatatactgtttaacaatcttttatatctattgcactctagactatattcataacttcacaggacctctacaacacttaggggtggaagaagctattgatacatgcagctcaaatatttttgactctgaactctagactatactcaatacaccacaatatctctatgacacacatatttttattagacatggatatagtataatgaacaaattaacaaactattagaacttattcttgatcccgtaattgttccaattaatatgttactatagtaatcaaaatagataccaatgaagttcttagacatagtatcacagtgccttatttgagtgggggaattttaaaattccaagcccatctttatttggatgacactagtgatatattactatgttatgatcatgataggaacattaaataaaactaagaaagtaaatctaaccattcatatggatagaaataacttatcagaattttgaggataagataggagaatttcgcaatgtctattcgaatgacttcggaaaaatttctagtcctcataaaatgttttatggtatcactaatgattacttaatcttaagcaagtatttttgcaacaccctaactagcataggcgtattacgtgatt

SEQ ID NO: 334921 - DNA, 593 bp, Cannabis indica
aaagtttgaaagtgaaagaaactatgatttgcatgctcatcaggtgtatgatattgttaagtttgttcaatatcatcaatgggaaaatacacttactggttttgaagggtataatgatggtattgtcaaagaattttatgccagtttgtctaatgatttgcttgatgagaactctgaatttttttagtaaagtctatgttcgggggcattagttttcatttactgtcaaggacatttctatggttttgcaattacccgaaggtgtgtctaatgttgtcatgtgtatggatcgtcatctaatgctcactgaactcattggtgcacgagttgaatggaaatctgggcaaagtcttcgaattactcatctcacatatgcacatgcatcactagtgaggtttgctcttagcaattggcttcccaactccaacaaatagtggtgtctcaagatttggcatcttttctcttgcgtatcacctcaggggcatccattgatctggcttcttccatcttggaccagattgtttcttttcgaagaggtaaaagcgtactcataagcttgtttttcctaacttaatctataagattctttcctc

SEQ ID NO: 334922 - DNA, 1285 bp, Cannabis indica
caaccatagagttccttcatggtgggctaccaaacacaagatgcttcttgctaacataggtagtcccatgtctacataatctcaaaattactacacaattgccgccttccattcacctaggattccagacaatactcataaattgtcccacctttgctaatgctagatcactcctaaataaaatattttgttatttgaatcaattagacctatgcatccattaaccacttatgacctatattccacttgagaatacttgtaaatttaactcatattgtcatttttctaatctatccaccctgtcagatgaactaccactaaataacatacagacacaatccatttagatcttttgatccgtcccccccccccccccccaattgagagcacaatatttcataccaatataaataaaaatagccattataatattgtccataaattctaacttgagtcagttaagggaccaatatccaagtccccttgaatcataaccagcacttgggaaagacccgtgcacttttcttctttaacatcagtctttcttaactgtgggtatgttcttttcagatgacccactaccccacaattaaacgaaatttggctctacattggttcaaatggcgcctttttgcatcgtgaacactcaggataaggtcaccatttcttattctcaccttgaccgctatcttgaccaccctggaacctttttatcttgtcccataattggtggttcatttagttttcgcttcctgatctactagtaagttggcttcatatattccaccacatctagtggtacaacaggaagtgtcgatagtacaagaacagacacaagatgagcctattactctttcagatctcagatttatttcccccttgttgtctaatcatatcatgcatagaaaaatttacatatttccaatactacgacaataaaggattcttttccttaccattttccccgagcccaaatagctctctaatcaaaaaattcaattgcccttttgatataacttatcacacatttagtccacattttctaaccatttaaaacttagacggatatcaatatcaatatgcatataccatgcacatattcttatgacaatcatcactatgctacatttcccagcatactttataatagcctaggcaggtaatgttggaaattattttaccaggatcttagatctactcacaaatatgttgattaacaccctaaatatgaactttctaaaccgatgaaataaacacatataaagtttcagaaaccttacattgg

SEQ ID NO: 334923 - DNA, 593 bp, Cannabis indica
agactctggcgagtaaaaccatttagtttcagtatcaagctcacacatatactcaaaattatgtgccttattctcaacaacctactcatgttgcaccatatagtgaaaagccaactactgctgagctgattgacatgatagcaactaataacttgcagattcaacaaaataccttgtagttttagcaaagctttcatgaaactatccagagctttcaacaatctctacaaaagatataaaatcttgcagagccaatggaaacatctatgagtgggtatgaaattcaaaattcaaatactttacttgcacaaatagagagtagcccaatggagaatgtcaaggccataacacttcaaagtggtacacaacttgaatcaccatcacgccaagaagcacatgatttgattccaagtcatggagtcaacaattcatcccttgaaggatcatctccaccaaaggttgaatctcatactttagttggtccactatcactgaaaaagctatacaaaccaattgtaccaacttatataactccttcaccttttccaagtagattgaaaaaaatccaagaaagaggagcccatcaaggagat

SEQ ID NO: 334924 - DNA, 747 bp, Cannabis indica
tcttcctggttgttagttgctgtaccatttttgcagccacaagctttgcatagtcggtgaagtcgaaatattcatctactgctgtagttttttctctgttgttttctggttgttgtatggttgattctgatgtcacggtccctgtttctagaaaaaaatgtatcatcttgaactgatccaattgtgtgcgcagatagttgttgcttggaagttgttgccgggttgtttccaggttgctgcaaatctgcctgtgctgagttgttgtcatatgatgccatcatcatattgttgcacaccattgtttggttaggtgttgttgtgttgctgattttgttaacacacaatgggtaccttatgaaatcaacctctttgcttaataactttatgtagaacagcagacttttgtcatccttgatttgtagtggttggcctctttctttcagttgtatttgtgttgttccagggttgcattggagttcttccatcattattctcactagttcatcaaaagttcatttgctggaaattaattctccacttgattcatattcaacatagtttttgttgtcatcccaatgcccattgctctataccaaaatttgtaatggttccgtctcctgaaataatgtaaaataattatttgtttcagttttagaagttgcaaacaactatttcgatctgtcaaaaaaactaataaaaaactctttccagcaacatatttgcaaataacatttcgatctggacgac

SEQ ID NO: 334925 - DNA, 813 bp, Cannabis indica
ttaagctccttgagttctgctggagccattctatatggagcttgagaaacaggttcgattccaggtgccatatcaattacgaaatcaatttctcattgtggcggcaatcccggcaactccttggaaaaacacgtcgagaaaatctttcaccaccctgactgcctcaggcccaaatgtttcaggtttgctggagtcaattaccgttgccagaaattctacatagtcatcgcatagtaaatctctagcccttaatacagagacaaccgagatccgagacccctggactgatccatcctaaaaaaatggatcttcacctttggctgaaaaagtcaccattttctgcttacaatctatactggccgaatacttggacagaaaatccattcccagtataatgtcaaactcagttaattccaatttataaggttagcacccaactcccttccttcaatcttaaccggcatagacctaatgtgcctattaaagataaccaatttcccgctaggcattagggttcaaaaccctctttctagaatatcacaaggcctacccaaaaaagaataattattctcatagctacatatgaacgtgtagctcccgaatcaaacaacactatataaaagaagtcgtttatagggagctgacctgccactacagaagggctcgctgcatcatcagcttgaacattagcatacaccggagtaggaacaaatatcgcttcctgctcttgttcttctttctccacctgtgggcaatctttcttaaaatgcccaaccataccacattgaaaacatactttccggttacattctc

SEQ ID NO: 334926 - DNA, 639 bp, Cannabis indica
atctgaaaaaactctttgcacttatcagaagatcgcgatatcaagcgatttaaggcagcgacttcacctgtgaggctttggacctcttttggcttagttggtgatggcatttccaccaatgcactgaccttcgcggggttggcttctattcctcgttgattaaccatgaatccaaggaatttcccagaaccaactccaaagacgcactttagagggtttagtcacatcttatatcgacgcaatatatcgaacattgcccgtaaatgggcgatatgatccctcgcgtgttgaaatttcacgagcatatcatcaacatatacttccatggtgttcccaataagatctgcgaacatcatgtttacaagtctctgataagtcgcacctgcgtttatcaaaccaaaaggcattactttataacaagtataatcctcggtcagtaatgaacgaggtatactcctggtcgagctcatacatcgggatttgattatatcccgagtacgcgtccatgaagctcagaagctcatgacctgcaatggcgtcaacaagttggtcaatgctaggaagggggaagctatctttgggacatgctttatttaaatctgtaaagtcaacgcacgtgcgccatgagccgttaggctt

SEQ ID NO: 334927 - DNA, 479 bp, Cannabis indica
gttgttggtttggcggattagatagaattactaaaatacccctaggcttttattttaagttaaaggtattaggaggggtattatggtcatttgagtggtgataaaagttttgtctttagtgttaattaggttgaaatggattattggacataagtttaattgtttttatttatttattaaactattaggtgtaaaacaaaaataggcaagtcacataccttcacttttattcttcttctaacacgaaaccctaaggagctacaaaccaaggatttctatttcttattcttcagctcttggatcagattggaaggggtagaagcttgtttagacattaaggtaagatcttgaagctttattcttgaattacttagggtttaagtaagaaaggttgattttctttaaggatttcgagctgtatgtttgtattcaatttaggggttgtgtttttagatttgttttgaagtgtgttgaagttt

SEQ ID NO: 334928 - DNA, 1378 bp, Cannabis indica
aggccaaccaaggtcagaataaccaggatctgatgcctccgccaatagatggacacttgcaagtcatcattggaggcccgcacatcgctggagacacgggcaaagctcgagaacgatatgcccgaacagctcaatacgagcaagaagaagtcatcctggccgtggaagagaggaagcccaaagttccacgcgcaggagagccaaccataacattcaacgacgaagatgctgtccagataagatttccgcacaacgacccgctagtcgtggaagtccagatagcaaacaaaatggtgtccagaaccatgatcgataatggggcttcttcaaatattttgtttaagactgcttacgagaagatggggctccagctcaaggatttaactccatgccttcagcccgtctatggtttctccggccaaggagttgcgcctctaggacaaatccggctacccctcacagttggacaagctccgacgagcataactatcatggcacaattcctgatattggatgttccttcagcctttaacgtaatgctaggccgaccagccttgtatgacttaaaagctgtcacatcaatattccactcgtgcttgaagtttccaaccaaaaacggggtagggtgtcttagagggaatcagcaatctgctcgggaatgttacaaccttgcagtggccaaggctaagaaggaagtatcttccagcgagagcccggacaagggaataaatattcccaagtaggaaacttcccaaggcgaggatgaagatgtagatcctcgacttggggacctaagcagcaatgttggccctgtggaagaattagaagagatcgaaatcgatccagctatcccagccagaaagctacaaattggaaagggtttgttgctcgaagtaaaatcggaattgataaaatttctgagagcaaacctagatgttttcgcctggtcacatgcggatatggtcggaatcgatccttctattatttcgcacgtcctgaatatcgatcctaacatccggccagttcagcaaaaatgaagattgctggataaagaacgagcagtagcccagaaagaagaagttgaaaagctacgcaacaacaacttcatcattgaagccttttacccagcttgggatgcaaaccccgtactcatgcctaagccgaacaagaaatggcgagtctgtattgacttcacagacctcaacaaagcgtgcccaaaagactgtttcccacttccaagaatcgatcatctcgtcgatgcaacagccgggcacgaaatattaagcttcatggatgcttatacaggctacaatcaaatcaagatgcatccaccagaccaagaacatacaagtttccggacagatatgggtctctattg

SEQ ID NO: 334929 - DNA, 1058 bp, Cannabis indica
gtagtggcaggaggttgatgatttttggtgagaagggagttccgcgtgcacgatccaactcaagatcattgttacgcttcccggccatgccatgaaacatattcttcagttcgtcaagctgagcctgtacggctaggctgacttgattggcattctggtcgggttgggctacgtcagtgtctttctgagcggggatttgagcatgggctctggactgcacattcgttgtagtattctgctcgtctgttccccttcttctgtttaggtcgtcccttaagtcacggggtgttcccaacctttcgaacacagaagaacctggctgccttagcgattggttcgcttggttggcaggtggaatggctccattattttgtgtagatcgatcgagcatgactcctcgtgatgaattcccagacaaggtctgtccgcctacctcttggcccacgagttgaactcgtgaccggggattggacggctgaccgttggctgtctgggaagcattcaccgttgggtcatcctcggtttctccaaggggaatgacgctcggcgcctgctggcctacagtctgataggctcttcgtatcagcacagtggcttgccgactacgatctttgatctctgcatggtgagcccttaatgcctccatctctttgtccctccactcggcgaacatacgcctctgttcgtcaaatgcgaggtttactgcggcatgtaattcctcctgatcgtgatgcagggtattgttgtgaccctacatgagtccaagcgcagcacggaggttttgcaatttggttgcatctccgatggtcgtctgggcattgatgcctggtggaacagtcatgttatgaacgtcctggctgtgtgcggaaccgttgtttccggtctcttgcacaccaggcgcagtttcagtaacaggagttgttccatcattcaccacgcttcccgtctgtccaggattgacagcgagtggaaccctcgaactccctgggtcctgcaacatcggatccagcatctgtgagtttgccgggtcgtacaggcctctacgagtttacaccatc

SEQ ID NO: 334930 - DNA, 529 bp, Cannabis indica
tatttaaacttaaatatcaaattaataatatttaataatttttatagattattattaatttttgatgttttgaggtttaaacttaaaaattgattattttattttaaattatggttatattttaaaaatttgttaatttctttaaatttactgattatttaattgtaaggttagatattttaatattggctattgtacttgaatttcggctggtacttcataggatgatgcgtgtaaaccttgggggatacgaatcaacaaatataatggcaattaaattaaaagatatcaaatggaataactcattaaatgcaaagttaatagagcatatctataactccctgactgtatagtctctagcgagacaaagatgtacaaactattgattcacgtattgacgagaaaccatttcgtgtcaaaggacataatcatagggatgacatcgacgatgcatagtgaggcatcaacctcgctatgtgtaaaaaggtattgacgaggcaaataggctgttagaacacttagtgtataa

SEQ ID NO: 334931 - DNA, 668 bp, Cannabis indica
agttatttgctttttgcagacaacgatttgttttctgtccatttattgatatggcgcattaaatgggtgtcagtcgggtactcaaacgttttctaccgccttttttagtgtttattccaactgttggatctgtagaattcgaatcgattgtcatcctgaccgtacgatgattgttgttcacagctatctcacacctgttttggcctataaaagccagctttcttacttaatttggttactttcagcaatttaccaaactttcttagagttatcttagagagaaaagaggcttcaaacaccatagattacttgctcttattccttcgacgctgccagttttcattctaccggcgatcaacaccaacccccagccttcaaacttcatgtaagttcatcgtatgccttatacttgcttactgttcgtttatatggcatgttttatgatttctgggctggatgtcgagcttttaggaatgaattcgcccgagtttactgtatgatgcgttaaattcctcttctttgtgtttagattgctccttgttattacgtttctgtttgaggaattcatccccatcttgcgtaataacgtctttagggcttagagtagatcttgctttttcggatttgtccctttttctcttttctctttctttttttttctttttcct

SEQ ID NO: 334932 - DNA, 630 bp, Cannabis indica
tctatttttcataaaaaaaaaaagtcaaaatttcttgcataatatatgctatttcaaatttgtagagttttttttatttttcatcttaaacttccctatacatttcccactttttttgttggaattcttctataaatattatttttcctcattaacaatggttgttaaccgataattcctcccctgttgccaaaaagtctccaaaacaacctcaaaaaaataaaacccgagcatcaatggacaagaagagtttgaaagataatcctcctagccatacttccacagttcctgctaaaagaaaactaggttctgatacttccgactctgattttgagtttgagccaaagttccaaagtctctcaaatctgataaggtttttttctattgatcttgtgttgttttaggctttttttcaagttaattatatttcctatttctctttttttttttttgcatggttttttttgttagtcctattttaaataccaagtgaagattgttcaatcaactgatctgtttgaagacataattaggaaaagggtcgttgaggtgtgtcatttcattattttagttttaatgttttttattgcttgtttttatgttttttttttagttttgttttagtaatgt

SEQ ID NO: 334933 - DNA, 840 bp, Cannabis indica
tttttaaattaattatattaaaaaaaaattaaaacttaagattagagttctatatttattattttaaaataagtaattatttaagtataagatacttaagtttaactctcagttgaataaatatttatatttttgaatctctgtaagtacgcactacgaaaaattattacttttggtgataactctctagtcacaacataaattttttaagactaaatatgacttttagtcacaacaaaaacttacttttgactaaaacatagtatttagttacaagttgtcactaatttagttttagttacaacaagtattgtgaccaaaaacaaatttagtcacaataaattgtaacttttgtgactaatacgtttagccactgaccttttagtcacaacataagaataataatttataattagtcacaactttttttacatttcgtcagtaaaaatttttgtagtgacgtgatcgttaaatgttatccacatatcattttcttgtaataataataaaacaaaataaggataaaagttaaaataagaaattgtttgtttattatggttaagtgttttaaaaagtagatgacctagtaaaagataaaatattaaattttgcttctttactactgtacaatgtaaaaattagagaattatcaaaatatcatatcctcttaatgataatttatttgacttattcttcaacaaatggcctgtcatattgagagcttgggatccaaatgtagatttcaaaaaggaggatgtgagcaggatacaagtttgggttacaatggatgatttggaattgaaatactgggggggagaagtccctattcaaaattatagg

SEQ ID NO: 334934 - DNA, 845 bp, Cannabis indica
tagaagtacccggctccttgtttgggggtagacttcaactcaaataaccaggcgacctcgtggggggaaggagcatcccatccttgggaagcgtagaggatgaagagagcggacaaatacttaatgccctttggagtaatttgggcctggcagaggccaaagaagtctgccacatccatgaagtacttatgcaagggcatgaatgccccttgctggtcgtgagctcccgaccaggcgcacattcccttatcaagaattgtggcgcgattgtcgtgggcgggaatgtagcagtctagctcgcctaggtacccgtcctggtcgagagttcgaaggcatgcttccgaaatcttggacggaggacttaccaacctagcgtccaaggcaccctccctcctatgaggaactgcctcagcaagctcctcgctgacgtaatccacgccctcaaccaggacgtctccgtcagcatcgactggttgtccagcctcgttgtactcctcgaagttagggggttccacttcttcctctccctccacctcggaaggactacccggacgcacctcatccagctcctcaacctcttggacctcagcatccccctcacgatcctccttcatggggatgcccgaatcctgttcggcgtcgggcagagtggcaagccaagccacttgagaatcagaagcgtcggctagacgcgtgattttctttgtacgagccatcatcctatggctgggtacaaggtcagaagagtttctttcactagaaggaggactaccatgaagacgaggatgaacctcgtgcagaagttggagcaaatcctggtcgatctgatgcccgagttcctaaga

SEQ ID NO: 334935 - DNA, 615 bp, Cannabis indica
gggaaattttaaaagacttggtgtatggataatggtccctcggccagatggtgcgaatgttataggtacaaaatggctttttaaaaacaagtctgatgaatttgggacagtgactcgaaataaagctcggcttgtggctcaaggatatagtcaggtagaaggcatcgactttgatgaaacctttgcaccagtggcacgattagaatccatacgactgcttctcatcattgcatgctttctgaagatcaaactcttccaaatggacgtcaagagtgcttttctcaatggggtaattcaagaggaagtctatgtcaaacaaccacagggatttgaagatccacatcatccacaccatgtgtacaagctcaataaagccttatatggactgaaacaggctccacgtgcgtggtatgatagactcacctcatttctcatctctcatggcttcacccgaggtactgcagatagcactctattcattaaacatattgaaaaaggaatctttgttgcccaaatatatgttgatgacatcatttttggctcaacttgtgatagtgaagtccatacatttgtcaccttaatgactaatgagtttgaaatgagcttaataggtga

SEQ ID NO: 334936 - DNA, 531 bp, Cannabis indica
gaaaaaagatcacaaactgataatcataattgtctgtgtgctttcatctgtcttatttgttgcatcactatcatttctgttttggaggagaaaatcaatgaggagatcatctttagctaattctgaactctctactatcaagttactttcaaaggtttcttaccatagtttacaccaggctaccaatggattctctcaaagcatgatgattggaattggtacctttggctttgtatacaaaggcgtacttgatcaggaaggaaatgaagttgccataaaggtcctcaatctaaaccagaaaggagcttccaagagtctcattgctgaatgtaatgcgttgagaaatattcgacacagaaatcttgtgaagatcttgacatgctgctcaagcatagatttcaattggaacgagtttaatgctttagtctttgagtatatgacaaatggaagcctagataagtggttacatggagaaaaccaatcaaggggtttgaagttttttcagaggctaactatagctagtgatgtggc

SEQ ID NO: 334937 - DNA, 511 bp, Cannabis indica
gatcctaagatctttggctgcaccgccttcgttcatcttcattctcaaaatcgtagtaagctagaccctaaatctatcaaatgcatttttcttggttattcctctcatcaaaagggttataaatgttattctcctataactcggaaaatgtataacactatggatgtcaccttttttgaaaatcatgcttactacaaatctgagattcagggggagaatgcaggtgaatctcatctttgggacactattccaagtattaataatacttcatctcctagtgttcaccatgagaattcttccgactctcaagtcatagaaagtcaagtctcatcctcctctaaactcatgggttcccaaatcattgaacattgtccaaatccacccattgctcttgcaccttgtcaaaaaccagaaattcgtgtctatacgagaaggaaaaaatctggtaaagatatagagcacacaacacatctggaggaccaccatgcatcggaaccggatcctcattccc

SEQ ID NO: 334938 - DNA, 503 bp, Cannabis indica
aaaaaaatacaatggcagaaaaatctgtattttcccctattttttcctacattagttttataattttacctaaattaaaataaaaataactaactaattttattacaataacaactaactttaaaacacattaaatttatacaataacaatatatataataaaaaaaagtatataaataaataaatgtatttaattataccgggctcggagagagagaaagagagagagagtgatacggatgggaggtggtggttgtacgacgtatgagacggaggtgagagggacaccgacgggaggtggtggtggtctgacgtatgcaatggagaggagagggagaccgacgagaggagaggtgggtagagatcgatgaacgagatagacgagaagaaagggagatcaagagagggaggaagacggcgagagaggagggcaatgctgcggaggagtgggtggagttttggagagttaagacttttgtttagggtgtggaaaatggagaaga

SEQ ID NO: 334939 - DNA, 583 bp, Cannabis indica
tttttctctctcctttttccgatcccctttctcgttttcttagggatatttacagagattggtgagaataatcgaaaaggggtaacttgtctttgagagcctgttatggataagcacaagttccctaaagatacaaaatagggcatgtacctacatagtaggtgtcgtagaggttaggtgagattagccttcattcttccttgattaatgtgattcttcataatggagtcatcactagcccctttgattatcgtgtaatcgccctaaattaggcttacgatgtctaacatgtcctcttatgggcgttcccagacgctttcttcatactgcattaaatgtgaggtgacttttcgagtaggtccctttcatcctagaggtaccttactatatcttaactcccagagaagtaggcgtgcctttcgcacttatccgggagctaacgccctgacccatacttgccgcctcttctatacgatctttaacttatctccgggtgaggtgtcttcgttgtccacgtgtcatacatagcatcagccacgtaagggtaacatttacccccaagtcttatttagtagtaggtaaa

SEQ ID NO: 334940 - DNA, 895 bp, Cannabis indica
actttgaaatacagatggacctacagggggtaaaaggcaatgtacagtgtagaattttctggccacactcgcagaggccggccaacaatggtatttcaaattgcctccaagaaagtttaattcatggacttatttctcctcagaatttcacacacagttttcttcctctcgtcagcttcccttgcacttagaagacctggtagaagtgaagcaaattcttggagaacctataacggcctacattagtaggttcatgaatgaagaaataaatgttaaaggcctgactgaggagggaagattagcagccatactgggggcattgagcctctgggagaattattgaaatatatcaagagattgactgtgggatcaatggctgagtttttggatcgagcagatggattcactaagctcgaagaggctgtacgactgtaacgccctaaataattaggcacgctacccaagatacttatgaaaccctaatcccctaatcgggattactaataaaattagcacggagattaaactttaatcataaacggaatgaaagtaaaacttgtaataattaaaactttacaatctaaaagttacagaagttgggatcccaaaaacatttacaaaacattattacaagtccttttctttcagccaacctaagcggcaaaacagagtctcaaaaacacatcactggtagaccccaacccgcttggtctaatatggcccaaacatgtacattctttgtccagctccgcattcaaatttgtctgtgtgacacagacctgcatgttacgctcacatgcctatttatgtctacgtggcgtagacctacgtgttgcgctcacacgtctatttatgtctacgtggcgtagacctacgtgttgcgctcacacgtcta

SEQ ID NO: 334941 - DNA, 871 bp, Cannabis indica
aattatttattatttcaatctaaacaatcaataatcctctatagacggtttacatcgattaaggataaatttatcattttaccctttgatgtattttatccttaaaatacttagctacttataaattatatttcaataaactaatataattatcgaaataagagctcttccatttattttgttttagccaagctctaaggaaactatcgtttcacttataaatagttataaaagctatagatttcatatctatgattaatgctcccactcaattgcactacagaattcccaagatttaagtatgggctagtcctacaagtaagctgaacaagtcaaagaacctgtatagtacaattaagctagaacttaaccatcttaggattgagataaactgacctatgatcaactaaataatatcgacttaaaaaagatataacagtaaagttatgatatatttttcactgtcaatattagtccagtccgatgtatagccgatacatctgatacaagttgctttgctaatgccctagaaaggacattccacttatacaaatgtaagtaaaccacatcgctgattatcacatcaatgtaaatctagtacactgataaatcataatgctaaaatagtttgaagtatataatcatgtttactttccaccgtgtagacaattttataatcttgagtaactatatgttcaagatttaatgaaatttatatatcaaacatatataatcatgaaagtaacatgtgaaccaagcaacataaagtgatttttgatcttttattaattaataaataagattatattgaaatgagttttatttagggcataaaatcaaatataagttgcctagacaaaggagtgtatac

SEQ ID NO: 334942 - DNA, 713 bp, Cannabis indica
attgaatcagtgagaagcgagattgatttggatgatcccgaggaagctttagacatcgctgtcgatatcgatctcatccgaaatggcagcaaagcacaaccaaagttgaatcgcagttcgccggaggtagaggaaaagctctctgctgctcgaatggagattggggattcaagaatctcgctagctcttgatcgggcaatccgatcatcttgcgtgtacatagaagaaggtgatgatagcggagtgtttgcagatcgtaaaatggagctacgtgagattgtgtttggtgttaatggtgattcaccaacgccgctgaaatatcggaggaggatctttgatcggggacgtcaatggatcttggatcgaagacgacgaacgaactttgacgaagatgaacggagcggaaaggtcactggcggacgacgagaagcttggtcacgtcggatcgcagagaaccatcaaagcaaagggcattgacttggccttcaatattgctgtgagtgtagatgaagcttcaacttagggagaataccatggaggtcacacattcaacatgggcaaagggtggagtcggctgctacaaaggttgaagatgataccatggctaccctaaagttgtctattagagtaatggaccaacaaataattgggctttcttttaaaaaaaagcaaaatgattgggctgcaatatttttcttatatttgtacttgtt

SEQ ID NO: 334943 - DNA, 765 bp, Cannabis indica
tactaataatttatctttaatttgattatagtgtttgtatggtgttatggaagaatttatctatctatgtgatttgtgattaacttgtaaattaatttaagtttttattttaataaaatacaattattatctatctttatgtgtaatttataaattttacatttagttaattataattaatatatttatataattaatataaattattatttataatatataaaatttgaattaaattaaattaaatattattttttttagaaaaatatttaatatagtggcactttttgtgtgtcactatatctttaaaaatattaataaaaataaaaaaaaaatgatatagtgacactctaggtgtgtggctgttacttttttagtctgacaaaacatgactctatacccctatagtgacacgcataaaatgaatgcaaaaggtttcagtgacacgtgtgaagtgtcactaaaaattatctttccagtcaccctcattagtgacgcgcgttgaagtgtcactatatacttttagagttactcaatgtgtgtcactaaaacccatttttctagtagtgttaagagcgaaaatagtgccgaagaaaataatgaaacataacaagaaaaataataagaatttttaagaaagctcaattggtaatgtcggtcacacatattttttattttttaaacaatagaaaaaataaaataactttgattgcgaacaaaaagtacagaatatccgcttgtctttgtccctgatgaaaaaatcaa

SEQ ID NO: 334944 - DNA, 551 bp, Cannabis indica
ttttttcaaaactttaaaaaaataaataaaataccacatccccatcatccaccccatcaaccaactcctccccttttctcatctttattaatggcttctctccatttttttttcgaaaaaaataaaaataaagccctcctgatcccttctctctagcttcgccgcctaaacccttgaggacgtccggccagccaactcgcaccagcccaaccaccgtgaagaacgccggccatccttcacgcctcattacaaccaccgcgccgcccctccttgacctccttttcattgtggattaatgggtaagtattttttttgaaacatttgttaaataattgaaaaagtatagcatatttcggtagatctatggggtttttcgtagaatttttgtcaaaatcgcgagatctcttttttcagagtatcctgggttttgtatttttctcgactggttatcgataaattctcgaaaggttctcgaagcagatgttccaaggtcagggatgacctttctcgaatgctattcgataggttctcgaagccaatctttatcgata

SEQ ID NO: 334945 - DNA, 1292 bp, Cannabis indica
ttaaaatcacgtcaacaagcctatgctagttagggtattacattgcagcttcacaaaccgctcaaaaacggaatctctatgcgacatcataaacccctggttacccaccataggcacaggcgctggtggtaacacttgctcaacaggggcagccggttctggttgccttaatcgacgcaactcttcctcttgaccgacgcaactcttcctcttgacgaagtatgatacctcgcatttcttggaacatttgctgccattcagtaggaggattagcattgccaacccctgcattatcccccggtaactgcggaggtgtaggcggtgccaatggattggtttggtcaatcccaggctctacttgctcgccctgtggtctagatgattgcggagggtccattttacaagtaccactgtaatcaacaaccccatcgagttaagcaccaataccacacttatgcacttaatgccttaaaccctaactcaactatttactccatataaataaacacttaatcatatagcatttaaggaatggcatcatatatcacataaatactcaagatgcttacatactttttaaaatggaaagcggtaaataattgatcacataagcagtaaagtgtttactcttaacacttactgcaccatgagtcgagcttatctctgacgatgctgtacatgttcagctggtctacaggaattttaaaagccttgatgctctgataccaaactataatgccctaatatttaggcacgctacccaagatgattaagaaactctaatcccctaaacgggactactaataaaataagcgtggaaattaaactttaagcgaaaatggaatgaaaataaacttgtaattattttaaccttacaaacaaaagttacatgtttcgggatcccaaaaacagttttacaaatattataagtcttttccatagccgacctaagcgacaaaatatagttacaaaagttttaacactagtagaccccaacccgcttggtctagtgtggcccgaacatgtacattcatcgtccaactccctcactcatggctgattagaaacagatttaccctttcctgcacagtagagcactcatgagccaagcccagcaagacagtaaaatatatcgataatcataattaacacatcacataaatatgaatgccatttcctttttatttgtatgacacagacacacgtgttacgctcacatgcctatttatctctatgtgggatagacctacgtgttacactcacacatctatttacattaaggccttagaacg

SEQ ID NO: 334946 - DNA, 1317 bp, Cannabis indica
aagctaaggtaaccctagacacttttaactaagttttcttaaggttttaattggttttctgttgtgatttcaagagttagtctctgttagggcttgggatgcttaggtttgaattctaagcttaatttgagttggttttaggtcctagcagctggtattaatagtcggattaggttttgtgcaagtttgagctttgagttaaaagctttgatctctaatggcatatttgtttacactgagttttctgtgaaatactggctagaatatgttgtatatgcattgtttaggtactctggaaagtttggtagcatttggtggaaaattgagcaagaggtgaagggtttggggagaactggtgcaaaccggctagccagtattgcaagacctctaaaaccgactagccggttttggcaggattcccaaacacttcattttctcaattttcgtccatttcagagtcgtggttgggtgtttccctaattccagagtttgggtaacctctagggagtataacagaacctggggttatgggttcgggtttcccgggattagggttttggtcatgtaacttacccggtttcataatgtgattagggcatccatctagcacgagacttttcgttcaggtcggccaacacacttgaatctggaaagaaagtaagaactgaatataatgtgtgatatcaatatctgagtgtatatatatgttatgtgtatacgcatgcttaaattgttagtggcactaccaacacttgtacagttaaggtatagaatgtattcatatagtgaatgttaattgagagtacattacagtgataccaacacaggtacggggaatgtacagagtgtgtgaggggtatatcactcagtggtactcagggtgtgaaacaaaccctaccaacactcgtacagtgaggtacgtagtgtatgtggtatattggctataccctggtatggaacgttcttattcacctgttgagccttgtaaattggtgtatgggcgcctaattacaagtcggaaattatatgatatgttatatgcttttcttactgagtctgtcgactcacagttctacttccatgtgtaggtaaaggaaaggcgaaagctgaacaggagtgaacctgagctcggatgaggttgtacatgtcgaagcagcgcgacctagagttttcggtctcgggacatctgggaattgtattttgtagtcgttgagcgacctgattaatatgtattttggtgtattatgttttagaagtttaaaaagggatcccgacacttgtaaatattttaatataatataaagtttaatatttaat

SEQ ID NO: 334947 - DNA, 629 bp, Cannabis indica
tcatcactaactccattgactttaaaagtctcacaaagttccatgaagttcgatagatggagagtaggatcttagaggggagtccaccaaacttgactgaagactgcaccatttgaagtatggcaggcttaatttcaaagttgttagcttccactgccagtggcctaatgcatgactgaacccccgtaagagttgggaggatgtaatctctcaagctatggccattagcttgatcttcaacgacacctccgttattaccgttgttccctccattattcacaacattagcgttgtcagccatgatttctggtgtttcagcaggtgctgaaactctctcttgccttttgttcctcctgtttctcctacaagtcttctcgatttcaggatcaacgagcaatacaactgcttgcccatggcagtgcatgcactcaaaatacctgaaatagataaaagcagtaatgcaagaaacaggttagaaattcagcaagagaaataaaccaaagtagaagttagtataattttgtgtaatattaatatttatacaattctccggcaacgacgccaaaaacttgttgcgaaaattattaaatactacgcaagtgcacgcaatcaagtagtatactcacgca

SEQ ID NO: 334948 - DNA, 796 bp, Cannabis indica
tggaactcgtgaccggggattggacggctgaccgttggttgtctgggaggcattcatcgtctggtcatcctccgtttctcccaggggaatgacgctcggtgtttgctggcctacagtctgataggctcttctgatagcacagtagcttgccggctacgatcttcgatttctgcatggtgagcccttaatgcctccatctctttgtccctccattcggcgaacatacgcctctgttcgtcaaacgcgaggtttactgcggcacgtaattcctcctgatcatgatgcagagtattgctgtgaccctgcatgagtccgagcgcagcgcggagattttgcaattcaatttcatctccgatggtcatttgggcgttgatgccgggtggaatagtcatgttatgaacgccctggctgtgtgcggaaccgttgttcccagtctcttgcacaccaggcacagtttcagtaacaagagttgtcccaccattcaccagtcttcccgtctgtccaagattgacagcgggtggaacccttgaactcccttggtcctgcaatgttgaatctagcgtctgtgagcttgctgggtcagacaggcctctacgagtttgtaccatcgtgtcgaatattgaaaagagcgatctgtgattctgctctcaatgaaagcaccaaaatgttgacttcgcttttagccaacgacaatgagtctttttgataagcgataaacgatatgtcgtaatgagaatatataataaagcaataacaagacacaaaaatttatagaggttcagccccgagtagttcg

SEQ ID NO: 334949 - DNA, 762 bp, Cannabis indica
aattaaaaagaaattaaattttaaatctaattaagcgatttaaaaattatttatttttattaaaaaaatcatctagatattaaaattttaatttttgtaaaaattaaattttacgggaacaaatttgagtcttattttatttttttacaaaaaatataaatttatttaagtaaacattaacctttttttagtttaatttctaacttttttttcaaaataattttatatttttattaaatgtttaattatttttctttatttgttaagatatgagtttataaatataaataagttcgattttttctttaaaaaatcttaatttatttaaattattcattagattctcaataattttagtttaattttttaagatgtgtttataaataaaataaaatttaaaaatatttttttaagaataatttaaattttttaagtaaaattaatatttttatcaagttttttaattttttattatttttttagaattaatagaatattataattttaaaattaattttttttaataaaaaagaacaaaattttgtaatggtcaaagttcagaaaataaaaagggaaattatagtaaatggccccagatcataggagtatgttagtttatgtcctcttttcaaaaaaaatatagcaaatggccctaaatcataagactatgttagtaaatgtccttatttcaatttttttttattttatttttttaaaattagaagcaaattatttaaacataatggtatatctatattagtt

SEQ ID NO: 334950 - DNA, 1267 bp, Cannabis indica
tttgagattatctaaacctatggcttatggcatacctaatgatttacttactctggtgctagtagcttacttttgtaagatgctgaagcacctttttctgatggctaaatctataggaagctttttgaattctagacatagattttatttatctaaggaaaagtctcaactatgctagaaaagataatggctaaggaaagaatttcttaggatcaacagtgtgaggtctcaaatattctttgtaatgcattagaccagacacctgttgtttagtgggagtaatgagtaggtatcagataaatctaggaagagaatattggaagacaatcaattgaatcttaagattaataagaggaactatatgttagttgataagggtggtattttaatactcttacactacaccaaatacggtttctagacttgccttgatgctagaaagtctactgataagatggtgattactcttggggtggattagtgattttggagaagtgtaaaaagcaatctagaatctctaatgtcccagtgagactaaatgttaacgttacaggaaagatacttattcaatctatggaaaattctatacaggttttgagattgtaccaataattagtgaactactagtgttagtttctgactaacacagatgtattttccaaaaatagaatccagtatcgcaagaggagtagacatataaagaggaatttcgaattatcaacaattttatgattaaggatatgtatgttgggttttgtgccctaagtaaaacccatgtcaatttaagaaatttgaagtgatttatgtttgcatgaatttttcatgctcatggtttaatatgtttgatatatgcacaaaattagttaagtccataacatatatttattcacaactacagtattgtcaacacagtggaatgtgattgtgattatatgattcaaaagactaagtccctgtgtcatcagtgttttagatttacactgatgtgataattagccatgatgtgtacttacatttgtagtaagtgttatgttctttccaggacattggtaaagtatactggtttcgaatgtatggagtatacattggactggaccgatattgaacttagtaaagatattataaacttaccgttgtgtctttccaagtcaatatcagtagttgatcttagattgaaagaatctaaatcctgatatggctaggctcaactcaggagtgttattcatgttctttgatttattagttaagcgtacttttgggtcagggt

SEQ ID NO: 334951 - DNA, 984 bp, Cannabis indica
tcccaaccttcgaatacagaagtgtctggctgtcttagcgattgatttgcttggttgataggtggaatggaaccgttaacctggttggaactatcaggtatgacttctcttgatgaattactagacaaggtctgcctgcctaccgctaggcccacaagttgaactcatgaccggggattgggcggctaaccatttgcagtctgggaagtattcatcgctgaatcttcgtccgtctccctcaggggcatgacactcggaggttgctgacctacaatttggtaggcttttcatatcaccatagtagcttgctgactatgattttcaatctctgtatgatgagccctaaacccttccatatctttgtctttccactcggtaaacgtacccctttgttccttgaacacgagatttaccgcagggcggagttcttcctgatcatgatgcagggtattggcatgaccctgcatgagtccaagagcagcacagagattttgtaactcagtatcatctccaatggtcgtttgagtgttggtcacgggcggaacggctgtgttatgaatgcactggtttggtgctcaactgttattcttagtctcttgcacaccaggcgcgatctcatctataggagtcgttgcaccgtgacccacgtttgccggctattcaggattaacagctggcggaaccctggcatttcctgggttctaaaatgcaggatccaccgtctgtgaatttgctagatcaaccaggcccctacgagtctgcaccaccatcgtacttgtggttagattttgaatgaagagcagttcttgatcctactctcaatgaaagcacaaaaatgttgacctcggttttagccaatgacaatgagtcttatttagtaagcgataagtaatttatagcaattgatatatagtaaagcaatgtaaagacacaagaattttatagaggttcagccccgagcagttcggtaatagccgaatcctc

SEQ ID NO: 334952 - DNA, 900 bp, Cannabis indica
tatacttaataaaacctaaaattggccacctaatttcatagtatatctaatttgtaaaatggaataactcttcctaaaacccaattctactccccatttccattacccccctcccatctctcttcttctctcttcttcactgccgagttcctactgcccacccaatattttttttctcctcacacattctccactcattttattaacttcattacactataatctactacactacaagctattctacctattgtctttaaaattttgagggagcatcatacacggagcacacatatgcaagcaatgggtactttttttttatttgtgtaatcttgtctgttgttgttatatttagtttagaatgttattttgatgcttgatctatgaattgttgctgttattttgctgttttttgtgttaaaatgtttgctgcctgtgaatacttcaattttcctggtttctgtatttttttttatttggcccgatggggtccgatgctggtccgatggggggaccgatgtcttgtaataatagctgataggggtgaaggcccgatggggtccgatgggaacccaataaaaattttgtttgttttggttttttgggtcgagtgtgatgggtgtccgacgggtacgatggggggtccgattgtgttatccaaaatatagttttttgaattttttaggaccgattggattgaagtccaatatgtttctgatgggtccaattggggtctggttggggtaattttgggtaatttttaaggcccaattggataaatgtctgatggggccggaaatgtttttttttaaatttgtgtgatcgggtccgatttcgttttcatatttattgcattgaaagattttttttttgggtgagatttttgttctaaattataat

SEQ ID NO: 334953 - DNA, 979 bp, Cannabis indica
tcctgatattggatgttccttcaacatttaacgtaatgctaggccgaccagccttgtatgacttaaaagctgtcacatcaatatttcactcgtgcctgaagttcccaaccaaaaatggggtagggtgtcttagagggaatcagcaatctgctcgggaatgttacaaccttgcagtggccaaggctaagaaggaaatatcctccagccagagcccagacaagggaataaacattcccaagtaggaaacttcccaaggcgaggatgaagatgtggatcctcgacttggggacccaagcagcaatgttggacctgtggaagaattagaagagatcgagatcgatccagctatcccggccagaaagctaaaaattggaaagggtttgttgctcgaagtaaaatcagaattgataaaatttctgagagcaaacctagatgtttttgcctggtcacatgcggatatggtcggaatcgatccttctattatttcgcacgtcctgaatatcgatcctaacatccggccagttcagcaaaaacgaagattgctggataaagaacgagcagtagccctgaaagataaagttgaaaatttgcacaacaaaaacttcatcattgaagccttttacccggcttgggtcgcgaaccccgtactcgtgcctaagccgaacaagaaatggcgagtctgtattgacttcacagacctcaacaaagcatgccctaaagactgtttcccacttccaagaatcgatcagctcgtcgatgcaacagccgggcacgaaatattaagcttcatggatgcttattcgggctacaatcaaatcaaaatgcatccaccagaccaagaacatacaagtttctggacagatatgggtctctactgctacaaagtcatgccgtttggtcttaaaaacgtcggagctacataccaaagattggtcaacaagatgtttaaagacaagatcgacagaaatatggaagtgta

SEQ ID NO: 334954 - DNA, 530 bp, Cannabis indica
taacaaaattctcatcaattttgttaccactttgattatttaagactcaaacttgcttctcaattttgttatcttttcataatttttgaatccacattgactcatttactttgagtctaaaattgctcttccaatttatgactcattttacaagtttggatccacttttgatctatttgttcttgctatgacaagacaattctcataagtgtagctctcatagttcactttttttatctcataaaatgagataattatcacttgtaattctcaaagaatataacttctcacaagtcacaatttttttttttcaaatcactattggaaaagaatttcaaattctctttattcacaatatagatgataataatcttcacatcaatagtaataaataatattattatattactatcagttttattgtcatactatataattcatatatcaatataaaaatattaatatataactcccacacataaaattataactcccaaataataattttatgctaattaatatattatgta

SEQ ID NO: 334955 - DNA, 620 bp, Cannabis indica
atatatgaatacatgtttaaaataaaataaaataaaataaaaaaagacttgcctttgtcgtttggttatttttaatactattttttggtaaataatttcttgtacttattattggcaccttaaagtgttcaatttcatatcgatgtggtactcaataattagttagtaattttttttgtcttttgtgttttattttttatgaatgatctttgtactattttttttaaatgattttttgcactattattgatatgtggtacattaaggtgctcaatactatactgatgcacatacacaataattggttagtaattttctaaatcatattaaattaaaatttataagaattgatattgaaatgcaccaataacgatatgttgcattttgtggtgcttggcatcttaatgtgtcccttaacatttccgttattaatatgtacatatctttattatcttccattagaattttaaatttttgttattgtatatgtttacaccaaaagtagtcataatgacgtggacatcaatgtttgacatgtggcaagaaagatgacatctcgaggttgagcgggcttgagtcatagcaagttggcatgggaggggtccctagccctgcgccca

SEQ ID NO: 334956 - DNA, 447 bp, Cannabis indica
acctctataaaaatccttgtcttatttactttacttgtcttgtggtgtaacacgtggcaaacatcagattcatatgaccccgtcgtcagttgagtactttttgaggtcaatagtttcgtgctttcattaagagcgtggatatcgtatctaatcaaacaccatagttaacataaaaaaaaccccagttacaccatctacatctttaggttctccgcaagacccgcagatggtagatcttgatgctcatgttccagccacaactagaattcctatgaacacagcatatatggtcaatcttgtcaccacaataggcacctcaagtctggccaccacagctggccaaactaatataagcatcctattcgatccgagcaatcaacccctacctccaagggaggaccctccataggcgcctccaacttaaagaagaatctgttgggttttatg

SEQ ID NO: 334957 - DNA, 630 bp, Cannabis indica
atgccttcacaaaagtactagcatctttaaaaagtgttggccaaaagaatccgctctgcaacaccttagcagcagttcttgtcccactgaaatgtcccccacgcggtaaagcatgacaatgattgagaatagagtacatctcctcttcaggcacacatcttctaattatctgatcggcacagtgcttgtagaggatgtgctcttccaaataataatgtttcacctcagaaaagaatttcttcaattgttgatgagagagctcaggaggaattatgttggcagccaagaaattgacataatcagcataccacggtaccatcaagttttccctcacactaaagagttgttcatcaggaaattgctcatttatttgtacctctttcatattctggctctcttccaactctagtcttgacagatgatctgccaccaaatttttcagtgacctttttatcttttatctctatgtcaaactcctgaagtagaagtacccaccgaatcaatcttggctttgcatccttcttggtcagaacttatcacaagcaaacacaattgccagcatctctttctccgtagtagcataattcagttgagcatcattcagggttctactagcatagtagattgtgt

SEQ ID NO: 334958 - DNA, 646 bp, Cannabis indica
cacgggacccctaaacaccgacaatgatagtgtcactaatgccattgtacatcggcacaacttaatggaatcctatttcggtatcggttattgatttcgtcacgaaactagtgactccagtgcactacccctaacttgattacatactatgtgtcacaggtcccctaaacactgacagtgatagtgtcactactgccattgtacatcgacaccactaagtggaaccctctttcagtatcagttagtgattttgtcacgaaactagtgacgccggtaccctacccctaacctgattacatactatgtgtcacgggacccctaaccgacagtgatagtgtcactactgcgagtttacatcggcaccattaagtagaaccctagttcaacttcgattagtgatttcgttacaaaactagtgactccggtacacttcccctaacttgatcacatactatttgtcatgggaccctagaattaagaaatggattagcaaaaccataattagataattatgaataaatgaggaattatattactatatagtttaatttatgtgaattaatatgattttaacatgttaagaccttgttggtgagcgaggagcattttaacaattgtgacccgggaagggtaaaatgatgaaatt

SEQ ID NO: 334959 - DNA, 939 bp, Cannabis indica
gatgttaatgaaacatacttgttagtaaatctagatccatgtaaaatattcccaacattggggacaaggccgttagcaaaattaggaattttgttgacgagtaatacatggttgatggcatgggcaccacctacactcggttccggcagatccctatatatcatcgtccacccttcacacttggtctcagggatagagctcaaaggcttgctcagctgtcgggtgcttcccgaaatatcactttgttgacctccgaggaccactttgtggagtatgggctctacccgaaggatttcattcctcagcctgtgatggagaaaaaaagtaaatccagtgctggccgagctgagggagctcattaggagaatgaactcattcaactcaaccgtgaagctaagttgaagggaggtgcggggcaaagcagtatgcttaggaccattctgagcaggaagatgaggtcgaggaggagcaggtaactccgctcagaaggaagaagaaacttccagccgagcacaggcttgttgaacatgcacttcagatcagggagcttagtctacctgctcggccatccactcttgtagtaggaaaggagaaagccgtcctggacgagataagagacttgttaggtgacgatgagccctcgggtcttgctcgggcaaacgcttcttccgaagcgcaagatactccatcttgccttttacttccttgattattatgttttcatacttctagtgtttttctctaagcatgttgcttttatttcgtgtagacatgtctcaaaagatgctcgaagctctgaagaagagagtgggaggaagctcaggcttatctcctccgaccaagagatttcgaagcggtgaaaaaacaccgtccagagagagggcaccggtggaagctattatcgatctctccaaggagccaactgttggaaattatttt

SEQ ID NO: 334960 - DNA, 653 bp, Cannabis indica
ttaacttgttaatacttggactatttttttaatatttgtgtataatttaattgtaattcatttaattacttctatgaaatgaaattaggtattttgccaatcataaattaattaattatattaatatactttttaaaaataatatctaatttaaatttaaattaaataatataatatatgaattaataaatatataatttaaattaattaaattaaattaaataaactgaaaaaaaaataatccttaggtcttttccgtcagttcttagggttgtatatggggtcggttattagctaggaaccgacgccatatacacctctatggcgtcggttcctagtaaataactgatgccatatgtactcttatggtgtctattattttagaccctaaagcgttacttggatcagcatcggtagcgaattttaccaaaactgacgctgaaaggccttaaaaactacctctaaaaggtatttttgtagtagtatttctaaaattccttttgaaatatgtggagaatttttgtagtagtatttctaaaattccttttgaaatatgtggagattatatattatatattgaggaaattaaacttactatgagattttaaaagttcttatgataaatatggcacatttaagtttgaccaatttat

SEQ ID NO: 334961 - DNA, 1057 bp, Cannabis indica
gttgggtctgaactggccaggagtgatcttgaacgggttcgggcacctactccacctttttcggtgcatccagaggccaaaaagggcaaggagatgctggcccattatatgaaatggctggttcctaaggtaagtgagcaactggctggtgctgacaatgattcttctttggaattgcttgtgggcggcgtcttgaaggagttcaccagggtaagtatttcttaatacttccctttaatcttccatacctagctcaaatgctaaagttttttccttgtgcaggtcggtttgaagttggactatacttactctcgggctaagtttgctgcttccaaaaacacggctctatctgacaccctgaaggcggaggcggacttggcaagcaaggatgctgaagaagccagggtagaagtcggagttgttcagttggaattgggtgaagccaacaagaagttatatgccgctcagaagaaaatcaccgtgctaactaaggatctcgaggttgctgactgttttgagaagaccatcgggacattatctgcttaggtaaacagtcttcaggatgagaggacttcccttcgagcagttcttcatcggatgaaggaggaaaaggaagccaaggaggaggagctttcggctgaggtggacaggttgaaggacaaggtcaatgccttggagacagccggtctcgagctcttctttgatttttggaaggctaatcctcaggccaattttgactacttgggcaatgctaaggacatgtactttgagttttgcgcgtcccaagtgtcctatggcgaaactgaggcggccgcttcaacctccgattagactgctgatgtacctcctgttcaaacaatagatcctcctgctccggtttgcccagaagaatcgaaccaagagcctgggactccagctgcttaaacacttctctttttatctctttattttatatatcgtattcggcctcaggaccttttctaagacattacgaccagccaaacttggaattttttttcattttttcagacacaggctgaccgggcatcttttaatc

SEQ ID NO: 334962 - DNA, 852 bp, Cannabis indica
ccgccggtgattatgccaatcatagtcgctacatgcacttcttacaagaaatattcgaaggcagacactgattcttgtgagaagcagccttgccggaaccacccagtgtgtcttttattcctgtggcaaaacctttgtttttacccaacgtcacaaattcttttgaaccaggtgacttggattttgaaattatgcctctcaagccgcgtacgtctaaaactcctcaggatctcagtgtcaccttcaaggctgagatgatagaatcgaaggtgcgatctatctcaggctacacgggcgagatgctaaaaacctgtggaattgaacttgggcaatcatgccaagttagatcagaatgagagggtgagttcatttgcttccccctggtgttggaatatattttaccaggatctagatttactaacaattatgtttttaacatcctagtatgaatttctaaaacgatgaaaataaacacataaaaggtatgagaaaccttacagtggttgcagcagaattaaatgactccttctgctcagatctctaacccttgtatctttctgtagcatcgtaacacccagatttgagcctgattctccttcttgttgtttggattcttcacaatcttacatactatgattaaggactaacttgttatgtgtgggcatgtactcaatcactaatggctgaatttcgttaatgtgaagaacactaaggatttcaaaattaagagaagaaaagaagaagaagaataagtctcaacaacctagagagaaagaaagctaggttgtcttgcctttgaagcattagttggataatgagactttcttttccttttatactacttctcttagg

SEQ ID NO: 334963 - DNA, 986 bp, Cannabis indica
gcataaagaaagacatcttcaactcggatacccctcttattgagactccaaatgaaattaacccaatcccaaactcgaataccggaattacacacaggaaatattccccatggtgatgaacgccacaggtgcatagctacatcacatgaaagaaacagatgttccatagtttcctcactcaaaccacataacggacagctagtatcctcaatctgcactcttcttttaatcactgcacgaaccgggagagcttgagagagtatgcaccaccaaaggactttatgacgctccactattttactattccaaagtttgttccaaagagctggggcgacattactaggaggtgctctctccaaagcctgagacagataagccgatttacaagagaaccgcccattactctccaacgtccaaatccaactatcttttccattaccaggggggaccatcttttagaatagcagaaacagtctcatgatcgaaaagactatttaacttatgcaaatcccacccacccctaggagacaagagatctgccacacagttgttgtccgttactacacttctgtttggtttcgggacgaaacctttcaaatgagggatccaagggtccctccagatgctagtgtctcttccatcggctaccctcttgcaagccccttttcgaaggattgcattggcttttatgacattcttccaaaaccaggaatcagaatctttgtacttgcactcaaggaaatcccttcccctaaggtatttagcctccaggatcttactacataacgactgactcccagtcaataaattccacccccacttagccaaaaaggcaaggttcatttcctttgtattccgaaaacccagacctcccatggacttgggaaggcaaagcttatcccatgctttaaggtaaagaccatggttccctttctcaaaaccccaccagaagtcacgaatcataccatcaatcctattcacaaggc

SEQ ID NO: 334964 - DNA, 603 bp, Cannabis indica
ttttgctgtccaatgtttacaagcagccaagacttggctgagttggagaacctgagcttcagatctgccacagattataaggtggataggtcgaacaaattaaggtgagtaggtttaggaagaatgtacttgctgctgttgttgcaggcttagtgtacagcatttgggaggctcaaaacaagtttatttggcaaggggaacagtcggattgcagcaggttgatagagaacctgaaatggagactcaaaagccgaatcatcatatttttgcctaagaaattgagttgtaaagatagagagtggttttatgatttgtaataatgtaaatacaaagtatgtgtagatttaatctcgaggcttctattttaggagtactcctagaatgtaaattggtttgtgcaatataattctctgattcatcaaaaaaaaaatgtgcagttgtagatattgacatgttaattatatattatctattatattatacaccctattttgaaatctgaagattttattatttctattattaacgtaattatttattttacttttaaaatataaattatcattttaacttccactaactcaaaaaggaaaaaagaaaaaa

SEQ ID NO: 334965 - DNA, 843 bp, Cannabis indica
gttatttcgagagggccacatattgcaggggaaagcaataacgctcagaagagatacatgaaggagataaagaacgagcagttggtctttgccccaaaaccttccaagaaggtgaaaactgaggaaccccccattacgttcacagaggaagacgagaagaacgtgagataccctcacgtcgattcgctggtcataaccattcaactcgccaataagaggatcaagagagtgttaatagacaatgggagctcgataaatatcctttataaggagacgctgaagaaaatggggctcaaaaaggccaagctaagaccttgtatggtgaatctttgcagattcactggggatagcatcgctagccttggcataatcgatctcgcattaactgtatgtgaggcacctttagctgctactgttatgcatgacttcttagttgttgacctgccttcggcttacaacatattgttggatcgtccagcactaatcggactaggggcagttagctcgatcaagcacctatctttaaagttctaaacaccagatggcatgggagtggtgcatggcgatcagatgttggcttgcaattgctatcgcatagagttgcagcataaaaaggccagtcatcagctgatgacgatcttggcaggagaaaatgagaagaaagatgaagatcttgatccctgagttcaagatgaaagaaacctgctaaaaccaattgaagaattgaaggaggttattctagacccagaaaatcccaccaaatgtgtgtaccttggaaagaacttgggcgagcatctcaaatagtaattagtaagttttttgaaggcgaaccaggatcaattc

SEQ ID NO: 334966 - DNA, 1671 bp, Cannabis indica
ctttcattgagagcttgaaggaaacaaaaatggtggagactcgaagcacacgtcaacctcgccctcttcaagattctcaagatccaaatgatgaggacgtggcctcaagagcaaatgtgggttctgaggaagaagaaggaacccctgatgacgagtatgaaggaaacttcgacgagtacgacgcctatgaagaaggcggctactcagagttggtactattaaggcaaaaggctgccgatcatgaggctgaaatcgtagaccaaaaggagcaaaaccaaaaaatacaaaaggtgatgctggccatgcaaaaagccatggaggccgcaggaatccacttgcatcctaaagccatccctactggacttggaaaggaaccagtggaatcctcgccaagtacccaaaagcagaggtctaaggaacctagccctataaggtatccctccgaagggaaccaaaagaaaaaccctacttccactctcgggaagaagaaaaaggtgtgggatccgcgaagggtccgctcagatttcccaaaagggaaaggttcgcagaggggcaaactccaaaaagggagtcttggccctcaggatcgataggaccgaaaaagcgtttctgtgcaccaagaccccggggggagaggaagaagggaccagaaatgccctcccattgatctaataaatcagattaatgggaaccaaggtgatctccgggatcacctggataatacggacccgcggtctccacggaaacgttaaatgaagggatcatggcagaacttgccatactccgaaaagacatcgcccgagtctcccggagacagaaaggaaacgactccgactctgagtgtgaggaccaggagccatgtgccaagcacatcttagaagcagagctccccaaaaattttaagatgcctgaaatggcagcttacaccgggaactcggacccaagcgatcacctgtcgcggttcaaccgagtcatgacagtcatgagggttagcaatgacgccaagtgtttgtgcttcccccttactctaagcggatccgcagaagagtggttcaagaaattagaaccaggatccgtggattgctggaatgagttgcaaaccagcttccggatacaatttgtcgtcgcaagaaaagttaacctggaggtcagggccttgactaacatcaagcagctacctacagagacgttgaaaaatttcataaagaggttcaaggaagaagcctcaaaaaccaagaaagttgatgacggacaacagctcgctctccttcaagcgggcatccgtacggggactccattctagaacgagttacagcaagaaggagcttccaaccttcaagatttctagaagagagtccaaaaataaatcaatatggaagaggcccaaatagtggcctatgggggatactatcccaccgggatagcaggatacgtacttggagctcagctcccaggaactttgccagcagccgctccgtagatgagcgacatacaatttttcgctactcccggatacaatcaaggcccccgccccccatcttcccactttggaaatccctcggggattaatggacgctccccgtcgcactccgctccggcaacaagtctagccggtccttctcaaggctctcggagcaaaaggtcctctaaaggcagcaaccagacagagga

SEQ ID NO: 334967 - DNA, 1113 bp, Cannabis indica
ttagattgattttatcttgatttaagcttgaatataaaaagaacaaaatcaaagattcaacaccagaattttacaagcttcacctgccctagaaactcattctaggcggctagtgcttgggttccccgaaccagggtaataactttcactatattcaaagatgtatcttacaaaaaccaacaatattgtaaacaatacactcttttacaaaatacagtgaatctatacccataccaaccaagacccttgattggagacacaagatccccttgtgtgaatgatgagctctcttcaacacttcttcaatctgaactcccttcagatctggtgatgaagatgatactgaaatcccttcagtctgaactcaacatcttcaagctttgatctgcaactatggagtaatacctccaagctcaaagatcacctgccatggaacataaagaagaaacaagaagaaagaaacgtaatccctaatctccgatcaaaaagttcgtcaacataatacccagaaatcgtatttatacccagctaaaccaagaaacccgaaatagacagctgttaccatctgaacaattaaaacctaaaatatctttgctgacgtggactaacactaacagtacgaactccagacaaaacactacgagtcccagacgcaactggaatgcaactggacataatttgtcactacagaaaataaaagttacagaatataatcacgattataagttcaaaagtttaattcccatgatttgtcagtttactggatttggactagcatgataatctgcgataggtatacttacaccttcgataagttttatgtcctttccaaggcattggaaaagcttaccattatcggatatatggagtatacattggaagggaccgatattgatcttagataagatatcataaacttaccgttatatctttctaagtcaatgtaaatggttgatcttaggtctacggatcttaatcctgacatggttaggttcgatctcaagagttttatttgtgttctttgatttgtaggataaaatacattgaagggtagaacggtaaatttgtccttattcagtgtagatcatatatagaggatctttgactattagg

SEQ ID NO: 334968 - DNA, 740 bp, Cannabis indica
ttgtcgaaaacctcagtcaacattttgctgctttcattgagagctgaaggaagcatcttcaaatagacaacaacctcacaaactaaaacaacaatggtggaaactcgtaacacgcgtcaaccccgtcctcctcaagacgcccaagatcttgaagatgaggaggtggcctcaagagttaacgtgggctccgaggaaggagaaggaacccacgacgacgaatatgaaaggaacttcgacgagtacggcacctatgacgaaggtagttatacagaactagtgctcttaaggcaaaaggctgctgatcatgaggcaaaaaattacagcccaaaaagaacaaaacaaaaagatgcaagaggtgatggttgccatgcagaaagccatggaggcagcagggatccatgtgcatcccaaagccatccctgcaggacctggaggaacgccagaagagtcctcaccaagcacccagaagcagaagtctagggaacctagccctataaggtatccctctgaggggaaccagtagaaaaatcctacttccactcctggaaaaagaagaaggtgcaggatccgcgaaagctccgctcagatttcccgaaagggaaaggtccgcaaaggggcaaactctaaaagggagtcttggccctcaggatcgagaggaccgaaagagcgtttccgtgcaccaagaacccggagggagaggaagaaggggccaaaaataccctcccgtcaatctgagacat

SEQ ID NO: 334969 - DNA, 792 bp, Cannabis indica
cacaatgcttatagaggataggcttttcccaatagtagtgtttgacgtctgagtagaatttcttcaactgttgccttgtcaaatctggtggtgtaatgttggtggttaagaagttcacataatctgcaaaccaaggtaccgtagaatctaggagaaacaactgctcatcaggaaaatcttcattgatctgaacctctcatgtgttctgactctcttcaagctccaaccttgacagatgatctgctaccaaattctctctgcccttcttatcttttatttctaagttaaattcttgtagaagaagaacccatcaaattagtcttggttttgcatctttttcgtcatcaagtacttgattgttgaatgatcggtgtacactatcactttatttccaatcaagtaaggtccgaatttatcacatgcaaacactatggccaccatctccttttctgtagtagtataatttagttggcataattcaaggttctgcttgcataatagattgtcatgaataccttgtcaaacctttgtccaatactgctccaatagcatagtagctggcatcacacatgattttaaaaggtagctcccaatctggtgtagttacaatcgatgctgaaattagtttctcctttagaatttggaatgctttaaggcaatccttcccaaattcaaaaggtactccattaacaagaagattagataagggttcgacaatcttggagaagtctttgataaatcttctataaaaccctgcattgcccaagaagcttcgaactcccttaactgaaa

SEQ ID NO: 334970 - DNA, 547 bp, Cannabis indica
tttaacaaaacacagggtccaatctgtaacttttgcaaaacacagggtccaaaatggtatttaccctataaactattggaaaaaattttaatgcacacccttcaaatggacgcaccgatacatctttattaatttttgtatccgaaataattttttagtcaaattttttctcatgattatataaattatagttattttaaaaaacctgcaaaattttatgaaattcggaaaaatttaacacaccgaaaactgcgttcaaactgagcattgcacgcatgactattttattttatacgggtgtaaaatagattgtttgaatattattttctatattgtaaattattcctgttgcccctaatttcgcccaatatatgtggaccaatcagacagggacacgtggatcaagcaattcacaatatttgctaagtctttaggccataagataacgtcccggacgtaggtcccggagaaggcacatggaactcaatatgctcccggaagctcacacaacgctaaggcatctccgcgaggtgtcaggtttctcctg

SEQ ID NO: 334971 - DNA, 1001 bp, Cannabis indica
tttgagtgagatatgagattttttagggtacttttccagagaaccagttctgctagttctgtagaaccagttaaccatttctccagacaggaccctaggaaccagtttttcatttgggaaatctagtttaccagtttgggtagtttctagagccttagttttaatgtttccttaatagttagggtattggtcttgccatgctatatattgatatgaaaacttctagttttgagtttaggtctccaaaaagggttttagcaagttgtttacccatttatgattgtgacataggacctctgttcaacgagtgattttctatttaggttgatcagaacacttgaatttagaaacgaggtaagactagcatagaatatatatatatatgtatatgtgtatgtgtattatatacatactgttatgtaaatattatgctaccaacactagtatggtagcggtactgagtgtattggtacaatatatgatgttgaaagggtacgatcaggtgttaccaacactagtacgattaagtatgtagtgcatgttgtacaacacttagtagtactcgaggcacggttcaatcctaccaatactagtgcatgtggtatagagatcgtacgtttattaagaatgtttttctcatctatttagccttgtggataggtgtatgggtgcctaaatacaagtcggtaatacatttgtgttatatgcttttcttactgagtctgtcgactcacagatattgttatcatgtgtaggtaaaggaaggttaatggtgaacagaatgagtctagagcttggggatgattgtacatgtcaagatggtgtgacctggagagtttggtctctggacatcttgggcttcattttgtagtcgttatgtaaattgtttgtaatgtttattttgaaaatgaatataagatttaaaagcaggaccccaacttttagtatggatgtatgtatatatttataaaagtttatagttaaatcaaaagtttaaattt

SEQ ID NO: 334972 - DNA, 554 bp, Cannabis indica
tttttaaggattattatgcggaccacttcagattattttatggattaatgtgatgattcaatttcttcttcttctctttattcaattccattcaatttgttctaattttgtaattattgactgatcaactttaattgttatttatgaattcaagtcaaaattttgaaaggtgaactttaaatatgctctgattgatatggatgtaaattgatttaggatgaaagtacctaggttgtttgtatgattttattagttgctatgtttattgttatttatgtgattaaacttaccataaaaatataggaaattttcacatagattgagtttataagtcttaaccagacaataaatttcttaactcaacttatcaattgaataggaagaaaagaaattaggtaattacattatgaagtaaaataaaagatagttgaggatcataacaatctttatttttattattgttatttttctaaattttattattttttatcttatttaccttctatccaaaattattattcatcaaatagaactaaagaattaattaattggta

SEQ ID NO: 334973 - DNA, 689 bp, Cannabis indica
atctataaagtcctattgatttttggattgtgtataattatattagtggacaatagtttgctttttaagcttatagagtggattttctttcaaaatacacatttatttcgagatgagcatcgattgttggccgtaatgagttgatttgaatatcagtaatatgataaattaattgagcacacacacacacaaagaattgagtttgaaaagttagtttcttgagttgaaattctaaattgaggagtttagaatcttcataatattatctgtttggccaatttttgagactaaaaaccaatatttcattatttgtttgtttggttgttcatttgtatgtttggtttaattagtgttttgctaagggactaaaaaattcagtccctagactgaataagtaccaaaaatcatttcatttaatgatggattaggtggctgtctctcttcgaaggcagcaagggcaagggattttgggagctgaattcttgtgttttcagcaaaggattcaagaggaatcaaggcaaggtaaccctagttcttctccccttaaatttttgaaattttagtttagtttcactttgaatttttaggtttagtggctgttgggttttgaattgcttagggttcgaattctggggttaggttgagttgatttgagtccctagctattgtttttgatgcttgagaatggt

SEQ ID NO: 334974 - DNA, 984 bp, Cannabis indica
tagaaatatatacaagatgacaaattcattaaaaatatatttgaccttaaaataagatcatttctaatgatcgcgaggtggaatcaatgatggctcacaggttgagggtcgggcaaataaactgcttgcgcataaagtaggaaattaagtacttagcaccagaggaaaatacgagcaatggaaacccctaataaactttatgcatgtgattgtttaaattgtgaatgaaacgtaagcaaacatccacacaacaaaatttaaacttaaaagtatgaggcattaaaaagcaaagttggccatccaaccttacaagtctgtctttacaaaaaaagtgccacaaggggcaaaccattgtcttgaccaagggaccattttctaaaagagaaaagggaggtaaataaataaccaagtcaacatgttgggggacttcgacaaatcttcttcttcttcttcctcgacctcgtcatcctcttcctccatcttggtcttctcgcaaagagctaaagttttctcttcctgctcctccaagaagctggtgtccatattggggttcgccatccgggcctgatacatggtgcaaaaaccatccttgttgcatcgttcaacggtctctacttctttttcagcaaacttcttctcaaactcatcggcttgggctttgacgatcttcttggccttctctttttccttctcggctcctcttttgccggcttcggcctttgctttcttagcttcctcttttgccttctcggtttcttcttttgccttcttggcttcgtcctttgctttctcagcttcttgcttaaggtgggtattttcctattgggcgtcgtcccgatgcttactcacaaccttggattgggatagtaatttgggatagtaatttatatggtatggatcaccctaatggtggcgaccatatttgacttgcaaattatgaaacaatggtagaagctcataagagagaatagccttgactctcgc

SEQ ID NO: 334975 - DNA, 1434 bp, Cannabis indica
tctgaaatagagcgatgtcaggtgatgatggactttcgaggcttgtccgagcagtcaccttgcatactacttcatctgttttttgagcttctttgactgtatgccttatactttcgatgtctattttctctaaccatgtgtttttgttctgtgcagacatgtctcagaagatgatcgacgctctaaagaagtgaatgtgcagaagctctagcgcctctccttcagccaagaagtctgaaggcgatgaggggtcctcttccaagaaaaagatgcctgctggagaggtcattgatcttttcgtggagctgataattactgacccctctaccccagaagctgctaagtccaaggagcttcggggaggaagctcagacaggtctaaaccaccaaagggtgggtctgagcttatgaggagcggatttgaaaaggtgcgggcccctactccacctttgccggtgcttccaaaggccaaaaagggcaaagagatgctcacccactatatgaacccactggttcctgaggttagtgagcagctggctggagctgacaatgactcttctttggagctgctggtgggcggagttttgaaggaattcacaagggtaagtctcccttgacacttttctttaagcttctgtacttagctcaaatgctaaagtttttcttttgtgcaggccagtctgaagttggccttcacctaatcccagtctgttgcttccaggaacacggctctgtccaacaccatgagggtggaggtggacttggccaagaaggacgctgaagacgccagggtagaacttggagctgttcggatggagctgggtgaagccaacaagaagctctttacggcccagaagaagatagttgagctgactaaggatctcgaggtttttgacagttttgaagagaccatcgagaccttatttgctgaagtgaaccaggatgagaggacttctcttcgagcggttcctcgtcgggtggagggggagaagaagtctaaggaggaggagcattcgaacgaggtgacggagctgaaacagaaagttcatgccttggagacagccggccttgagcttttctatgacttctagtgggccaatcctcagacaaacttcgaatacttgagggaagctaaggacatgtaccttgagttctgcgcttcccaagtagcttatggtgaaaccaaggcggctgcttcgacctccggccagaatgctgacgtacctttcgttaaacaacagatctccagctcctgccggcctaaaagcccgaaccgagagcctgggactccagctgtttaacatttctccttttatcttttatttttatatatcttattcggcctacaagccctttttctaagtcatcatgaccggtcaagcggtcttaaacttggaattatttttcatttttcagcaacggcctgaccgggca

SEQ ID NO: 334976 - DNA, 746 bp, Cannabis indica
ataattcgaaaacttacctgtaagaatatggtgcaacccgagacatttttcgtgttcttagtcttgtaccgctgtagagagctcataagatatcgaaacccaacagtcgcccaattcttcttcttaattgaccttgtatcaacagtgcatgtagctagtgctaacctcggtaccattcttgggcagcaacacagttccaatacaaacaagtagaaacttaatgagaaacaggtaatcgctctcgctgctttccttcagctcattctccagcaaagtcagggaaaacctatagtccttggcctttaaaattaggtcaaactcaacgaggtcacggtcactttcggttgccacgggttctcccccatccctgattcccatgacatcctcaaacagcttcgacgatagttggatcgttcttccaaatatctccagccgagaagtggttggatccacgtgatcgatgagccaactaactatcttagcatcgatgtacggggcatcctcccttaagaatgtagagaaactggcaattctgaccatttctttttgagcgtcgttgagaagtgggactattctacccaaacgttcgaaggagcaacggccagaaacttaaacatcccctaccccttcattgttctcaatccctgactcagcagataatgtctcctttaacttcttccatttccctctaacaccaaccttcgacggggaagcctcaacttcatatgaagcccacttctcaatct

SEQ ID NO: 334977 - DNA, 1453 bp, Cannabis indica
tactactccttattcagttcatccagggtaaacgaagatgtatcaagacctgaaagccatgttatggtggccaggcatgaagaatgacattgttgaatatgttgctaagtgtcttatctgtcagaaagtaaaggctgggcatcagaggcctgcagggttgctgcagccactgaacataccagagtggaaatggaaatacattgctatggacttcgtcgtgggtttacctagaaccatgggacagtttgactcggtgtgggtcatagtggacaggtttacaaagtcagcgcactttttacctgttcgtacaaatttctccattgactagtatgctgagttatatgtcagagaaattgtacgtcttcatggtgttccaaagtccattgtttcagatcgagatccgaagtttaaatcaagattctgggagagtctacatcgagctatgggtatttagttaaagttcaacacatcttttcatcctcaaatggatgggtgatccgagaggacgatacagattctagaagacatggtacgggcatgtgtgcttgactttgagggatcatgggcaaagtaccttcctctgatcgagttctcttataacaacagctaccaggccacaatcgggatggccccttatgaacttttatatggaagaaagtgtagatcgcccattcactgggatgaagtgggtgaaagaaagttcttgggtcccgaggctgttcagagaacaagtgaggcggttgacaagattagagcgcgaatgctcgcggctcaaagtagacagaaaagttatactgctccaaagagtcgggatattaattttcaaataggggacaaggtgtttctccgaatatcaccgatgaaaggcattaaacgctttgggaagaaagggaagcttagcccaaggttcattggaccttttgaaatctttgagaggatagggaaagtagcgtacagattggctatgcccccagcgctggcagctgtacacgatgtgttccatgtttcaattctttggaagtatgtctcaaattcatcccatattctgagttattaagcattggaactacaaccagatttgtcatatgaggaacaactagtgcatatactcgatagaagagagaaagtcttgagaagcaagacagtgacactggtgaaagtattgtggaggaacagtaaagtggaagaggcaacctgggaactcaagacggatatgcagcagaaatatccggagttgttcaggtaaatttcaggaccaaatttctatgagggggtaattgtaataccctagaattaagagaacggataagcaaaaccctaactagtaaattatgtattattgtggaattatattattatataatttaatatgtgagaatttatatgattataacatggtaagaccccgttggtgagccaggggcattttcataattatgacccgagaagggta

SEQ ID NO: 334978 - DNA, 1256 bp, Cannabis indica
accttaagtactttgggctcataaaactactgagaagacagcaacatgacatactctattctcgctagcatttggctcagaagcactattacatgtggaagtaaacatctcgactcatagacgagagttttataatcaagaagaaaaccaagaactcttaaaattttccttggatctgcttgatgaaaacgtactgattactaatgcagcataccaacaccgagtaacaaaatacttcaacaaaaggatcaaaaagaagctattcaatgttggagatttggtgctaaggcgagtatttgcaaatacaagagacgcatcagcagagtattcaacctgaactgggagggtccttatgtgattgaagcaatagtaggaaccagggtaaacaaattggctcggctgaatagctcgctgataaagaactactagaacgtggacatttgcgaccctactactagtaaactgatgattgtaactcacatctatgatgtaatattttgaacttcagtatttctttttcaagtaattacaaagttttactctttaaaattacttgaagggcatatgtgtatgattaaccgaaatttatctggaaatacatgatatagtgcaaacccaccaactttaaatttttttaattttttttttaaagttcttgttgatcaaacctatactgacgagaaaggaggatcaaactattatgaataactttttgaattaaaaatctgtctgacgagaaagaaaaatcaaaagttataaatgagatataactcataactcccatgtgaagctgaatactaacggctcgcattataaacgagacatcaaggtgtcttaaaaaagtacttaaacctagtgtatgaatagacgatttaactattcatataagcaatcaaaaatatacaaagtgataaatcattaaaagtatattcacgtttgcttgaaatagattataactgttattacgaggtagaattaataactgctcgcagatcaaaagcatggcagataataaatttcttgcgcacatagtagataattaactacttagatattatcaaaggaaaatgtaacgccctaatggtaaggcacgcttgttgggttttatgccctaaataaaactctatttcaatgtaatccagattactcaatatcaataaagtaacagaagtatttttcattcatttgtgtatattttgattcacttaatcaattgtttgtctatttgatttataaattcatccaaacccctttca

SEQ ID NO: 334979 - DNA, 746 bp, Cannabis indica
ccacaccttctctttaggtataaccctttgcaattagtctagctttaaaagttttgacttctccacgagcacctcttttctttttgtagacccatttacatccaattggatgataatcatcaggtgcatctacatattcccagactttatatcttttcatggaatccagttctgaatccatgtcagctgaccattgtttccattccagacttgccattgcttatttataggttaatcgatcgtcatcaataccatcaccaatgaccgtattgatttcaccattcaagccataacgagctggttttgtggaaaccctcccactacgatgagggatcgtgaccttttgaataggaacatcattggtagttttatcagttgtaacaacttgcattggttccaccaaggcagtgggattatcctctatttgagtagaagatgatggaacatcagttggagttatatctgaaagcattttctccaatactactttactttgcagcttgaagttcttaatatagtcatcttaaaggaatgtgacatttatagaaacaaacattttattgtccttgtgactataaaatagtccacccctagtctcatcgaaattttcgacaaacatgcaaacctcagtttgcgcttccagtttaccttctttctttattaagacataagtatggcacggggctggccttgaaaaaaagtaggccatagggaaaaaaaaaatttgggcccttatgttagaaaaa

SEQ ID NO: 334980 - DNA, 1033 bp, Cannabis indica
tgcccctcaagtaattttaaaagatgacactttgtaattacctgaattatgattaactttattaataactgaagttcaaaatattacatcataaatagaagttacaacataaatttactagtagtagggtcgcaaatgttccacgttctagtagttctttatcagtgagccataaggaccctccaagtttggattaaatactcatgcaaaagtgtctctcgtatttgtaaatactcgccttagcaccaagtctccaacattgaagagcctcttcttcaccttcttgttgaagtatcttgtcacttagtgttggtatgctgcattagtgatctgcgactcagtacgtttttcatcaagtagatccaaggacaattttaagagttcttggttttcttcttgattatagaaatctcatctgtgagccacgatatttacttctactggaagcatttcctccaagccaaatgctaacgagaattgagtatgccctattgctttcttctcagttattatatgagcccaaagtacttgaagtagttcatcgacccatctacctttggtagcgtctaacttctttttgatagtatccttcaaggttttactaacaacttctacttgcccattcgcttggggccttgatactaacgagaagctcttaataatcttgttccttttacagaactagtgaataagtcaccatcgaacagagttccgttatcagatactatcttaatgggtattccaaccctacaaattatgttctatatgaaaaagtcgaggacttttttgcaggttatggaactagaagttcagcctctgtccattttgtaaagaagttgacaaccaccattgcgtactttgcacctcctcgccctgtgggaagtgccccaatcaaatcacccccatattgaaaatggttaaggtgaggtcatcattctcaatttcgttggtggtacacgagatatatgcaagaatctttgacatttatcacatttcttaacaaattcgttggtgtccttgtttatagttggcc

SEQ ID NO: 334981 - DNA, 1374 bp, Cannabis indica
aaagagccactgacgtccccaaggatcatttgatttatcatctgaatacggccactagctaccgggaaaacctagtattggggactcggactcgaggggcctaggataagcagcggccggtctcttcctaatcaagttgacgaggatgcgcctatgacccaaccaggtacatacctatcattgagttagaaaactgtcatcttaagcgccgattggaggaaggaaactgacgtaatgctgaattagagcgttagatagctgcagtcagggtgtcacaggagaatagttcccaaaatcaacctgaccttggagaaagagatccacgaggcaaaccttgtgactcgcaaaccagggggcaggagacaacctgaaggtatccccagaactactcgaagagagaacacctgaggaaactgagggataccttgaaggtgagatgctctataatcaactagggaccaaaaaactggaaattccccctaggaataagggaaatctggggacacatcctacgatatgtggatcatcagtcggggatcgccaactttctctcgaagctcataggaaaggagctcgcacaaatcccaatagggagaatgagacgaatcaaacctaaggaagaagagcaggacgttaagaggtgagggctaccgcgaggtacacagtaactcataatcgattaatgcgaggagaagagaacgcttgctgcagcgatgaccaaaaggcaaaatatggtctacgggtggaacgagattagtcagtcgtcatggccaattggacctacaagaacgcttgaactggaaaaaaacatggtcttcgtcaacgacttggtccaaagcaaagagattcaatccatttgcgaatagacgagttggagaacaagttcaggaggcatcaagtcaaggaaccaggaaaacaatatggatgcgagtctgttgaagaattcgagtcggaggctttcggatcaaaaaggaaagacgactctaaaaagttgtccaaagataagaaacggaagaaatacgaaaaatatgtacccatttatactgactataccgagcataatgaaactcgggaaagtatcaacctcgcacatgaacaggaagtcgttttgagcgaaccaaaacctatgaaactcgcgagacgtgaaagggacccaaccagacgatatgaataccatagagatattgggcataccacggaagaatgtcgtcatttgaaagatgagatggaaggtctcatagcgcgaggacactttcaacaatatgtaaaggggcaggacaatgcccatgaacaacccgatccaccaagtaactcaagcaaccagggatcataaccttcctctgtaggaggaagggatacctcggctatttcgag

SEQ ID NO: 334982 - DNA, 564 bp, Cannabis indica
taactggcataacaaactggggcacccctctaataccatcctaagcaaagttctacacatagtacctcacaaaggcaccataaaccagctccctttttgtaaagcttgccaattaggtaaaagccataaacaaccctttcccacatctgtttcccatgcttcacgacctctagaactcatccatactgacctatggggtccatcacacattaaatccaaagatggctactgttattacattctttttcttgatgactttagtcgatttgtttggatatatccccttacccttaagtcacaagctctagatgtgtttctaaagttcaaaagcatggtggaaaaacaattcaacctacctattaagagagtccaagctgactgggggggagagtataggccgttttctaagtttctcagtgaccaaggtatatcattcactcatccatgtcctaaaactagtgaacaaaatgggagggttgagcgtaaacacagacatgttactgagatggggttaacactattagctcaatctggtttagacttcacctattggtggcatgcttt

SEQ ID NO: 334983 - DNA, 595 bp, Cannabis indica
caataaagttcttggacatagtgacacagtaccttatttgagtgggagaattttaaaattctaagcccatctttatttggatgacacttgtgatagcatactatgttatgattgtgataggaactttagaattcaactgagaaagtagatctaaccattcatatggatagaaataacttatcagaattttgagaataagataggaaattttgcaaagtctattcgaattacttaggcaaaattcctaatcatcatgaaaggttttatggtatctctaatgattacttaatcttaagcaagtattttacattaatgtaaatactagattgccatgttgatgacttagtctagaagaaactttagtttcaaactaagataatatgtcacaacaagatatccttgagaaacaatagtaagaggttaaatgtactattatgtacaaatttaactagactcctactgttgagtgagagccatctaagatgtcatcaaacgaggagcattaggagatagtcaagaaatttttttgaaagtgaccgatatgttagatgataggggtgtatattagaatccttatatttacaccaactcataa

SEQ ID NO: 334984 - DNA, 512 bp, Cannabis indica
cttgggatagacataaagagaccaaagcctggcatgccaatactttctcaagctgcctacctatagaaagtattgagtaagtttagaatggtcaagtgcaaaccagttgcaacaccacttgctcaatacttcaagttgtctgcatctcagtcacaaaaaacaaatgcagaaagagccaagatgagcaaagttccttatgcaatttttgttgggagtctcatgtattccatggtgtgttcaagaccagacttagctcatgccatgagtatggtcagtagatacatttcagaccctggccttaaatattgggaagcactgaaatggacaatgaggtacctgaaaggtactatggacactagtattgtctttagtaaggggaaccagtacaagaaagaaatcattggttttgtggacttagattttgtagcaaacttagacactagaaggagcctaacagggtttgtgttcactactcttgggggctgtatcagctggaaatctaacctacagaa

SEQ ID NO: 334985 - DNA, 679 bp, Cannabis indica
tttagagagtatcggtagcagattgcaacgcgacatgtctaaaaagtgctaggcactactgatatctaatagcaatgctcttttttattaagtattgctataaaagcaccttatggtgcccaacatctagagtcgtctttttagggtgtgggatagctaagaccgttgcccaattttgaaaatagttatcgcatactactctccatctctctttctctttctttcgaaccaacaaacccagcaaggaaggtggtgtttctttgctgaaatttctggatgctagtaggtttaaggtactttaaatcaaggtataccttctaagcaattctattcaagttttatttaagttttgggttgtgttatgtgtaattcaggtttaaattaggggttgtgtgtgttcagtttgggttcattttctggagttaaataatgattatctttactgttttgagcttaattagaggatggttgtgctatttgagtcaattgaaacttaagagctcaagatggagctctaatggtgatttcttagtttaagttgtttgttatattttgatgctcgaaatgagtttgttgggacttgaataggtatcctggaaagttttggaaagtttgggattgaattgaggtgtgggggtcggtttttgggttcccaacacagaaccggtcgaccggttct

SEQ ID NO: 334986 - DNA, 837 bp, Cannabis indica
taatatgatcttttagcttaacacaataaaacaaattgcagaaataggaattgtactttaaatggtggtcacctgacctgagtacttctttcctcttctcgaaacctttgggcgtagtccgcccaacaggccattcacttaagagaaaatgttcattcagtacttagcgtggtcatccaacctggtactttattggtagtattttcttacacttttcccattccaataccgtggtactagaaagagttgcattttttcatcatacttacctaatttgtatgctccaaattcgagaacttcgaccacttgatatggtccctcctagttaggtccaagtacacctgtcgtactgtctttggtgtttaagaatacccttcttaggaccatatgtcccacaaagaatttccgagccttcacttgtttgttgaaatatcgagctactttttgttgatgggcatccaatttcaagtttgcagtggctcgtctttcttcgatttcatcaagtaattcaaccaggagtacgtgattggtatcttggttgtacatcaatcttttgtgggatggtggctcgagttctacaggcagcatagcttcatatccgtacgccatagcgaatggtgtctgtctggttgtcgttttctcagttgtccgacatgaccatagaacttcaagaagctcttctagccaatttcctttggcatctttgagtttcttcttcaatgtatccttcaaggtcttgttgactgcttcaacttgaccatttgcttgaggatgtgccactgcggagaaacttttgatgataccatggctcgcaaaaaagtcagtgaaggattggct

SEQ ID NO: 334987 - DNA, 1261 bp, Cannabis indica
tgttaatcaacatacttgtgactagatctaagatcctggtaaaataatttccaacaaaaaacacaactgcagatgcgttagctcgattggcaagcagcaatgtaagtgacaaggcaaacttggttcctatccaattcctcgaagtgcctagcatcactggcacggaagaaatcgaaatgattgatacttccccaaactggatgacaccaatagcagcctacctcgactctaggaaactccgagataatcggaatgaagcttgaaaaattagaaggaaagctacacgatatatcatagtagagggaattatgtacagaaaaggattctcaatgccattgctcagatgtgttactcaagaagaagatgcacgactcctatctgaagtgcacgacgtgttttgtggaaatcatgccgccgagcaaagtttatctaagaaaattctaaggcaaggttacttctggccaacgatgatttaatattcaaaagcctatgttaagaaatttgataaatgccagagattttcaaagatacctcaagctccgcctaacgagttgactcagatgcagagtccgtggccttttgccatttggggaattgacctgatcggaaaattacccaaagcaaaggaggagtgcagtatgcagtggtagcggttgattacttcactaagtggaaggaagtcgaaccacttgcaaccattacatcaaagaaagttcaagagtttattgtgaagaacataatctaccggttcgaactgccgtacaaaatagttttagataatggcaagcagtttgacagccaatccttcactgacttttgtgcgtaccatggtatcatcaaaagattctccgcagtggcaaaagccaatggtcaagctgaagcagtcaacaagaccttgaaagatacacttaagaaaaaaatcgaagatgccaaaggaaattggccagaagagcttcctgaagttttatggtcatatcggacaattgagaaaatggcaaccggacatacaccattcactatggcgtacggatatgaagctctactgcctgtagaaatccagccaccatcccacagaagattgatgtacaatcaagataccaatcacgtactcctggccgaataacttgatgaaatcgaagagagacgagccactacaaacttgaaattgatggcccatcagcaaaaagtagctcgatatttcaacaaacaagtgaaggctcagaaattttttgtgggagatatggtcctgagaatggtattc

SEQ ID NO: 334988 - DNA, 1230 bp, Cannabis indica
ctttccaaggcattagcaaagtatactagtatcaaatgtactggttatacatcatatatcacaaacttaccgtgatatcttttctaagtcactgtcacttagttaatcttaggtcaattgatcttaatcctgagatagttaagttctagcttaattatactatatgggttctttgacttgttcattacagctgaccaataagatcggttcaatacttacatcttgggaacatggtagtgcaattagtgggagtattaatcatagatatagaatctatagcttttgtaactgttaagtgaaaatagttttcttagagcttggcttaacgatataatggaagagctcttatttcagtaattatattagtttactgaaatatcatttataagtaaatacattgaagggtaaaacgataacttgaccataggttgtgtacttgcgttcgtgctgaacacccatattcaacttcttctcatagtttgccttctatttcagcatgtatttttatagggtgtgcataagtctggcaaatgcgtactttccccaaaaatcttgaaaaaaaattcaagatctttaacatatcgaagtatatcttgttgggatttcataccctaaataaaacccacttcaatatgatcttatttattatcaatacaagattataaatcatttaggtttacatgtagttttcatgattagagttttaatatacaaattctataaatcctaaacatattattattcatgattatagtattgtctacatagtggaaaataatcatgattatatgcttcaaattttttagttccatgatttatcaatgcactggattttactagcgtgataattaacgataaagtttactgacacactatcatgtcgaatgtcctttctatggcattagaaaagtgtactagtatcggatgtattggttatacatcagactagagcgatattgataatggaaaagatatgataaacttaccgtaatatcttttctaagtcaatgtcacttagtggacctcagatcaaagatcttaatactaaaatgattagaatctggcttaaatgtattacatgttttctttgacttgttcattacagctaaccatgaggattagcccaatacttacatcttggcaacatggtagtgcaattgtgtgggagcattaatcatagatatggaatctatagcttctattattgtttagaagtgaaacgatagtttc

SEQ ID NO: 334989 - DNA, 1241 bp, Cannabis indica
gaaattggatggggatcatatttgctttttcatttatgttgctgctcgcgagtcgggctagtgcattggcagttgtgttttcttctcttggaatttgcttgatagcatagcttttgaattgtgcgagcagatcatgtatttttcttagatatcctatcatcttttccccctgagcctcgtattccccaaatacatgatttaccactatatgtgagttactacagaactcaatgtgttcgacttgcaattcctgagcaagtcttagtccggtgataagagcttcatattcagcttcattgttggatgccttaaatccgaatttgtctgcagcgtgcacgtactggcccccaggtgtgacaagggaaattcttgcgtcagacagctgatccgtagccgaaccgtctacatgtaacttccaggttggtttgtttttgctattgctcggctaagatacttgtactggctttgggttgttttctaaagcgctctcctctttacctgtacactcagccacaaaatgtgctaaggcctgacccttgatcgttgttcggggctgaaagatgacttcatattgacccaactccactgcccacttgagaaactgtccaaaggcgtccggtttttgtaatactttacgcaatggttggtcagggtactctcgaacaggatgagcctgaaagtaaggccatagcttccttgttgctaggattaggcaataggtgagcttttctatcaatggataccggccttcagcttcattgagtcttttgctgatgtagtagaccgaatgttggatattgttctcttctctgatcagtacgacacttactgcatgttccgtgacagccaaatatattcctaattcttctccgtcaagaggttttaagagtacaggaggttttgcgagttgcatttttagcacttgaaaggctttttcgcattcctctgtccattcaaattgcttatttcctcgtaggaggttgaagaatggaacacacttgtctgttgagtttgaaacaaatctactgagtgcggcaatctgaccagttaaattttgaacttagtttttgtaggcgattacatatctaggagggcttgaattttctctggattggcttcaattcctcgggcattaaggataaagcctaaaaagttacccgagctgactccaaaggaacactttaggggattcaatttcgtgttgtatttcctgagaacttggaagcattcatccaggtcat

SEQ ID NO: 334990 - DNA, 1109 bp, Cannabis indica
gatactgagtcagacattggatccaaaaatgtccattccatagtcccacattccaaacaaaataaacgtgcaaagcatgacgagtctagtcgtattgaagatgtctccttcgcacttactcagagttcagagatgcaaccatctgatacttgctttggagcttctagccctagggatgaagaacttatcgactttgatgggtctgatgatttcgttaaaaaaagtttgacagtgaggcattgcctgcagagccaaccgttctactagaatcgattatctcagtagagacgggtgttccatcatcagttgttccctcagatttgcttattcctcgaccaaacccagtgttgacagtgtcagcttcagcaatcaccaactcagacttgaaggagcataccaaaaggtttgtgattgaatgcatgaacgacattcttcatttgtcatcttctcctttgaccacatcagacattttaaaacatcgtgctgacgtgggtatgcaagttgacatgttgagtaccctttgcgggcattataaatgtagcttagcagaggttgcatggttcactaactctgtcaatgatttgctaaaggctcaagaaaagtctctcgcttctgctcaggttgttgagaatgcctttagtcttgatgaacctcttatcatggaccttcttggtcgtgataaggataatttggcaactatagatagtttgtccatatctgtcactaacaagacaaatgatttcaaagattttaaggcaaaggaagtagagattaatgcagcagaactagccatataacaacgacgagctcagctcgaaaccaaaaaagcatcgtttgaggtagatctttctagtctcaatgattccttaaaggagcaacgacatctcgttgaggagataagtcgatcaaaagaccaagctagtgtagaaaaattccatgaagctgagagagtgaaagcaacactcaagattcaagaagaagaaatccagagaaagctcaacgctttaactttgtttctccagatagactaaagatcttatgattttgcttctaaactttttagttttagttttagtttttgttagcttttttgtgtttattagccttga

SEQ ID NO: 334991 - DNA, 1409 bp, Cannabis indica
caatagatctaagatcctggataaatataataccaacaaagacgtgttgtacccttagtgatctttcatgcacgaaaaacatcgtgcacacgagagtcatgttgaattttataaagtatgctccgacttttgtgagggatggcgaaagttgcataaaaattcaagcgatgattttgcttaaaaagatcaaaggatgaaaacatcacttggagtgagacagacttcaagcaatccttccatttcaggaaggagggttgaagtcatgtcataaccgcagttatctttcgcgcgtgaaaagcatcatgcgtgcgagagtcatgttaaatttttatgaggcaagcttaagcttctgcgagagaaggctgaaattgtataaaaattctagagatgactttgcttgtaaagatcaaagggtgaatacatcagtaggagtgagacagacttcaagctgtgcttccattccaggaaggagggttgaaaatgtgtcttacccccagtgatctttcacgcattaaaaacatcaggcattcgagagtcaggtttaatttttatgaggcaagcttcggcgtcggtgagagaaggctgaagttgcataaaaattcaagcaatgactttgctgaaaaagatcagagggtgaaagactcactaggagtgagatagacttcaagcagttcttcccttcaaggaaagagggttgaagatgtgtcgtacccctagtgatctttgatgtaagaaaaacatcgtgcacatgagagtcatgttgaatttttataaagcaagctccaacttttgtgagggaaggctatagttgcataaaaattcaagcgctgactttgcttgaaaagatcaaagggtgaatacatcactaggagtgagaaagacttcaagtagtccttccattttgggaaggattgttgaagacgtgtcgtacccccagtgatcttttttattaattgaatagggttaaagatgtgtcctttacacatcttttcttgactcttttgttgaagtatcttgtgactcggtgttggtatgcggcgttggtgatttgcgactcagatcgtttttccttaagtagatccaaggacaattttaatagttcctggttttcttcttgattataaaactctcttctgtgagtcgatatgttcactttaacaggcagcattgcttccgagccaaatgctagcgagaaaggagtgtgtcccgtggctgttttctcggtagttctgtgggcccagagcacctgaggtagctcgttaacccatctgcctttggcagtgtctaacttattcttgatagtatcctttagggttttattaacggcttccacttgtccatttgcatgaggcctggatactgacgagaagcttttgataattttattcctctcgcagaattaagtgaac

SEQ ID NO: 334992 - DNA, 828 bp, Cannabis indica
taataccacatatagttttacataaaaatattagatgaaatacaattcaatataatattatacaatacaatgcggtataatacgacgtaccaaacgaacctattcataaacatatataagatgaaaagagaacaaaaaagaaaaaatgcacggatgaacataatgtagattcaactgtaaaataatagatagttaggagtgaggccaagatgagatagtgagttgagaatcttgagatcgttaaaaaaaggaaaataaaagattagctatatgcttataaatgatataaatagattttagttaaataataaataaaaaaaataattggtttatgctagatatttttataaaaaaatctattaaaacaataataaaatatcaatttgtagatttatggtctaataaaatattaaaaattagagaattaaagagagaagagaaaaataatttttgagagattttatagtcatttgaaaccaatagcttcactcaatagcttcttaaacttagaaaccaaattttttcgtattgttgcatgcattagattttcctgtaggaaaaattgtataattgataaataattaaaaaaaaaagtaatagagggaaaatatgaataaaataataatcaccttctcatcaataaaaatcatatcaagacttatcaattctccctattttttttagtattaagagattctcatattctacaaactctaatctttatgcttcaactatctgtatcagtatttaagtcggtaagaaaagaacacttcatcatgagagaagaagaatataagagaagaagagagaaggtaagtagtaaattga

SEQ ID NO: 334993 - DNA, 656 bp, Cannabis indica
gcagctgaggatcaacaccactcaccaatccttgctcctatgagccagcttctcgagcaatacaaagatgtttttgagctaccaccggaactacctccacaatgccatcgggaccataccatcaccctgaagctagacatagggcccatatcgatgcattcttaccgatacgctcagattcaaaagggtgagattgataagatggtttgagagatgctccatattggcattgcttagcctagcactactgcattctgtagcccggttttattggtaaaaagagatgaatggcagttggcaattttgtgttaattatcgagctttaaatcgggcaaccgtggaagaaaaatttcccattcctgttattgatgagttacttgacgagcttcatggtgccaccatattttccaaactttatttgaagtctggatatcaacaaattcgtatggcacctagagatgtggaaaagacagttttttagactcatgaggggcaacaattcggcctcaccaatgtcccgtccccctttaaagctctcattaatgagctatttgcaatttttgaggtcattgtgtattggttttctttgatgatattcttgtgtacatcccctctttggcaactcatgcaactcatcttcgcttggttctcgaccg

SEQ ID NO: 334994 - DNA, 872 bp, Cannabis indica
atgctctggaaagaacatagcttttctccaaatgcaagtaaactctgttgtagattgtcatatcagtaaaaccccagttgaaagtcctaattactacagattcagttcaattaatctaaacagattattcccgtgaattaaacaaagagtaaatcaaagaacactgaatttacaagcttcctctgcattggaaacgcattccaaccgagtagtgcttgggttcccttgaaccgggtaaagtaacatccactataaaatcaattcaattacaattaccagttctgattcttcaaatcaaacaatgtaatctaaattgacttttatacaatgttacctaatacttgaacacactcaagtatcaagatctaatcaccaaaagatctctgtacacacgaactctgaacattcagacagctgaaccaccttcagcagagtgatctgaactctcttcagatcaggcagattcaatctccatcttcaacctcaggaagatcatcggaatttctatctgcacaaacatgaaacaaacacagaaaaatgttgccctagcagagcaagaatcaagaagaagattctaacagaagagagttagttagcacaacagtcctaacagaatttatatactaaagataataaacctgactaactaaccaaccagcaaagtacagctggcacaaactaacaaacttgcagaaagctgacatggcactaaaatgaaattagtgaaaacagatgcaactaactacagaaaagatgttagacaaacaaatactgatgcagaaatactgaacaaaagtattatctaatttcccacacaaaacatgacacttacaccagtgttctgataactctaggaatctttaatcacatag

SEQ ID NO: 334995 - DNA, 1105 bp, Cannabis indica
cgtccccctcacggtcctcctctagcaggacggccgaatcctgttccgcgtcgggcagagtggcaagccgagccacttgattatctgaagcatcgaccagatgcgtggttttctttgtaagagccatcatcctatggctaggtacaagatcaaaagagtttccttcgctagaaggaggactagcacgaagacgaggatgaccctcgtgtagaagttgaagcaaatcctagtcgatctatgcccgagttcccaagactcacctgggttcatctacaaaagacaatacacaagatgagtgttggacagagtatcaaacgagaaacaagcaactatgccgaccaggagtactcaacagattaaagaacgactatgtctaaagaaaaaactcaagaagtcagaacgttttcttgagttaggaaaaaagttcatgagcttagaataagcaagatggacgacagacacaatgcggttcaaaaacaagctctacgactgtaagctaacatgaagacatggtaaagaagagtcgcagaagtttctaaccctagggtttcctaagcattctttctacaccatagttgcattcaaagtgtaaacatgcaaagaaaagcataaagggaacagaaacttactcaaagattcaaatgtctgagttcaagcaagccagcaatcgtctgaaggcacttcggcaactttgaagccagaaaactctcttttcgctctggagtttacttaacaatgaagggtgataaaatgggttatgtgccagtactatgggtattgataggcaaaggggtaactgtatcaaaaagaacctcggacgcctcggcttcccgcctcaaaagcgaatatgggaaatcaaaagtaatcgagtgcaaccgtcagccgtggagagacaaaatctgatttcaaaatattaattgtcaaagcattaattagctgaaaattgaagggacgcccaatcagcttcacatcgagtctcgaacggtcatgctcgacacgtgtccccattcaaaggcagagccagctcagaataagtctacacacaacctcagaggtcccgtacagacttgctaggcaaatgttatcccaaagtttgcactctgac

SEQ ID NO: 334996 - DNA, 645 bp, Cannabis indica
gaatggtcaagtatggagaattttttcttcatatatgcttctgttaatctctataagcctcacgaatctcattcaacttttggtgatccaatatttttagattttttacttcaactcatcaagatataacatcgtgaataacaatttaatcaagaatataaaaaaaaaaatagaaatataatgagtcaagtgtataaataaaaaattataaaatgaattttatcaatataccatctaaaacacttggtttactctttttgggatactggattctttactatttgacaactatatctgtaagagtcaagaagtaacaataattgttaatccattaattaatgacaacattgataatgttgattcttgagtactaccatgacaaaaaaataaaaataaaaatttgtgataataaagggaaaaataattaaaaattataaataagatattagtacaaagaaaaaaagggaggtatgatgataatgaaaaatgaataagatcctataggcatagcaaatgtcacataattaaattagaagagaaaggaaaagtctctacagttagttaattaatattgaaaaatgaataaaaacatagcaaatgtcacatatcaaattggaagagaaaagaaaagtaataaactaatca

SEQ ID NO: 334997 - DNA, 440 bp, Cannabis indica
gacacactgggatgaatctctccatccgagatatattcttcgaggaaatccttcttccttctaacttcacattggtaggtccagatggaacatggaattttccagtggggtctgaggactcacgtgtctagggaagtgatgatttcttatcagcctttttgtccaggttgatcactggtgtagtggactcttctacccctaaattatctccttgcttatacagcatcttgtattcaatagaggttcgatcaccataaggtttttgaagttgaagagtttgattgatggtagccgttcttggagggataaactctaaagcctgtttagctcttttcagttcagctgaaagcttgtagatctcattgtccttctcatcaagaaaataaacacatataaagtttagaaaaccttacatagggtgcagcgaaatattatgactc

SEQ ID NO: 334998 - DNA, 912 bp, Cannabis indica
taagttacttcaatctatccttttttcctttctttccttcttcttctaatattattaatattaactaaggataagcttaataaaaggcagcttctaatacccactaaaagccaaaagaatacttggtaaaataaccaatttacccattcaattaaaaccaaagattaaacaacctaaggacaatttggtcatttcaaatcccgatataactctagattatatgaaatacgactctctaaaggcccaacatcgctttccacagcttccgaacacaatcacagaaattgagaaatttacataaataacataataaacatatacgaagtcaaataaattcccataatatgtatttctattaataataacaaaatctcatacataaaccctaattatttaataatccaaggtattaatcatatgcagtctttacaattatcccctcattaaaaagatttcgcccctgaaacctacctgacgaactctggatgctgaaccctcatatcagtctccagttcccaagtgtcttcttccactttactattcctccagagtactttaaccaacgctatggttttggttggaagaaccctcatatcatatgataggtcaggttgcaattccaatgtgtcataactcagaacttgcattggctcacacacgtactttctaagcatggaaacatgaaatacattatgcacagttaacagagatgggggtaaagctaaccaataagccacttgccccaccttttcaagtatttcaaaaggtctaataaatcaaggacttagttttcctttctttccaaaacgcctgattcccttcattggggacactcgtagaaagacatggtctttaggttggaacataacatcccgtcgcttgggatctgcataacttttctgcctgctttga

SEQ ID NO: 334999 - DNA, 449 bp, Cannabis indica
aataattttcataattaatcaaattaactgataatttccaaattaactaagcgggctttacatctgagccatattagaccaagcgggttaagggtctaatagcgatgtattttgaaactctattttgccgcttaggccggctgaaagaaaaagacttgtaataaagtttgtaaatattttttaggatcccaaatgttataaagtttaaattattacaagttttatttccattccgtttattacaaaagtttaaattctgtgctattttgattagtaataccgcttaggtgattagggtttcctaaataactcggctaacgtgcctaattatttagtgcgttacaggacccctatttttctatcgattagtgatttcgtcacgcaattagtgattcaggtacactaccccttacttgattacatactatgtgtcacgggacccctaaaca

SEQ ID NO: 335000 - DNA, 505 bp, Cannabis indica
ttttatgttggcatctctctttaattatatcaatgtgttttgtttatctatattagtgttaactatttgttttggtttgttaatatctttatctctctattacaaattaactattaatatatatcttttcgttgttaataataatggatgaaataaatgttggttggttgcaggaaatagacaaggcattcacgtgttgtgaaaattgcatgcctagaatatttcaacttcgtcggacaaagtcatctcatatctgaatcttatattttaatttcagcattactattagctagtactttttataagtcaagtcttgcttttttaattataccaataataatatgatacggaagagagcagtaggcactagtactaccttttagcaattttctactttatgtccaaaaaacacaattcagaactaaaatcaatcacaaaatcaaaacttgaacttaattgaaataagacaaagaaaacttaactcaataatgaatgaatggtagat

SEQ ID NO: 335001 - DNA, 681 bp, Cannabis indica
ctaaatataaaattcctaaaaacaataaataaaaacattagggattaagaaatccttacagtgatggtagcagaacaatatgactccttctgttccgatctctaacccttgatccaatctgttatagggtatgatcaagatctgaacctgaattcttcttttgatgacgattgaactacataatcttcctcactatgttgagtactgctttgatatgtgtgggcatattctcaacaacaaggagaaagaaatttttgttggattaaaaagcctattgtaggtagatatgtataaatatacatacatgctattataaagtgtgatgcaaaattaagtgaccaattatgttatgggtatcaaaaggatattaaattgtcatggaaataatgtgtagataccataagttaatttataatttgttaaggggtcaaattataaatactcaaaactcattctaagatgagtctataaataggtagtggtccccaaagaacactagggtttctgtattctctccttccccattagagaaaatactttagaaaatagtgtattcttagaagatcaaaccattctctacaatctccaacaatgactttaggttagtgcttccgctcatcttttatcatcatcttcttctttaatttaacaaatgttttatagatttatgatttagtgttt

SEQ ID NO: 335002 - DNA, 474 bp, Cannabis indica
ggaatctttgtttcccaaagaccttctgcactacaagtgttagaagaccttggatacctaggaagtaagcctatgattacaccaatggaagccaatctcaaacttggccaagatgagaaagaaaaactggctgatcaaacactgtatagaaggattgttggaaaactttagtacctaacaatcactagagcagatatttcatactcaatgaataagctgactcagtttctatccacacctctagtcacacatatgcatgcaactcaaaaggttctacagtatgtcaagagttgcccttgacaaggaattcttttttgttgcaaacacaaaagttaaattacatgcctacactgactcagattgggcagcatgcccagatacaagaagatagaccattggtttctgtatttttgttggatctgttggaatttattttaccaggatcttagatctactcataagtatgttgattaa

SEQ ID NO: 335003 - DNA, 786 bp, Cannabis indica
ttataaatcaaataaacaaatatttgataaggtgaaccaaaacatatacaaatgaatgaaaaatacttctgtttcattattgatattgaataaaatagattacaattaaatggagttttatttagggcataaaacccaacagtttcttccctaaaaagacatattttcccctttttgatgaagacaaaaaagatgtgaaattcggaccattaatctgatacttggaaggcgctcagattaacaaattgtcaacttgggtgctgaggtggtcaacgccccggcccccgagtgctcaaaaatgaacttactctgattttgactatgatgcctaaaatatgtttgtggtatgtctagtttatgtctaaagcaagttttgatccatttgcactaagacagtctcgaaaactgaaaccctaggtagatgccatgttggcttccaagttgcaacttcgtgtaatttcaactcttggggcttggattaggttgctccatgtcttagggccgacaaaataggtcaaacacgataacatgtctcgaaactcgcatgagagttagcgggtttggatttgccttaaatgggtacggatcgtgttcgggttggctcgtctaacccatttaagaaacggtcgtgttcgggttgacacggctaacacgaaactgactcgttaatgacctatttaaagttattttaatactttaactgttgggttttatgccctaaataaaactcatttcaatataatcagatttgtttattaatatagatcagaaataacatttaatgtt

SEQ ID NO: 335004 - DNA, 785 bp, Cannabis indica
atacccaaacccaaacctgggacaagatccaatacccgaacctagaaccgaactcagacttggaccctgatagggattcgaaaaacccttatttggacgaggactgagactcggaccctgaccccaacttggacctagacccgaacccggaacaaaacccagacctaaaatcaaaactggaactgtgactaggacccggacctgagaccagaaccgaacccaaaacataacccaaacttagaccaaaacctggaccaagaccttgactaggactgggacctgagacctgggacaggaacctaaaccgggacccgtactaggacctggacttgaccttgtcctaaaccctccccgggacctgagacccgcgacccagatcaggatccagaccctgataaggacccaaacctgaaaccagaccaaggataggaccgagacctggacccgaacccggactaggacctggactaaaaccaagactcgggacccgaacacgaacctggacctagaccaggcgctaggaaatggacttggatgggggacctagaccagggacctaggccctggaacccagacccagatctaaaccggtactcaaacccgaactaggacctgacctagacccaggaatctgaagtcggacctagacctagacctgaaaccttcctcagacccaaacaaggataggaacctggacacgaacccatacaaggacaaaacccgaacgcaaactcgaattaaaatcgaacctgaactcgggaaccgaactcagacccagacccaaa

SEQ ID NO: 335005 - DNA, 1625 bp, Cannabis indica
acccctgccctttacactcccccaaatggtgcattttacaattagggcactccgggtaagtgtatcgggtttcgatgccactctgacgattgcctctaccctggttccccctgaacctcttgttctgacccgagccactagttgcagtagatgcctttcttttctaatctatggccgagccactacctcctctgctgctaaaacctgatgtcggaggggtaagagcctcgccaacaaccagagtcccacgagactctactatacatcccactaaaccctcagctcgcagtgccttatccaccattttagcaagtactatcgtcagtagtgatcatcaggtcatgtctgatctttgcatttaacccatccaagtatttctctttcttactgaagtcagttggcacaattcccgaggccaacctcactaaatggtcaaattgcgttgtgtactcagtaacactcatatttttttctgagtcaattgggtgaactgttttctcttagcacttctgactgcttcattgtaatacttagcattgaacagttcctggaacttttcccaggtcatagttgtcacatcatgaatcacggacaccatatcccaaaagaccagagcatcttcttcaaattgaaaagtggcacaggccaccctatcattactagtgacgcccataaaattcaagattttagtaatcactgttagccattgctcggctttcatgacatcaggacctcctaaaaaaactagaggtgcttgcttgcggagcctttcatacagaggttccatccgattcactgccaccactggttcggcctgggcagcaggggcaggtgccattgggatttctggagcacgcactgcaggactgccctgctgtctcaaccgtcgaatctcatcatcttgttcactgattctggcttgcatcgctgcaaacctattttcccaactttgggcatcctgtggcgggttaatatcaccccggccacgtgccctgcccctcggacatctacctctgccacggatattaaggggaatctgagctacctgaccaccactagatccaaccgaattaccctggctcctggtactttgcctgacatccatactaatttagaacagcctgcgtaactaagagctagtttggtcagatcgtgatcaaagagcaacttattaatgccacttattttgaaattaaaaacatgcgcctattttactatcacgctgtgaacatgcttcctaataggcttttcttaaatcatactattaaataaactactaaagcaataagagattactgaatcgtgaaacgagctgactattgatgatgattgtacatgtcgtgacgatcttcgaaagacaacctggtggctctgataccaaattgtaacaccgtaactagcataggcgtgttagcgtgattttaaccgtactgtgcagctcgttgctaatcaacgaggttaatgaaaaacgtgattaattaaaaatttccttatttaattagaaacttaaagtattacatatataaaattctaggatcctacaaaatactttttaaaagttcgatatacacataaacaaaagtttgtcgcccagcgactatgcagcaaaagcctcgatgtcccaa

SEQ ID NO: 335006 - DNA, 1136 bp, Cannabis indica
aaatagaaaataacactaaaactaattaaaattaagcaaataaacacattttcactactcttctcacaatactttagtttaaaagcataaaaaatatctctataccatagagttatcaaatatcaagaagacaaaggagtatagtggttcagtcagatcaccgtctgcttagtccactgttgcaagagtttcgtaggtctcatttcatggtggatcactcctttatagacaaagcaagtgtccagttagttacacaaggattgcattcattgtcaatccgtttatacattgatttacagtaattaaactaaaaacggtaacgtcaataaatgaacaacattttctattcactaaatacaacaacatatgcgacttctaatgttcgagttcgttgttcatattctggtgtaagctcgcaggcttaggatatattggtttatcgagttggctgttcatattcttatagaacctagacttgcgagtctatattggtttatcgaggttgttgggtcatcgagaccagctcgcatcatagagattcgatctctaagttttcacaagaggattgagaggatactcacacatatcctggtacatacgagttaaatttgttccttggtcctacataatgtgaatcatacgaatgcgattagacttggtcatattcgcatcatctcgctgattctagctcaggaaaggtttaaacttgaggagtctctcatggacatctcaacttttcttgggaaaattgagtacatgtgtcctctaaagaggagtctggtctcgagtttctaggttaaagaaatctcactataacacatagtataatgtatttgttgtatcttatatgatcaacaattttaactcttccgacatggataagctagaagcagaattgcaagctcatgaatggaatttgattgcaatgccgccccccagttttgcaaacttttgtcaaaggaaaagaatgaagaatgaagcttctaacaatggtgcttcttcaagtacaattgatagtcatactcttcaatgttcaaattataatgagaagggacatcaggaagaacaatgtcccagacttctaaacaatttgaacgaaggtaatgcttttgtctttgaatcatgtgttttagaga

SEQ ID NO: 335007 - DNA, 1253 bp, Cannabis indica
gaagaaagatgggtctctaagaatgtgcatcgactatcgggagttaaataagctaacaatcaagataaatatcctttacctaggatcgatgatctttttgatcacttcaggggaatacggtcttttcaaagaatgatctctaatcgggctatcatcagttgagaatgatctttttaaataagatgtgtttatcgatgatatccttgtgtattctcaatcagaagaggagcataagctacatctccgaatggttctgcaacggactcgagaacacaagctttatgccaagttcaaaaagtgtgaatttgggttgtctcaggtgtcctttctagggcacattgttagcaaggatgggatcaaggtggatccaggaaagatagaatccgtcagggattggccaagaccgaaaacagtggccgaaatcagaagtttcttgggtctagccggttattatcgtcagtttgtagaaggattttgctaaaatctcaacacccttaaccgagctcaccaaaaagaatcagcgttttgtatggtcagacaagtgtgaagctagttttcgtgagctgaagcagaggttgattacagctccagtgttagctttgccttccgacaaagaaaagttcgtggtttattgtgatgcctctcgtcagttaaaagattatgagcagtgatatccgactcatgacctagaattggccgcagtagtgttcgctttaataagttggcggcattatctttatggagaaaaaaagtgaaatttataccgaccataaaagtctcaaatatttctttactcagaaagatttgaatatgagatagaggcgttggttggagttagtcaaggattacaattatgagatcctttgtcatcctgggaaggccaatgtagtggtcgatgccctgagcaagaagggtcccgggcaggtaactagtatgattcagatctcacctcagttagcagaggacatggtcaggtctagcattgagtttgttgtaggcaagcttcacaacttgacgctacaatctgatctgctagaacgaattaaagtcgctcaagtgaccgatcctgaattagtaaagatcagagaagaggtttcagctggtcaagccagagattttacggtgtcagacagtgagattttattatttaaagccagggtttgtgtttcaaatagtgtggaacatagaaacgaaattctcaaggaggctcataccactccatattccctatatcccggcaccaccaagatgta

SEQ ID NO: 335008 - DNA, 638 bp, Cannabis indica
tatccttattggaaggtcaggatgagagcattcatcaaatcgcaagatgagaaggcatggagagctattcttacagggaatattaaaatacggaatttcagaatatttaagtcttattgtaagccagaatgaggatagcacttgctgtaaaacgagatcattaaaaataatcttgaaatacaacataaagctagtgcgacctgagaaaataacaactcacgtatcaagcaaatgttattgacgaaacctttaaaagtcggttttgataaataatatttaagctaagtgtggataaatgattaactttatgattattattgatcccaaatgttaaaataaccaaggaattggttgtctaaaatatttaagttcattttcatttgatgaactaaagagtcttgaatctcaagaaagcattaatgttatataaccataaaactaagactgcttttagaaaatgatttgtaattgatttaattcaaactcaattaaaatttctcattgaaaaaccgtgtttttaaaaatgtcaattatatataagaaaatataaaaactgtaagcgtctgcagaagcagaaagtaattctgctactgcagaaactcgttttgcagtgacagaacaaaacaggcagaatataa

SEQ ID NO: 335009 - DNA, 1054 bp, Cannabis indica
aaactagattcttactcgccctcgagtaagataaagaaaataaatactactaactactaatttattaactacgctatcagataatcacaatactactgcctcatgttctgttttcttccattgctcaaactagaatttcaattccactaactctaacaattaatttagatgctcagtttgtcacatactgcataaacacaagatgacttcacaatcgaaacaatgttataatggttttactctttccaaccattccactacccgataactcatatgcttgcatgcttacctctctccactaatgttgacaacatcctttcagaatcaatagggctttttgaggtttataaagtatggcttagatatttggaaaatgaaaaacaattttggctaaagatatcataagcacaaaaataacccacaagcttcttctaatttcaaatttcccaaagtgttcccacaactaaccatgattgagaaaaattattttctttcctttttctcaacatcactaaatttcttaatatttccttttttttaatcatgtttttttcttcttttttttcaatatttttcatcttttttttccagtgatattgatcttaccacatatctatttttttctcaatcttgcaagttttttttctatcttctctcacaccatgcatttttcttccccaaactaattatatagattatgatatcattgataaaatagttaggacaaaattaacagtgtggatacatatttcggttcaacaagtgaagaacaaaacaagtttaggctcaagagggttaactaaggataatcatttcatggtaggcttgaaaggttcaaactatccaacaaatgcctaaatcatattcctattgaatgttgtcaaggatttcgcctcaaaagaataagacatgcaagttctaagctatccagtcaatcttacgacaaaccatagtaaaataattataacatatttcacagatcctcaaattacattcttacacacgttatacaagcatccaaactaatccaaagagttaacagaattaagcacac

SEQ ID NO: 335010 - DNA, 659 bp, Cannabis indica
cacccctatcagatcaaaagatctttttattaaacaattttttaataattgtttttagaattaacaattattcataaacatagaaataatttctagtatttatgtagtaataactctataaagagttaaagatacaatagaatttgtatcgttaataaaaacacatacacatacaaacatataaatataataattggtaattgttatataagataaagtagatgaagctcaactcataaattacaatttgttttgaaaaaaaactttattataaaatcgtaaaaaaatgtttgcaacataatgagaaaagaatagggaataaaatcccaaactaataattgaaatccaaattgttctaaaactgaaacaattaattcaaaaattaaataaacgagcttcatctttatcttggaccaactccacccctttgtccagctttctgattcaactagctaaagatagcacctgagttcaagcagcttgggctgtaataagaagaaaaacaaataaacaaggttagtagtccagaattaataatccaaatggataataattcactaaaactcatcagtttataggaaaaaagaaataccttgtatctttgcaagaagtttaggacattgaggtttccaatggcctttctcattgcagtagaaaca

SEQ ID NO: 335011 - DNA, 703 bp, Cannabis indica
agaagagcccaaattagggctgccttctcttccatcagcccaccaatgcgggtcccacggtgccacgtcatcgccaaatggcgccgctcaaactctcccattcgccccgtcagcacccatgtggtgcttgtttcttctccagtcgtgcgccacatggcaccatgggattggttcctccattctctcctttctcttcagcccatgtgggcctgccatgcagctgctcctctatgccttccacgccaaagcccatactccatctgcattgaaacatcaatcacaaaattaaatcttccaaagattcatcaattaacaacaaagacaacaacaataataataataatatataataataggaaatattaacttcaaaatctatcagattttattattattattattattattattatttcttttgtaacctaaaattattagtattttgcattttagtccattttaagactctataaataggagtccacttttattgttttagagtgtaattggtagtgtaatttttagtgtagaaaaactatagcaaaattctctcaacttttcttctcatcttttctctttagaaattttatgagaatgattagcataatggcctaatcttccttggaaggttagggatgattccatatgcaaagtgaggttattttgtatctttgattcactttttgttgtaatgtttatttga

SEQ ID NO: 335012 - DNA, 1087 bp, Cannabis indica
aatatgagacaaagacgttggctagagttggtgaaggattatgattgtgagatcctttatcaccctggtaaggccaacatagttgttgatggctccagtagaaagggtcagagtcagttaagtaccgtgaagcaaatctcccaacagctagcaaatgagatgacccgagctaagattgagttggttgtggggcagttggctaatattaccctccaatctactcttttagagtgaatcaaagaagtaaaaatgtaagatccagaattggtgaaaacccgagctagggtttcagctgggaaggctagtgatttctcagtggatgaaacgagaatgttacaatttgggaatcatgtttgtgtgcctatgggtgagagtatcaaaagagagatcatgaatgagtctcatacgactccttactcagttcatccagggtcaacaaagatgtatcaagacctgaaagccatgtttcggttgccaggcatgaagaatgacattgctgagtatgttacaaagtgccttaagtgtgaacaagttaaggcagaacatcaacggcttgtagggttataggaaccactgaacataccagagtggaaatgagaagatattgctaggacttcgtggtaggtgcgcctagaaccacgggacagtttgactctataggggtcatagtggacaggtttacaaagtcagcccacttcttacttgttcggacgaatttttcccttgactagtatgctgagttatatgtcagagaaattgttcgtcttcatggtgtcccaaggtccattgtttcggatagagatccgaagtttacatcaagattctgggagattctgcatcgagctatgggtactcagttaaagttcagcacaacattccatcctcagacgaatgggaaatccgagaggacaatatagattttagaagacatgctacgggcatgtgtgcttgattttcaaggatcatgggtaaagtaccttcccctgattgagttctcttataagaacagctaccaggcaacaattggtatggccccatacgaacttttgtatggaagaaaatgttggaagttattttaccaggaact

SEQ ID NO: 335013 - DNA, 497 bp, Cannabis indica
ctttggaagctaagtgttcctctgaaagtgaaagacttgttatggcgtgctgccactaactgtctgcctgtgaaatccagacttcgttctagacatgtgcctattgataccatttgccctgtgtgcaaagtaattgatgaaaccatctaccattgcttggtggattgctcttttgccaaagcgtgttggcaacagttggctgctggtgttaatttaacggtagttggttcttttgctaactggtttgctacggttctacagcaggcggatggggagaaaaggaggttgatcgcaatgacatgttgggcaattcagaaacattgaaatgagctagtatggtctgataagtcccatactgttgcaagtgttgctcacttagctcaagctttactcgcagattggactcgggatcaagattcaacttacggctgcagtccttactgatgtcgatggtgctgaaacttgggccaaaccagtgttaggttttgtgccctaaa

SEQ ID NO: 335014 - DNA, 891 bp, Cannabis indica
tagtttaattaacctattacagttattacaaatcaggcaaagtgggccttcacaagttgggttgttcatgtgagggagggctgagttcagtatgtcgtacccactactaatcggccccctaagtctcacataacggacccaaaagagaggaatttaaccttaatttaaataattgttattaattgaataggcccattactaattgggcctaaataaaatctatcaagtgtgattattttatttagcaacctagttcattttaattacaaaaattaaatgggctccttatattcatctaagcccaaagcaaacatataggctcacacaggcacactaatttagatggatcttatcatgttgctaagtttatacacagatgaaagaatattgcaaaatttacttgttacaaattatttatttgacctattgacaattgaaccatttgttaaaatcagatcattggatctttcaacaagttaaccatgacaattaagatcaaacaataataggttttataaaaacaagtttaataattaaacaatataaaacacacctgcaaaaaatttgatagttggatataggatttatttaatttaaattaattaaataattaaataattttcgaaaaatctaaataatagaaaattattttcgaaaattataaaattaaattaaataattaatttcaaaattaaaccgataaatttgaaaaattaggtttccaacaaacctaaatatctattcaaaaatatgctaattaacaacttttcaaatttcatgttattttaaaataaatttaaattaaattaaatatccaataaaataaaatgactaataaataccatttatctaattttataatctaatttaaataaaataacaaaatttgaa

SEQ ID NO: 335015 - DNA, 980 bp, Cannabis indica
ttttgctgatgggcttttaagtttgttgtggctcgcttttcttcaatttcatcaagtgattctgcaaggagtacattattggcctcttggaattatgtcaatcttctgtgggatagtggctcgagttctacgggcagaatagcttcatatccatacgccgtggccaatggagtctgtttggttactgttctttcagttgttcggtacgaccatagaacatcaggaagttcctctcgccaatttcctttgccgtcctcaagtctcttctttaaggtatccttcaatgtcttgttgattgcttcaacttgaccatttgcttggggaagcgccacaacggagaaatttttgatgataccatggttcgtacagaaatcgataaaggattggctgtcaaactgcttgccgttgtttgagactattttatacggcaatccgaaccagcaaattatgttcttcacaatgatgtcttgcaattttttgtacgtgatggttgctaatggctcggcttctatcaacttggtgaagtaattaatcgcaaccactgcatactgtacgccacctttgccccttgggtaatggtccgattaagtcgattccccaaatggcgaaaggccaagaactttgcatctgagtaaactcgttgggcagtgcccgaggtatcttcaaaaatctctggcatttatcacattttttaacataggcctcggaatcttctatcattgtcggccaaaaataaccttgccttagaattttctttgataaactctgcacgacagcatggttgccacaaaatccatcatgtactttagaaaaaagtcgtccagcttcttattgtgtaacacacctaagcaatgccttggagaatcctcgtctatacataactccctctattatgatgtaccgtgcaaccttccttctcagtttttgagctttgtttctattatttgggagttttccattgttgaggtaggctgctattg

SEQ ID NO: 335016 - DNA, 557 bp, Cannabis indica
tttaacatattacatgcattacaatcagaattcagattgcaaaagccatctcaaaatcatgcataaacatggcacatcaagctctttgaacaagagcatcatcttcaactactcaaactattttccagcaattaaacaccctagaaacacatggatccaagctaaaaacataccataaaatctcagccaaagttcaatttcaatacaaagcatcaaacatacaaaggtttattcaagaacatactcaaattaatctcaagaacacaacatgcaattaaaagaccaaatcatccttttccaagctttttccaacataagtttcagcaactaaacaagattaaaaatcataaaaagctaccttgatccacaataaagcaagagcaatggtctttcctccaaactcaagccaaaagcaagctttttccctcaacaatttaagctttaatttgacaaatcaagttgaaaatatcaaaaggggaagagagggtgagagggttcgggtgagaggatgaacaaaccagaaaatcaatccttttttcctcaaaaatcacttttaa

SEQ ID NO: 335017 - DNA, 943 bp, Cannabis indica
gagtttgacattatactcggaatggatttcttttctaaataccctgccagtatcgattgcaaacaaaaaatagtgacttttcaactagagaacgaagaaccatttgttcatgttagaacagttcaaggttctcgtgtcccaagaattttggctctgaaggctatggatttactacgcagtggatgtgtaggatttctagcgattgtgattgattctaataagcccgtgatactcgaaccagaggaagtcagaatggttaaggaaatcttggatgtgtttcctgaggaattaccagggttaccaccacaaggggaaatagatttcattatggacttggtacctggggcaaaacctgtttcaaaagcaccctatcgaatggctctggcagaacttaaggagttgaagatacaacttcaagtctaaggtttacccgacccagtgtatcgccctggggagctccaattttgtttgtgaaaaagaaagatgggactcttcggatgtgcatcgactatcgggagttgaacaagttaaccattaaaaacaagtatcctttacctagaattgatgacctgcttggtcaacttcaaggtaagacagttttctccaagatttatttgtgatcaggctatcatcaactaagaatccgagaagaagatattacaaagacaactttctaaagtatgtacggtcattatgagttcctagtgatgtcgttcgaattaacaaatgctccagcagctttcatggatctcatgaacagagtattcaaggatttcttcgataactttgtaattgtgtttatcgatgatatacttgtgtaccatcggtcagaagcagaacatgaacaacatcttcgtatggttctgcaacgacttagggatcataaactttatgcaaaattcataaagtatgaattctggctgtcacaggtgtcttttctggg

SEQ ID NO: 335018 - DNA, 600 bp, Cannabis indica
aaacatcaaagtataagaataacaatgaacatgactagctaatattatttaaaatgtaattcttgttcattattccctgtagagaatgacagaaattgaatttatttaattttaaagagtgttcatatattttatattagttatgttattatacattgttattacttataaagtttatattagaaattattgcatgtaacatatatcaaagatcaaattttgtatacatcttgaagattatgaaaaaactatattcatatattctttgaaatattgtgaaagaaattgctgaataatttcttacatttttatagatgaattaacaagtttttaagaaatttataataaggtacaatttgttcaatgtcattccccaaagtgaatgaaataattttaaataatcaataaaataatttactactcaaatatttctagaagaaattagaaacaagaagatgaaataccacaacacaatcaaagtagcatgaaatctatatatcatgtgtgggaattaaataataatggtcacgtacatgtagaaaggggcatgcttataatcaaggtaaaattatatttgactattgaatagaatgtgaattg

SEQ ID NO: 335019 - DNA, 814 bp, Cannabis indica
aaaaaccaaagaagtgcaaagcataactggtcggatcgccgcactcaacacattcgtttcaaaatcaataaacaagtgtgtcccattcttcaacatcctacgagggaacaagcagtttgagtggacagaagagtgtgaaaaagctttccaagagctaaaggcacaatttgctaaaccttgcgtactttcaaaacctctagacggtgaggaactgggaatatacttagctgtcacagaacatgccgtgagtgtcgtactaatcatagaagaaaacaacgtacagcacccagtctattacatcagtaaaagactcattgaggccgacggccgatatctgatgatagaaaaactcgcctactgcctcattttagcaacaaggaagttgaggccttatttccaagctcatcctgttcgagtatataccgaccaaccactaggacaaatactgcaaaagctagatgcttctagacggttactcaagtgggcggtagagttgggtcattacgaaatcactttccaaccccaaacagcaatcaaaggccaagccctagcagactttgtggtagaaggcacaggcaaaaaagaaagcaaccccgaaccgatacaaatacctcagcccagtgaaaatgaagaaaactgacttggaagctacatatggatgggttggctacaggtcaactatctggtgcagggattgcccttgtcacgcctggggggcaacacctgcacgctacagtcaagttcatattcaaagcatctaacaatgaagccgagtacgaagctctaatcgctgggttaaaactagcccgggaga

SEQ ID NO: 335020 - DNA, 1046 bp, Cannabis indica
actataggatagcattaagggaaagagaatgtatatatatatatgatcttggcagtaatggtgttggcccttaatgaaacaaagtaaattttgaaacaagggatttaaagagaagtgacttcggcagaatattatttgagtgagagagagagagagagagaatgatatctagttttggctttttgtgagaagatatgtgagtgatagcttctatttataggcctttactaaccttacccagccgtagtactcaaggttaaaataaaaaaatattcaaatactcaactaaaaagccatgactttctcttattactcggtcaaatttgttagataatgagagaagctctactatgcaacctgaaatagttttagttggtcttagttgttttattaatatgaccctatttctcatagacatccacgtggtgacttctcagctagaatctctccattctatcccatcatttaccccactcactgccacatgtccatgcttataaacattaacttaattaatatctaaaaattgtattcattgcacttggttctacgtgccataaaaggcttacaccatatcactactataatttctaatttcatcataaaatgatacactggcatatatcatttactaactatcacttgattaaataataataataataattataatcatgcatgggcttatcatccatgccttggccgaatttacatggcccaagacattatactataccatttatactcataaatccaattactttaacttaaattctcattatattttattttgggcttctaatttactaatactcttttaaaattaatacaatctcttatccatttctaacaagattaaaaaataataataataataatatattctttacaatttagtatttccacatcgagatatttagactagcataaaaaaataatacctgaatattttggttattacatcatattaggatgttaatgaaacgtacatggtagtaaatctagatctaggtaaaatatttctaacaactggcaccagagccatg

SEQ ID NO: 335021 - DNA, 636 bp, Cannabis indica
ggttctcagattctaggttttctcagagcttgtggtccgttcaaatgataagtcgaaagatccttggggactcattggctcttttccaggacaataagtggtttcttggtgaggattattttcttctttatcagccataaagaggattattattttttatgtaaggatttttttgcttttttcacgaaggatctcaatgaaagcaccgaactgttaacgcagatttttgttaactggatatgagccttaacgatgataagtttgcatagaaaaaaaaatagtaaagaaaaaattatgaacacaaaggtttttaacgtggttttccagttaaaattctacatagtccacgagtcaatcttattagatttgtaataccattctagggcttttttctcttatgatttttgtgtccctttttcagtctaacttgcctctatttataattacatagtcacgcagttaatttcagagttgactgatatctttacaacaataatcccctaaaatcgtggggtttgattacatatcccgtaaaataaatacggttaatatttgaatatcacatagctgtgattagtctgtttttaatgggttaaagtaaacgtgtattgaacatgttataaatcataatattct

SEQ ID NO: 335022 - DNA, 767 bp, Cannabis indica
tctaaccttggaagggagttgtcctggactactgcttccttttaattttagcttctttctttgtgagattttttgttcatgtcttttgttttgggtgttgtatgaatttttaggtctctgctttcactcaagactaaggcctcaaatgttttatcaggtctatttaaacaagaatctaaccttggaagggagttgtcttggactagtgtttccttttaactttagcttctgtctttgtaagatatttcgttcatatcttttgtttggggtgttcaatgaattttcaggactcttctttcactcaagaatattttaaaacattgatgctactaaaaggcttcaaattttttaactggtctatttactcaacaatattttgggtgagatttttcctggactagtgtttccttttaactttagctttggtctgtgagatttttgattcatttctttagttttgggtgttcaatggattttcaggactcttcttttactcaagaataatttgaaacgtggacgcgactaagatttgtcctggactagtgtttcctttctttagctctggctttgtgagatttttggttcatttcttttgttttgggtgttcagtgaattttcaggactcctttcactcaagtatactttaaatcatggatgcttttatcatcatgctgcaagtcgtaatattcctctgcttcttgattctcatcactacttgctagacatgttccataaccttttcatctcttggtattgcaaggctgggt

SEQ ID NO: 335023 - DNA, 743 bp, Cannabis indica
ttgtacacacagtggaaagtaatcaagattgttggatgaaatgtattgctatggtttattagtacatagagtttaactgataggataatctacaatttagtttacttgcaccttggataagtgttatgtactttccagtgcattagttaaagtaagcttggattcgatgtatggagtgaaacaccctaactagcataggcgtgtcagcgtgattttaaacgtactgtgcggctcgttgctaatcaacgaggttattgaaaaacgtgaataattaaaatttgcttatttaattacaaacttagagtattacatatacataatttcgggatcccgtttacaaaatactttttaaaagtttgttatacacgtaaacaaaagtttgtcgcccatcgactatacagcaaaagcctcgatgtcccaaagatcgtacgctctaggcctacccgccccaacatgtacaatcttcacctgctcttcctcacggcttctcagctttagcgttgcccttacctacacatgaagatagcactatgagtcgacagactcagtaagaaaagcataacatttaacatacaaataacccgtgttataacctggcgcccatgcacctgatcataaccctaatccccatgtcccacacggtactgagtctagaacgctcatacaacaatactatcgaccataatgtgagcctatactcaatattctagtcatactcttgccatattgatgtgacaacatcg

SEQ ID NO: 335024 - DNA, 1000 bp, Cannabis indica
agatttcgagcttcatcttcaatcttggacaatctccacctttttgtcccaccattcgactcaactcgctaggatagcaatccaagtttaagcaactggagctgaaataagaagaaaacaaacatggttagtagatttagaattaataacccaaggggataataattctctaaaacacatgagtttatagcatagatagaaataccttgtttctttgccaaaaacttaggctactggagtttccagtggcccttttcgcggcaatagaagcactttcctttttgctttgcattaggattagtagcctttttctttttagctattttaaccactttaagaggcttcttgctattcttccaattcttcttgttaatgggtctcgaagtagaggcaatgtttgcctcagccttgcccgtaccattagcagtgctagaactaggagtttagttcctgctttctgtgctcctccaatttaattttcaaatgtttgaaggttgttgattaacttgtgaatgttaagctccaacttgttcatgacataatttgatgtaaagggcaaaaaagctggagtcaaactattcaagatcaaactcacttgagttgtttgatctattatagctccatgattctcagcctcttggaaataactagtcatttggagcaggtgatcacgcacgttctgataaggtttcatccgttctttgatgaaattcttgctcacctcaaagcgggcttgaattgacgctatcccaaccagttcagttaactggttcatgatttctgcagtagcgcgtgagagtattggcaaaccttattttcaaggtgtcaaccatgctagacagcataaagtttcaagctttgttgttatcattctgccaacgctcgaacttttccttgacttccttggtcgcattctcacctggctgctcaggagcctcttcagtcaacagaaacagggaattttcaccaatgagagcaatattaatgttctctctccatt

SEQ ID NO: 335025 - DNA, 703 bp, Cannabis indica
atctagatcttggtctcgggtcccggccttgttcgagttcgggtctcgggtctcgggctgggtcttaggtccgggtctagggtcgggtccagggtcaggtcccagtagtcaagtcctaggtgatgggtctaggatcacgttttgggtcttggtcctgtttccagggcccaattctcgggtctacgtcccccatctacgttcggaacgttggtcccggtattggtccaggttcgggttcggggcccaagttccgggtctgggtctccgatctaggtctgaatcctaggtcccattcccagttctggggcccaagtccctgtcactgttccaggttctggtcccagttttagattgggtttggatcctagtccaatttctagtctaggattgggttcgggtctttttcctggtcttggtcctggtcctggtctagttgtggttcctgttgtgattttgggttggggttcgggtctaggtccaggtcgaggttcaagttctggtcttagttcgggtcctggttcggatcccaatctgggtccgactcttgttttgggttttggttcgcgtcggagtctcgggtttcgatcccaatctgggttacggtttggttccaagttcgagtcccaggatccgatcccagtcaagattcgattttgggttcgggtctggttataggtttaggtccgcgtttaggtcttgttcc

SEQ ID NO: 335026 - DNA, 641 bp, Cannabis indica
cgattttgggttcgggtctggttctaggtttaggtccgcgtttaggtcttgttccaagtttgggtctgggtctaggtttggtcccagttcaggtccgggtttcgatcctgatttgggtacgaggtggggtccgagtctaggttttggtcccgatttgggtccgcggccgggtctaggtcctagtcccggtcccattctaagatctcgatatagttccggttcaggttctggttttgagtctcgagtgtgggtgtgggtccaggtatgggtcagggtcctagtttgagtttgggtttgggttcaggtcctggttcaagtcccaaatctagagaccgactacgggtcgggtataagcctcgagtctcaaatcccgagtgtagatcctattcccagtatggatcccgggtcccgagctgggtcctaagtctgggtttggatctgtgtttaggtcctggatcccaaccgtagttccgaggctcaggtttttatcctagttcaggggcctaagtctcgggtccaggtcccttatctatgtttgggtcctaggtctcggtctgggtccaagttcgggttcgggttcggatcccgggccctggtctgggttcgggagccatcaataacataatggtaaaatatcaaca

SEQ ID NO: 335027 - DNA, 593 bp, Cannabis indica
aaagagttttatttagggcataaaacccaacagaaattgcgtacctttccagactcttaggacactctgacagtagaacagcgcatgtgacaccgattcttcatggtttccacaacggctacaacccggggattggatgattttcctaaaagctaggttttttacggtggggagggtttggtttgtggcacggaaagcaaagtgtttcaccttggcaggaatcgaaagatgccaaaggattttccaccaaggcgagggagaggaggaagagggaatgtcaagagagccagtagaagaaaaactgaggtgatagcctgatttgactgtgaaaatcccagaagttgaaggttcccagatcagatcatcctgggttggggtaagagggagaggaatagaaaggataatttgggccacatggggaggaaaacaacgctgaatctcagctgtatcccaggataaagagggggtgatgagagaggcaactttgtcagggacatgggataatggggaaatttgtcgacaacccggaatccaataatctgtagtggtgcaagtgttctgtccattgccaattttggagatgaggcctttgc

SEQ ID NO: 335028 - DNA, 843 bp, Cannabis indica
cccctaattattttttcaattcagcctactttgcaggtgccatgcagtaaggcgcaatagaaactggttgagctccaagaattaaatcaatgcaaaacttgatctccctatcaggtggtaactctggtaaaccctctggaaataaatatggaaaaccactaaccactgatatccaagggaactgtctaaatccctagactcatcctcgatcgcaaacagatacccataacactctaagtttctctttccacctaagcatgctcttaagataggattttatctcataacactcatgttggctcagtgaataatgaaatcgccactaggggttaaaagagagtcactcttttgtgtgaacaatccacaatagcttggtgtttagacaaccagtccataccaagaattacatcaaattaccccataggcaacactaataaatttctagacatcttgtgtccctcaaacacaatacaaactgacctacatatggtggatacctcaccgtgtcctcccataagtacactcaaatacaacacaggactaaaagtttcccaacttaaacccaacatactagcaaaaatcaatgatataagagaatgtgatgcactagtatcaaacaacacatgagcccaagagtgtgagataagaaccataccatcaataactccctggtctgcactaccctgtacatcatcaaccccaagagcataggcttgaactgatgactttgcttttatgtttccctttctttaactaggatggcttgtaattgcaccaaaccctccaccttgattgtaccctctttgactcccactaggagtaggagtttggaaaccttgtgag

SEQ ID NO: 335029 - DNA, 657 bp, Cannabis indica
ctcatctgtccattgatctgccatcgctcatatttgaaaggatacttgaagcctcagaaactactggcactcgtaacaagctaccatttccaagtcttgttcaacgagttcttatggatgctcaccctcctcttacaacgcatgactatcaagttcaaaatcctgttctcagtaagagctttctctctgtggtcaataggaagccctcatcaaccactccctctgtatcaaaagtgagtaaaggcaagtctcctatgttcaaagggctttcggattccagctggcaggtacaaatgttttctgactttcaatcttttgccaaatgttataagaaggatcaaaagcgtcagcttgcctttgaggcatccatgtatcgaatggttcgctctatcaagtcgactcttttgcaccattttcctggagattctctgcatgacatctctttgcctgagtttcatcgagagtcgttcggtgcatcatctgatacgtctggaagtaatgcacatatgcagggggagccttcaacatttgatcatgtcaccagttcagtccaacctgatctaaatcctccagctgactcgcctccagtaatctctgcaacacctttggtgtcgactgggccaccttcccagggggagtctggcacagaacaggatc

SEQ ID NO: 335030 - DNA, 1471 bp, Cannabis indica
agaaggataaggactgaatccacctagtggatacaataaggtctctcggggtagcagggtaccaaaccccgaagcataaatatcacatggcttgtagaaactttcaattactctacttgacacataagaatgagtagctcccaattcaaacaacacagtataagaacaaccatttatacacaactgacatgtcagcactgacggactagtattcttcttaggctcctctttcttggcctaaggaaaatctctgattaagtggcccaccatgccacactggagacatgccttggcccgacgttcaccctgatgatgtttcttgcatttaggacactcaggataggatcggaattaagatccacaggtctgacggccacctctgtttcgccaaaaatttctattacccctgatgttccgcaagcttcagccttccgtttgtgatcagggttgccactttcggtccccttactgatattaccactagcagaagggttcgatgccgtgacaacatcctttccagtctgctctttttctacatgttgctcagcctcctcagcaactaaggctagatctaccattttcttgtacaaagtgtcatgtgaagtggtaattttcaagtcccgactgattgtggcattcagtccttaaacatgtttctatttcctggtgaaatctgtgggcaccagatcaccaacaaccttggacagctgatcaaactctagagtgtattcagccaccaacattttcccctgagtaagtttcacaaagtcttccatgtgggaagtcctaatatcgatgttataaaatttctcttcaaatagattcttaaattcttcccaagtcattacatagacatctcaagtctgccccacaatatcccaccagacgcaagcatggtcttgcaacatgaaggctgcactgttcgctctctcagttcccgtcacccccatattatcaaggatacgggtgattgtgctcatccactacttggccttaattatataaatagctcccagaaaagtcagaggttgtagtttcacaaaccgctcaaacacagaatctctatgcggcattataaacctctggctactcaccactggcacaggtattggtggtaacacttgctcaacaggggaagccggtgctggttgccttaatcgacgcaactcttcctcatgaggaagtatgatacctcgcatttcttggaacatctactgctagtcagcaggaggattagcattgccaaccccggcattatcccccagattctgtagaggtgctggcggtgccggtggattggtttggtgaaccccaggctctatttgctcaccctggtgtctagatgattgtgaagagtttatttactagtacccttgtaatcaacaaccccagcgagtcaagcaccaataccacacttatgcacttattgccttaaaccctaagtcaattatttactccatataaataaaca

SEQ ID NO: 335031 - DNA, 880 bp, Cannabis indica
acaaatttttggggtgaatttgtgaatttatactagtaaatgtttgtatatttactaccatttaaacaaatgtttgtaatactgaaattaaaatatgttgatatatctaattaaaaaaatgttgaatatcatctaaagcaatttatctatcaatgaatgcttaattttcaaaaaaaaaataaaaacaatttatagagaatgagaaccaagaacttctaataataaatcaaaatgtctcattaatattgtaggtgtgtgttgtatttaaagacaacctaaccatttccatcaaaattttgtgaggttgctttattaaggcatattctatagtaaatggaatataaagagttgtgtgttcaaaaatctaaagtttgaaagattatatataaaaaaaatctcaattataggatagtaatataaattggacattgttaacttgaatttaaatatttaattcaaattatctttttttaaaaaaattaaaaacatttaattcaaatattaaactactaatgttaacttagtgcctaaaaatatagagatcattactaaccaaaatatgagaattagttttttataaacctctgcgaaattcatgagtactaatttgagtccaatctcttctacttttatagaagaaatcagctctaacttgttttcgtttattcattttgttttttattttgttcatactttctaacttaatttgaaaataagaacttctttgaaattatgaagtataaactactatttcattggttcgtcaaagattaggaccaactatttaagcaaagccagacttacattatgtttggtaggagggatggagagaagatgagaggtgtaacaccctaactaacttaggcgtattacgtgattt

SEQ ID NO: 335032 - DNA, 712 bp, Cannabis indica
cttagacccagaactgaatccagactaagatcgggattggaacttgggactcggacccaatctagacaaagacccaggactcgaacccacacccggagcttgatctggacctagacttaaatccggacccgaacccaaactcagaccaggactcgaactccgaccctaactcaaacccaaactcaaactcataatcgcaaatggaactagaactgaactaggactaggaccagggccaggacctaaacccaaacccgaactcagatcaaaaaccaaaaagagacctaagcccgaaccaagacttggactcgaacacgaacttagaccgcgacctaaacccacacaataaccgggacattgacccaaaatcaggatagggacttgggaaaaagaactaggaccaggacctggtatccgacccagaccagaacttgaacctaggacccagctcgtgactcggcaccacaaatgggaccagactgggacccgagattgggatccggatctggagcaagggcttggaaaaaacgcgtagtgggtgtctggttttgggacccagctctaaagccaaaccctgagatggacccgaacccacacccggacgtgaacccagtccaaaacccaaaagtggacccgaacccgtaccctgtgacccaaaattggaaccaaaaccggaagttgactgggactggaactaggacttggacttgga

SEQ ID NO: 335033 - DNA, 1219 bp, Cannabis indica
taattgaatgcccccaaaaatttaaacaggcctatataataacaaataacacagatataacagttgtttattcatccatcccactgcaacacatgtattcgcagaacttacttcactattgttgaatatttaagatattcaaactcccctagtcattaataatcaatttatgacaaaagttacctcaagtattctagttaggtatttaggccaaggaaggaacatgtttacaacttccttaacatatctgcacctgtcaattctgattggcattttagcatcctcttgcagcatttctaaaatcagttaccggacatgtgaatcatcgtagtctttgcagtgaattttgattagaccctcatgttcgtacagatacgctcaggccacaacgttatcgatattgtcagaatagagatatactagatgattaagggccctctgttcatcaaaattgtataggagaggtggctcattgagggaaacaaactcagcataaatttttggtcgaccctcatcctcacgagggtactgttgtggaacatacgcctgatgagccacctctccttcttcctcatcctcatcctcattctactcttgatgggcaatgtttttcttctgtttaagggatttgattttggcttttaatttctcaatcttcctctgtttctaagccacaacatcagaaacttcccttttcttcatgccgaacagtttagataacttttcttccctgacacgtccaggatgctctggtgtcccgagcgcctgtgtcaagatgtcattttggccatagacctgaacttgctcttgagtaacttactagttgagcctaatgcacatattcaagcaattaatatatgatttttatatattaactcattattagtacttaattaacgattaatatatactttctatctttttggcaaattccttgtcgtaatcagtgacaagtttcgttctcttggtccaagatttgttccaaacacagtgacgtggggtatcttgaacctcgaggtcctttttctgcattattttataaaatttaaatgagtacaattacattttgaagcacactgttagaaattattgattacttaccacatcttcccttacgttcaccattccactctgaccacttcaatgtttggatcagattttttctgaacgttccctttgcaccttactcaattcctacaatgccaaaaaaatacattag

SEQ ID NO: 335034 - DNA, 517 bp, Cannabis indica
cattctcataatcttatttgctatcaatagaagatgagaagtcatttaagtttacatgtagttttcgtgattatagttttaatatacaatttctgttatatctagaacatagagttattcacaattatagtcatgtcatcacagtggaaaataatttatgattatatgcttcaaagtctttagtcccatgatttatcagtgcactagatttacactgacgtgataatcagcgataaagtttacttacacttgtgtgagtagaatgccttttccagggcattagcaaagtatactagtatcagatatattgagtatacattgaactggactgatattgacagtgaaaaagacaccataaacttattgttatatctttactatgtcaatatcactttgttgttcttagatcaaaagatctcaatcttgagatggttaggttttggcttaactttattatttgtgttctttaacttgttcgttaaagctgaccaattagatcggttcaatacttacatct

SEQ ID NO: 335035 - DNA, 778 bp, Cannabis indica
tcttgattgtacatcaatcttctgggggaaggtggctcgagttctacaagtagcatagcttcatatccgtacgccatagcgaatggtgtctgtccagttgctgttttctcagttgactgctttaggaagctcttctggccaatttcctttggcgtcttcgagttttttctttagtgtatccttcaaggtcttgttgactgcttcaacttgaccattcgcttgaggatgcgacactgcaaggaaacttttgatgataccatggttcgcacaaaagtcagtgaaggattggctgtcgaactgcttgccattatctgaaactattttgtacggcagtccgaaccggcagattatgttcttcacaataaagtcttgaactttctttgatgtaatggttgagagtggtttggcttccatccacttagtagagtaatcaactgctaccactgcatatggcactcctcctttacctttgggtaattgtctgttcaagtcaattccccaaatggcaaaaggccacggactctacatctgagttaactcattaggtggagctcgaggtatctttaaaaatctctggcatttgtcacacttcttaacataggcttttgaatcttcaatcatcgttggctagaagtaaccttgccttagaattttcttagataagctttgcccggcggcatgatattccacagaatccatcgtgcacctcagataggggtcgtgcagcttcttcttgagtaacacatctgagcaatggcattgagaatcctcttctgta

SEQ ID NO: 335036 - DNA, 630 bp, Cannabis indica
taagctcgggccactatgttgtcaatattgtctgagcagagaaataatagctgattagctgccctttgttcatcaacattgtacatgagaggtggctcatttagggaaacaaactccttagaataattttgtggtcgaccctcatcctcataagcatatttttgtggaacatatgcctgatgagccacatgtccttcttcctcatcctcatcctcattctgctcttgtttggaaatatttttcttcagtttaagagatttgatttcggcttctaatttctcaatctccctctgaatctgagccacaacatcaaaaactttccttttcatcccgccaatcagttaaggtgccttggcaaggaatctacaaaccaatatataaagttagctataatttactttgtataactaaggaaacaacttttttcaagtactatcatacacgtccaggttcctctggtgtctcgagcgcttgcatcaaaatatcattttggccatcgacctgaacttgtccttgactaacttgctcctctagttgagcctaatgcacatattcaagaaattagtatatgatttatatatattaactcattattggtacaagatcaatgattaatatatacttactatc

SEQ ID NO: 335037 - DNA, 1468 bp, Cannabis indica
tgtattgttacaaggtaatgccttttgatttgataaacgcaggtgcgatgtatcagaggttggtgaatatgatgttcgcagatttgattggagacactgtggaagtgtatgttgacgatatgctcgtaaaatctcaacatgcaaaagaccatatcaaccctttacaagcaatgttcgaaatactgcgacgatataaaatgcggctaaaccctcttaagtgtgtctttggggtcgggtcagggaaattccttgggtttatggtgaatcagcgaggaattgaggcaaaccctacgaagattaaagcattagtagagatgcgatctccgactagaccaaaagaagtttaaagcctgacaggtaaagtcgctgctctaaatcgcttcatatcacgatcctttgacaaatgcaaagagttttttcaaatcctaaaaggcaacaagaagttccaatggatcgagaaatgcaaagaagcttttcaagcactaaaaacgcatttgggatagcccccgatcttgtcaaaaccaatgcctggagaagtttgatccatttacctagcggtgtcagaatatgcgattagctcggtactaatccgcgaattccaaggtcggcaatacccagtgtactatgttagtaaacgtttattagatgctgagactcgttaccctcaaatggaaaaattagcatttgccctggtaatatcgtaaagaaaattgcaaccttatttttaggctcatagcattgaggttttaacgaactaccctttgaggcaagttttagcaaagctagaaacatcgggaaggttgttgaaatggtcagtagaactaagcaagttcgacatcaagtacaaaccaagatctgcgattaacgggcaggccttggcagatttcattctcgagttcccaagcactgaggtagcactcgtagaagaaaaaattgatactgatgtgccaaatggcgagggatggactttatacatcgatggagcctctaatagcgaaggctccggtggcggcataatactcatcagtccaaacaactttaaggtacatgctgctttacgatttgaattttctgcatctaacaacaaagccgagtatgaagctttgatcgcagggttaaagctcgcccttgagatgaagatcgaatacttacaggcttttagcgactcccgaattgtcgtatgccaggtaaacggtgaatatctggccagaggcagacgtttggctaagtacctcaccatagcatgcgagttgttgcagaaattcaagaaagtggtagtctcccaagtaccgcgtgctcataactcacacgcagatgctttggcccgcttggcatcaacaagagaagctgaattgctcgatgtcattcctatcgatgtgctaatccacccgacggtgagtcgagataaagtgatggagatagacgttttcaaaagagttacttggatgactccgatagtgaattactt

SEQ ID NO: 335038 - DNA, 904 bp, Cannabis indica
ttttttttgttactatgcgaagaaaccaaattgtttccgagaaagaaataacctccgctagtactcttatgatcatctacattacctgcccaatctgcatcactaaaacaagccaagcttgaattagtgtctttagaatactacattccaaagtcaagagcactatttacatatcgaataatcctttaaactgtagaaacatgagattccatagggttaatttgatatcaagcacagactcccacactataacttaatataggacgactagcagttaaatagaataaactaccattcatactacactaaagagtagtgtctacctttactccatgttcatcctttgtcaattttaaagaggtgctcattggagtacttacttgtttagtcgattcaaggccaaactttttgacaaaattcttggcatacttactttgagacacgaatgttcctccttccattggtctgacttgaagcccctaaaagaatgtaagttcaccaaccattctcatttcaaactcatttttcatttgactaacaatcacttgaacttcatggttagatgtagaaccaaacactaatcatcaacatatatttgagcaatgataaaatttgattttatgtgtttgatgaacatagttttgtctacactacgtctttgataatcatgagatattaaaaattgagttaacctttcataccaagaatgaggggcctgtttcaaaccatacaaatatttttctattttgtatacatggtctagaaattgaggatcttcaaacccctttggttgctcaacataaactttctcactcaaaatcccattcaaaaaggccaacttaacatccatttgatacatttgatatcaagaacacaagcaatacacaatagtaaataaatagat

SEQ ID NO: 335039 - DNA, 1274 bp, Cannabis indica
agaaaaatatttacctcacacatgagcagaaggtagcctttggtaaacccaagcctatgaggaattcgaggagcaaaagagatcctaacaaatattgtaaatttcataatgatatcaggcatacgactgacgaatgtcaccaattgaaatataagatagagagtcttatcgctcaagtccattttgagcagtatgtgagatgacagggccagggatacaaccagcctcgtcagcctgataacccaaataaccaggggttacaacctcttcttgtggaaggagaggacatcctggtcattttgagagggtcgcatattgtagggaaaatcaacaacgctcagaagagatatgtgaaggaaataaagaacgagcagtcggtctttgccccatagccttccaaaaaggtgaaaatcgagggaccccccattacattcacagaggaagatgagaagaacgtgaaataccctcacgttaatccgctggtcataaccattcaactcgccaataagaggatcaagagagtgttaatagataatggaagctcagtaaatatcatttataaggagactctgaagaaaatggggctcgaaaaggccaagttaaggccttatatggtgaatctttgcggatttaccggagatagcatcgccggccttgacataattgaactcgcattaaccgtaggtgaggcacctttaactactactatcatgcaagacttcttggttgtcgacctgccctcagcttacaacatattgttgggtcatctagcactgctcgaactaggggcagtcagctcaatcaagcacctatctttaaagttccaaaccccagatggcgtgggtgtggtgcgtggcgaccagatgctggctcgggattgttatcgcataaagctgcagcataaaaaggccgatcatcagctgatgacgatcttggcaggagaaaacgagaagaaagatgaagatcttgatcctcgagttcaagatgaaagaaacatgctaaaaccaattgaagaattggaggaggttattctcgacccaagcaatctcaccaaatgtgtgtacattgggaagaacctggacgagcagctcaaatagcaattaataagatttttgaaggcgaaccaggatcaattcgcctggagtcatggggatatgatagggatcgatcctaagattatctgccatcacttaaatgttgatccaaactacccagcgaagagacaaaaaaggaggcccttggattccgagtgggaaagggtactaaaacaggaa

SEQ ID NO: 335040 - DNA, 899 bp, Cannabis indica
gggatagacatggaatgcttcagttgcttcatgtgtgtgtcaagaggaagaccaaagggggcagatgccgcaatcgtcagaggatgatcgtacttggaggcatttgcatgtgacttttatttgatccatataggaagcgtcgagacagttgagtgggatgtgttggcttgtaaaagcgccagtgggcgtaagtcacacaaaggcatcgatatagatgcatagttgtgcaatgaatgcatcaaaaagccaacatggctaagaaaactgagcgcaagtgttaagatggcgctagaatttgagtggaggccagagggctgttccagtggtcatgtgagcctacgaaagtcaagaggggtgctagagtttgtatgaaggccagagggttacatcattagaacttagtacatcgagggaatccgaaagggtgtagtgctagtgcgaatcagttggatggttgagtggacaatgcatgcatatggaaattgataggggtgctatatgagatagttgactcgagagtcacatcttgcgtgatgcacttttagatggcatggtctgcatgaggtcaggcatttgtatgtgggcatgttgtcgaggacgccaacagatgaagtgggggagagaccctcacggttcatttagcagattagggattcattagaagcatcgagatgagtatcatggagatggattttgtcaaggatgttaagttaagaagactcgggcacatgttgtgctagttatctagggtgaaattcaacaggtactaagataacaccatggcaatgttggccaaaggaaaaattcaacaggactaaggtactaaggcaacattgaaatgtcgacgggcaaagagtcaaaataacagaggcattagttcaacatcttcatcaaagtaa

SEQ ID NO: 335041 - DNA, 1211 bp, Cannabis indica
tattattatatatacatatataataatatatgtataattagtgtgttgaattagtattgagacattaaggttccttgaacatcaccaagtgaggaatttgccaatgaagcttcctcatcaattaattacttaattttcaaggtgaaataaataagtacaatttgatttataatttaattcagtctttgaagaattcctcaaagattcccaatcacatacatgcatacatagacttgaacaagtctttgcatgcagggttcctcgaagatacaccctatatataataataatatgactaaaaaaaactaagaaccataggccataagtattattttgtttctgtatataaattgttcttttaagacattttgaagaagaattatacagtcaatatatataagggtccaatatatatatatattggaaatgaagaacctatatacactatctatcgtggtctatactctacgtagtaattataattttattatggaagaagaatccagtcttaaagacttaaaagtctccaataaagaataaaaggagggagaaaaaaaagaatagtgcatcaacatttatgaacgagcattgctattgggcacagtggtacttagtactttttataggtagcgccctatgattaattattaatattttttaaaagttattttcttagagcattgctatgaggcactcgtgatgtctatgataaagtgtcatcatataattagttagcgatttttaataatatttattaaaataagatattgagttgcactaatagcgatattactgttagaatttataaaacactcaaagaaatatataaatcacagatccaaacatattcctaaaagtgctttaatatagaaaaccctaaatcataaatctataaagcctttgctaaattaaagaagaagaagatgataaaatatgagcggaagcactaacctgaagccattgttggagattgcagagaaggttttgatcttccaagaatacactattttctagagtattttctctgatggggaaggagagaatacaaaaccctatagtgtttcttggggaccactacctatttatagagtcatcttagaataactcttgggtatttataatttggcccctcaacaaattataaattaacttatggtatctacacattaattccatgacactttaatacccttttgatacccataacataa

SEQ ID NO: 335042 - DNA, 1068 bp, Cannabis indica
agatcatgtcttgttgaattttctcacaacaaaatgacaatcaatctcaatgtgcttagttcgctcgtggaacacatgatttggggcaatatgaagagcaacttgattatcacaccacacttttgctggaactgaaattttaaactcaaatttagtcaaaagctgataaatacatactatctcgctcacagacaatgccatttttctatattttaattctgcactggatctagatacaacatttcgctttttactcttctaagagatcagattgcccccaataaatataaataacctgaagtcgattgtctatctaccttggagcctgcccaatttgcatcagagaaacactcaatcttggtgtatccatgatccttgtaaacaatacattgtcttgatgctccttttaagtaacacaaaatttgctctaatgctgcccaatgatgaattgttggagaagaccataaactgacttacaacactaattgagaatgcaatatttggatgagtcacaattaggtaattcaactttcaaaccaatttgtgatatttctcaggatcttcaaatgattccccatcacgtgtaagatgcgcaactggattcattggagtactacaaggttttgctctaaatttttctgtcttagttatcaaatcaagtatatacttcatttgagacataaaaataccttgtttacttcgagtaatttcaactctcaagaaatacttgagcacccctaaacctttcatgtgaaattagttatgaatgaaagacttaagggatgagatgcctccaatatcatttctagtaataatgatgtcatccacatacacaactaacaaaatgataccaacagttgatctttcatagaacaccaagtgatctaacttatttttcaacaaattaaatttctcagcagcctgactaaatttaccaaaccaagcacgaggactttgtttcaatccatatcaagatatgcgaagacaaaaaactcatcctaactccccttgagcaacaaacccaagaggttgttccgtatacacttcttcctcaagatctccatgaag

SEQ ID NO: 335043 - DNA, 945 bp, Cannabis indica
tttttattttaaattgtatgtagaataaaaaattatatataataatagaatatacatttgatctattaagttttgaaatataattgtattatttgcattagacttaaattacgattttctttacattaaaatatcattttgtatatataagttttttttttttataaagatgtgtggattggattggataagttacttttacatgtcaatcaatatccaatcggtacaagtacagattttgaattttccaatccaatccaatccgcacaagtacatatatccgcactttacggattggattggatcatgcggattagattggattggttattttatgaacacctctataatatatacatatatgttgtacttgatcaatcttactatacagtttgattatatctgtagtcatgctttgttacatctatctctatataatgggaaagcatgtcgttagatcttatttggttctgttgattagaagagctaatgataacgttggctctttattaataaaggagcacagtgaacttgtaatatatttttatgcaaactggtttaatatttttatttttggtaagttatgttaatggtgtttgttaaaaattagtttcaatttttttttgttagatatgtcaatgtattatgtccttctttcaaagttaaggtggtaccatggtacactattttaccataaatttttgttatgttgatttttataaattttaataatgttatatgtaattatttgttgtaaaaattggttttgttattgttctctatttgatttgtctaaaaatataatgaagtgaagaaaaaaaaagtgataatttatattcaagtaacttcattatgatgtcagccttttagtatttttaataattattagttgatgatttgagatttttttcatttcatttttgttatggttttgtatgagttcac

SEQ ID NO: 335044 - DNA, 1233 bp, Cannabis indica
tcaatatcacctagttgatattagatcaaatgatctcaatcctgagatggttaggttctagttcaattgtattatttatgttcttcaatctgtttgttaaagtcgacctatggatcttctcgtgacatatagattaaggacatggtagttcaattgagtgggagcactaatcatagatatgaaatctatagcttctatctggacatagaagcgaaacgatgatttccttcgagcttggctggatagagataattaatagagcgctcatttagtgattatattagctcactgaaatatcatttataggtagttaagtgttttaaggataaaatacattgaagggtgtaacggtaaatttgtccctactcaatgtaaatcatctattgaggatcattgattattaggattataaaaaatagagaatttatagtgtatctatatcgtggaacatatagaatgttctatattattgagagtgcaattccaaatctatagtagtgcaaggaggaattaataagtcagggaatttacttggtaaattctagatctgcttattggaagctcggttatataggcccatggtccccatactagttgagacaaactgcttgtaagactcagttaattgattttaattaatcaattatagttctaaagttaaactatgtctagtttatggcttttcactaagaaatggcttgattgtgaagaaatatgattttagggtttatttattaattaagagacttagtggagtctcattaataaacaatataaatgacaattttatgtgataattaatttaattattaaataaatagttttggcatttataagattgaaattgcaaaaagtggtatttgtgaaaaatagataaatagttgagaaaaatggtaaaaatttaactagtgatgggcccactcatagccggccactaagtcctatttttctattattttatcattttttattccaaatgattcaatcctaaccctaagtgaattagtataaaaagaaaagaatggtctcataatccaactaatgactcttgacttagttttcttcttgtcagacaactagagagtttgagacttcttcttcttcttttctcttcttcaatttttgaatcctatagtcatcttcacgaacaaattcaagcctttcgtgattgagtgcatgcccacccatagcaagtaagtcttccatcatagtgtgtaagactgtgaagaatcc

SEQ ID NO: 335045 - DNA, 497 bp, Cannabis indica
cacttgtcatttcccaaaaaaaattctcttttacatcaattaaataatactttttggtgttgcgaaattcactcgacaacattaagtatagaaaatcaaatttcccattcacaaatacatatgttacatatctcatgtatatataacatatatactataatatacatatttatcatatacacataatatatacattaattacataactatgtatgttacatatctcacacatatatataacatatatatacactttaatattcatgatacatattatatacacatatataacatatattatatatatgcatgtctcttataaatacataaaaataattatttctgtatatttaatctcactaatatatattatatcacatgctctacatatatataatatatattactcatatatacatattatatatctcacatatatacatataataacatgatataaaatttaaatatcatattatatactactatatatatta

SEQ ID NO: 335046 - DNA, 849 bp, Cannabis indica
atatatgaaaaaaatttatgcccaccctccaattaaattctgggtccgccactgtatccaaggattggcaaagtaaactagtattagatgtatcagttatacatcagactagaccgatattgatagcggaaaagatattataaacttaccgttatctcttttctaagttgagttcacttagttgattataggccaattgatctcaatcctgatatggctatattttagcttatttgtactatacgggttctttaacttgtttgttaccagtttacccataggacgtactagcccatacttatatctgggaattatgtagtgtaattaagtgagagtgttactcatagatatggaatctataactactataactatttaaaagtgaaacaatagtttctttagaacttggttaaaacgacataaatagaagatctcttatttcaatattatattaatttactaaaatatcatttataagtagctaaatattttaaggataaaatacaccaatagataaaacaataaatttgttcctactcaatgtaaagtgtcctagaggatcaataattgtttagattgaaataatggatagttcatagcgtatatgtatttggtatatatagtgttctatgtaatctagagcgcaatttcaaatttatagtggagtcaagagaaattaataagttaggaaatttacttagtaaattttagatctacttattgggagcttggctacatagatacatgatccccacattgtctggaataatatcgtcttgtagactcaattaattgattcaagaagtcaattagaatttaaaaataaatcatgtcttatttgagaatttt

SEQ ID NO: 335047 - DNA, 594 bp, Cannabis indica
ggcatgctcaggagagcttgaattttttctggatttgcctcaattcccctctgactgacgatgaagcccagaaacttccctgacttaaccccgaaagtgcacttcttcgggttgagtttcattccgtatctccggaccacttcaaagcattcttctaagtcgtccgcgtggctagtgcacgcttttgacttgactagcatgtcgtccacgtatacctccatatttcgccccaggaggcctttgaacatccggttcaccattctttgataagttgcaccagcatttttcagtccgaaaggcatgactaggtagcagtatacccccttatcggtcctgaagctagtgcactcttgatctgctacgtgcatcttaatttggttgtaaccggcgtacgcgtccatgaaggacagtagcttgaatccagaggtggcgtccaccatctggtcgatccttggcaaaggaaaacaatcctttgggcaggctttgtttagatcagtgaagtctatacaaacccgccaggtcccgttgggctttggcaccagtaccggattggctagccattccgggtagtagacatctcgaatcatgccactc

SEQ ID NO: 335048 - DNA, 542 bp, Cannabis indica
gggatcccctttagatgtaaatcttatgatttggccaagcttatagccactggggtaggagatttgattcaagtggatagcactactcttaaggatgggactgggccttatcttacggctagatatctgttggatgttaacaaatctattaggagaggaattaatatttgtttcattaaaatgggtaaggaattcactaagtggctagattttaagtacgagcgtttgcctgagttttgcttctactgtggcaagcttgaccatactaagaagtattgtcatgcttatttgcaaaaatgtgatgaatccattgtcccaccacactgtccctatgataggttactatgtggcaaagagaaattatgtgagaaacctttgccttttgagtatcctcatgctccagctatttgttggattttatatcctaaataaaatttatttcaatataatcagatttacttattaatatagatcagaaattacatttaatgttgcatgatcctgttattgtgccgtcaacacattggaagtaaacatgacta

SEQ ID NO: 335049 - DNA, 1141 bp, Cannabis indica
catgtcccggatgctcccttatttcacaaagacttagcaaataattcaagcattaagatgttttgatccacgtgtctctgtccggttggtccacgtatattgggcaatatcaggggcaacactgtccaaaaaaaaatattcacaggacacctatttatttatttttagttatttatatattttaggggaattttataatgcaccctcttaaaaggtgtacactgatatatttttatctgttttagtatccgaaataactttttagtcaaattttttctcatggtcatgcaaattatacttatttaagacatttggcaaaatcttaagaaattcgaaaaaatttaacatgccaaaaattacgttcaagcagtgtgttgcacgcgtgactattttattttatacgcttgttaaatagaatgtttgaacattgttttctatattgtaaattattttcgaatttttcaaaattttgtagaatatcttaaatagctacaacatacatgaaaatgaaaaaaaatatatattaattttttttttctggataccgaaacatgtagagggttcatcagtacatcccttttaagggagtacattgtagaatcaccctatattttacatataattttaataatattattaaaggtaaatattattttagaccctgtattttgcaaaaattattaattggatcctctattttattaaatgacaaaatggatcttatttttaaaataataaaaataggaccctgagctcaattttcaacaattttattttttaatgtaatcaactttaaggtaatttttaacacgaacagatacagaaaatataaccagttttgtcataacatctctagatcagattattattaagttttattttgacaaaaaatcaattcagggtcctagttgtataattttagaaaatacaatgtctattttgtcatttaacaaaacagaaggtccaatttataattttttacaaaaacacatggtctaaaatagtatttaccctatgggcccgtttagtacgcaagactggattggattagactggctaatttgtcaaatccagtgtttgggcatgttagaagtctggataacaaatccagctaatctctctgtctgggattatttatccc

SEQ ID NO: 335050 - DNA, 954 bp, Cannabis indica
gtgaaaattgcaccatcaacattgatttttattgtagaattgaggaggggtccaatgctccaaatatgtatcaaccgagccattaatctcatgagaaggctgattattttgttgggcattataccaatcaataaaattcagctttgctaatgttacaacatcacttacctccggttgtttagcattccaaaccagttcatttcgatgcttccatatcgaccaacacagcattgaagcctccaaccgctcggccatggtccacctgtctagcccttcctcgaaccatgctgcaaatgtcatagcagcagccgctacaacagggacccgagactaaaaatacgataatataatattgttcacctaacataatatattaatacgataatattattcacctaacataatattgttcacctaacataatatattaatacgatatttcagtacatatactaaaaatagagaattgttcattaaaaacgtagtcataaccataatattgctaaaaaaaatatatggctaaataaatatactagtctctaaaattgtaatttcttgtggcttgtgagaagagagttgtaaggcttgggcgattgttcaaactcttgggtataaaaggatttttttggtttctctgttaaaataatattcaagtaagagcattataatcactataatcaaatattatacaatgatgctcttataactatcgaagatccaagcatttatttagagcattaatggttaagaaaacatacctcccatattgctcatcccatcataatgagccattgttgaatatccaagtccaaaatacactaacaatatgctagagagtgaagagtaatcaagagacaattgtggagcaaaccctcttatgtctaaccatcaacccttaaccccaactatccatccttaatatatatatatatctcatacccatctaaccctaaa

SEQ ID NO: 335051 - DNA, 708 bp, Cannabis indica
aaaataaaatttaaatattatttaaaaaaattatataccgtataacaaaaaatacatataccatacaccaaaacatatatacaaaaaataataataataaaaatatagattacaaatatatatatatgtatgtatactatatatactaaccaaattatgtaccacaaataaaatatatataacatgaccattgtatataataaaataaaaactaattaaatattatttaaaataaataatcatacaatcaaaaaatataaaaataataattaaatatatgtagcatggtaataaaattatatacatacattaaaatatttttattatgctaataaaattatatacgactattatacatatcataataaaaaataaatatcatctaagaataataatatatcatacaacaaagtagaaatataccgtacaacaaaatctatataccaacaacccaaaataactcataaaaatttaaaaatattgacataactttaaaataaaaaaatttttaacaaagctaatatagatataccataatatttaaatattttgcttctaattctaaaaaaatataaatataaaaaaattaatgagtttgaaatgtggacatttactaacatagtcttatgatttagggtcatttgctatatttttttgaaattgaggacataaattaacatagtcttatgattttgggccatttactat

SEQ ID NO: 335052 - DNA, 947 bp, Cannabis indica
atgaatcataacatcaaaaaaggacggtggaaagaatgtctcaagcaagcataatgtttcagcaacttcattttcaagagcaattaagctctctctatcaataactcgttgacagatttgattaaagaatttactttgttttgtttagagtgtttattattatctgaatttcatggtttaatattactgacaggtaaaaattttaatgagagttcaccacagaaacttgactagtcttgttggatattgcattgaggatgacaaacacatggggcttatctatgagtatatggctaatggaaacttagggaaacatctctcaggttcattaaattcattacttagttgataccaaaatatctccaagaaaactaacacaaaggaattgatcaattcttcatctaaatattaaaattacagataaacaagcttatacattgacttggaaggagagattgcaaatggctgtggatgcagcacaaggtagccattatatacatatgttaatatacatacacaaatttaagtttgggtagtgaaagtgtaattatatataattaattggattttgtttgttaatggaacttaggtttggagtatctacactatggttgcaagccaccaatagttcatagagatgtgaaaagcaccaatattttattgaatgaaaaatttcaagccaaacttgctgattttggactctcaagagctttcaatgttgaaggtggtggtcatgtgtcaacagttgtagctggcacccctggatatcttgacccagagtaagtataaatatatatatatttaaatgttaattaatttgattacatataactttgaaaatgtacataaaatattatatatgattatcttgaactttaggtattacaaatcaaattggttaagtgagaaaagtgatgtttatgcttttggagttgttctattagaga

SEQ ID NO: 335053 - DNA, 991 bp, Cannabis indica
ggggagtagtatattttttggattatgtgttacaactctggacccttgttttaggagcagttatcttgtttgtggtttgtgcacttttccgtttaaaaagttgttttattttcagtttgtaagccttttcgtataaaaaaaattctttgttttatgtgttagagagctttcatgcagggggagtattttctatactcttgtatctttaaaaagctatttgctttggtttctaacacttgatgcaggttttctcataataaaatgttttgtcaatcaaagtgccaaagggggagattgttaattccatttttggcatatttaattgacaaaaatattttattatttaatgtatatttcggctggaatattttaatatggtttccatattttgtgtatctaaacttgaaaggaaagttgtctagctttcctatttatggaaattaaggtaaaaatggtaagtttgattacacaatttattcttatctaaccagctggtatattctgatcttgtgtaagttttccattttcttagatcagatttcttgaagagaaaaccggatctgaactttccttttctataaaaggaaagttgtacttacggcccacgattctataggtatagaaatagaaattcttgggctgattaaagatttattttaggaaagtttctagtgggttggggtcttgttcaggccgtgtgtaagctgtcaataaagtgtatattgattataaatacaccttatagcagttaggtttagtacctttattgtatatttgaatttcactcatatctttagaaagagagtctttgttttgtagagaagagttgttcgactcttactctgtttatatgtattttgtattgtcttgagtctgtattcaagtctataaagaagaagaacatcaatgcaactttcgggagaaggtatacaaaacttttgggagattgcttttcaagtcttgtatcgggaggaagcaagcacttttcaag

SEQ ID NO: 335054 - DNA, 684 bp, Cannabis indica
aaataggttttatttagggtacaaaacccaacaactattgcctatatagtagcgagtttgaatatttctattaattttaattcttgaggtaagttatttaatttatatttaataatgcacgacttgggctggttcatattcaacctaggtacacgtgtcaacttcttattactagccaaaatttaagtataacaattgccccctaaaaagttattttttagagaaaatgactttttaaatgcctgtgagggtgcaatcttatttttctatataaattttgcatgcttttattttggcggttcaagactttgagacaaatcatttaagcatttaatgctctgacggttcctttctcacttagttcccatatgtttgatctattttctttttgatcgaatggttaccaccatttaggtataaatttcaatttttccattattttcgccatatctactttatttgagttatgaaagtttttgaatattgtgttttttcccataagtaaacaaagcacttttctcaatttggcttacgaagtattttgaacttaaaagtcctcacataatcaaatgtattttgaacactttgatcactttatgtccgtgtaattagtattctctcataatctattacaaaaccaagcaattaacacccaaatttctcaagattaatattgattctccc

SEQ ID NO: 335055 - DNA, 958 bp, Cannabis indica
tatatgaatagacgacctaactattcatataagcaatcaaaaatataacaaagtgataaatcattacaagtatattcaagtttgctcaaaacagattataattgtttatgcaaagcagaattgatagctgctcgcaaatcaaaagcatagcagataataactgctcgtgcacagagtagattactaactacttaaataatatcaaagcaaaatacgagcaatagaaatgcctaatgtattttaaatttgatcaaaatatagtagttcaagttgtgaatgaaaacgaaaacaaacatatatatattaaggtaaaatataaaaatacaaagcattcaataaagataaaataaaagcaaagttggccatccaaccttaaaaatttgtctttacaaaagtgccacaatgggcaaactattgtctcggccttaaggccatatgcctagataaaactaaaataaattataactaagcctacatagtaggatacttggacagttcttcttcttctgttgcctcggaaacctcgtcttccttcttagtcttctcgcagtaggcaaggacttcctcctcaaactcacctaagaaacttgtatccatccatggatttgccatccaagcttggtagatggaactttggccaacagcgttgcatcgttcaatggtttcagcttctttcccatcgaccgttactttggctgcattaagttcctcctggagtttctggcatgcatcagccttatcttttgcctccttcttggcagcttcaagctcgaccttgtgggtcctcttcacctcctcgacttctttgattaggcgagtgttttccaacttggcatattccattgcttgattacaacctggcgctggcctatcaagttctaaatctcgatctcaatatacttcttttttccatgccctgccgttgggagacaaaggagatgaaagatgtctgaaaacc

SEQ ID NO: 335056 - DNA, 572 bp, Cannabis indica
gtaatactttttcaatcaatttttaattaaaaaagtgaaaatattttttaaaacacgttctataaaactatttttattttacaattttttaattgaaaataaaaatttaacaaattttaaaaacaaaaagaaattacctttaatttttttttaaatagcttttataatcaatattttagcttttaattctaatctggaccttgagacccaaactccgatctcaacctcaatcccagacggaccacgacccaattaaaatctaatcctacacttaacttaaataaaataaaaataaaaattatagaacacattttttgttttttatttttaaactttaaaagtaaaagtgattgtaaaacatatttttatttttttaaaatgtaaattttacttttttttatgattaaaaaataaacgtatatttaaattatagattagaatgatgaaggggatggattaaaagtagggattttttctttaatagactttctaggtccaaaatttacatttttatcttattaagaaaaaataaacaaaaaaggaaattataaactttatttttcaaatatacg

SEQ ID NO: 335057 - DNA, 1405 bp, Cannabis indica
tctaattaatctcttaattaaactaacatgtaatcagcattaagtaataatctaaatgtcacataggtcatgcaaatactctcgtttcacatagaacctcgattatctaattttagcattctcaattctcactttttatatttctaattgagctcatagaacatgtagaaggtgatcaagcttacacatggaattaaacacaaatatagataatttcacaaatcaagactgaggaatgaaaattatttatttactaggcaaaactttaaacaacattcatcatcctccctaaatgggaaattcagctcataacaataataaaaacaaccatgattaattctgaaacaaaactagacataaaagataaatagagggtaaaagaaagaaacaagatggtgatatcgctctgggttttcaagattgattcctctcctctttcattcacttttcacgcctatttctgcttgctttggccttctgaatcgtgttccttatagaggaatgaaagatgtgcctccaattggaaaaaaatctgaattaggtcaaaaatcttattttccgtacctggtcgcgacccacttaaaggctggtcgcgaccacaggcaaaactcaaaaaaccgagtttctaccaaatctcccaagtctcgaccagataaaagggtcgcgagtaggctccatagtactggtcgcgactactgactcctattgagcagctttggcaaatttttcactagtttgtcccgtctttttgtcaattgactgaatttgaactctaatgccccgggaacctgaaacaaggaaaatcaagcataaaactgctccaaaagacaccgataaccaagaaaatgcttaactattagacccgagacataggctaaatataacctaacatcttgatgatagaaagtctacatctgggatggtttttactctttgaagtggagcagttgtttggaaaagcgctaagtaagccgtaatatcagactctgccaaggaggccgagtacatagctgccgctaaggttgctaaggaacttgtttggttaagaaagttcttcttaggacttgatgttgttcctggaatggaaactggttttactttgtgacaacactggtgctatagccaatagtaaagagcctcgaagccacaagagaagcaatcacatagagaggaaataccacatcatcaaagaatatgtggcaagagggaacgtactggtggagaaagttgacactgaagacaacttaactaacccattcaccaaagttttggctgccactacatttgaaaagcacagattgaatttaggattaattgaaatgtacttattgttttatgttattgcaacagggagtttgttgggctttgtgccctaaataaaactttatttcaatgtattcttttt

SEQ ID NO: 335058 - DNA, 788 bp, Cannabis indica
tagtatagagaatttaggttttaaaattgagagaggtaatcaaaaatcagacttaaaattgcatgactgttaatgaagatttttgttaactaaatttgagcctaacagtgacaatctcacacagaaaaataaaagctgtgaaataaaaagtatgaacacaaaggattctgtacatagttttgcagttagaattctgcatagtccaccagtcaatcttattagaattctgatagttttttagggccttttttgtatgatttttttcgtcccttttttgatctaacttgccattatttataatcacatagcaggcagttaattacaaagttgacagtgatctttgcaacgtttctcccctgaaatcatggggtttgattacatatcacgtagtataaatgcagttattattcaaaaatcacacagttacgatttttccgcttttattgggtcaaaatgatcgtgtgtttaaatacgtctttaattgtagcgttttgggatgtctcgacaggaacttggttccaataaccttgatagcgacctagaaattttgtcccttatctttctgaggtccatgatttacaccttactgcctctttgtctgaagacttaatgactcattttgattcggtttgtctcgtcaagattataagtcttactgaaagaaatctgaagttaattggtggtagttacaggattgcgccttcctatagcgagataggcgcctcgcttattaggtcttgggttcactcgactgttttacttagtttgtacagtatacgctaagtgtt

SEQ ID NO: 335059 - DNA, 985 bp, Cannabis indica
attgagtttcattactcttggtgtctatagttgaaattttttattaaaaaaacaaagacacttgacaagtaatgctagtgaaacaattattaatatatgggttaattgcggcaaaactccaaataatttcatttagctagcaattaaaccccgaaacctaaattttggcggcaaaacccctaaaactacaatactgttagcaaattacaattttcatccaaatttagatgttaactgccatatcggattgtccacgtggacacagtgtacacgtggcacaattttattggcccacgtatataattatattaaaataaatttaaataaataaatcattaaaaaaaactaaatcattaaaaaaaactttttttctctttttttttcttttcttttgttttctttttcatttttttcaaatatcctcttctctttctctctctcaattatgtaggtaccatgaccaccactcaactatcgtcgtcgagaaccaccgagccaggcgtcgtcgttgccgaggaccatcgacccatgtaatcttgatcccgtctctctcccaaccctcttctctttctctcttgatgatccaggtaccatattttcatgacttagatgtcgtcgccgtcgtcaaggaccaccgagctaggcgccgtcgtcgaggacagccgagctaggtaaatcacgatcccctatctgtctctctatttgtcccaatctactctctctctctctttctctctctttatatctagggtttaatttccataatttttttttttgcaatcttcttgatatatctgtgtatagattttcctatttgggtattattgtattttttgtttacagatatgagaaaagataatggttgtgggggaaataaatttagggtttttcagatttgagtttcgggactgagattttatgtatatatttgtgtgtgtttatgtttttgttggatttggatttgtttaaatttagtttgagtttt

SEQ ID NO: 335060 - DNA, 1338 bp, Cannabis indica
catgaactcaagcttgcttttcacaaccaaaatctcaatttactacttacagcagctagcaaacattatagggtcaaaaacatatatctcatgcatccaaaatcccacaattaaacacaaaatcatgactttaactcataaaatccaagctcttgaacttgagcttaaaaccaacatatttccaatattttacagtagctacataccaaaaataacaaggatttcaaccaagagaaaaccctaaaatctcagccacaacttaataattaaaaacctacaacaattcaagttattcacacccaatttaccaagatcaaacatcaaattaaaccacacgcataatcaagaacaccaacactctaacatgctctttttataaataatttcaacaaggaatccaaaagaaaaaactgtagaaaatgtgcagactgcgtaaatcgttctaccacaatccaaatcaaatcatacattcctatggttttaggtaacccaaccacgaaatccatagtgacatcctcccacttctacacaggaagtgtcagtggttgcaatactcataccggtctctaatgctcagccttgatctgttgacaagttaaacaccgggatataaattctaccacatctttcttcatcccgcaccaccagtattagggtcttaaatcttggtacatcttggtagtggcaaggtgaagtgaatatggagtggtatgagctttctccagattctcatttctaagttctgcattacttggaacacaaaccctggtcttatacaacaacatcatgttatctaacaccgtaaaatctttagcttgaccatttaaaacatcttctcggatcttcaccagtttcggatcagttaactgagcggcttcaattcgttccaacatatttgattgcaatgtcaagttgatctaaccatgtcttctgttaactgaggtgaaatcttaatcatactagttacttgcccaagacccttcctgctcagggcatcagccacaacattggccttcccaatatggcacaggatttcacaatcataatccttaaccaacaccaaccaatgcctctgtctcatattcaaatctttctgggtaaagaagtatttgaggctcttacggttggtgtaaatctcacatttttctacgtaaagataatgtcgtcgaatcttcaaagcaaacactaccgcagcaatttctaaatcatgcgttgggtaccgttgttcatactcctttaactaacgtgaggcataagtgatgacccggtcagcctgcatctgtacataccccagaccctatttggatgcatcgcagtaaactacaaacttttctctat

SEQ ID NO: 335061 - DNA, 720 bp, Cannabis indica
tattgataactaatcagattatagagagttttatttagggcataaaacccaacaatataagcctcacatcttaatggaaaggtttcaaaattttttttgtaagtagaaactgtgcagaaatacttatgtaattttctttgctctcaagaaactcacctaagctattcttgtgatcttgagtgttgaaataagaatacatacaaccaaaaggggaatagactattatcacttaaattggggtcgaacctctataaaaatatggtgtagccattatattatagttcttgtttacacaaagagcagccctgatgatgtggacatcaatgtttgacacgtggcaagaaagatggcatctcggagttgagtagtcccgagtcatagcaggttaacctgggaggggcccctagccctgcgcccaagttcacttcaggcactctagaatggaagttcgaacttcaataacttcaatgcaactcactatctctcagtattttgtacaatgaagacatggagcaacctaatcgaagacctgacaaacgaaattacatgaacctacaactcggaagccaaccaaggcacctagggtttcacccggcgcctaggttgacatcctcaactagggtttaagtttttggggccgtcatagtacaaaacagtcaaaaattacattggaacacaaaccagacatgccacagacatatttgtgttgggttttgtgcc

SEQ ID NO: 335062 - DNA, 1458 bp, Cannabis indica
tgagttctgctggagccatcctatacggagctttagaaatcggttcagctccaagtgccaaatcaatcacaaagtcaatttctcgtagtggcggtaaccccgacaactcctcaggaaatacgccaataaaatctttaacaactctgactacctcaggctcaaatgttttgggtctgctggagtcaatcacaaccgctaaaaatcctacacatccattgtgtagtagatccttagcccttactattgaaataaccgagatttgagacccctgaaccgatccaacataaacaaatggatcttcaccttctggttgaaaagtcaccattttctgcttgcagtctatactggccgaatacttggacaaaaaatccatcccaagtatgatgtcaaactctgttaattcctgctctatgagctcagcactcaactccctatcttcgatcctaactaacatagacctaatgcgcctattggagataaccaactccccgctaggcaatagggttccaaaccctcattcaagaaaatcacatggcctacccaaaagatcgattactcatgtagccacatatgagtgtgtagctcccgaatcaaataagacagtataaaaggtgttgttgataggaagctgacctgtcaccacagaaggactggctgcagcatcagcttgagtgatggtaaacacccgagcaggtgcgagctttgcctctggctttgctcttctttctttgcctgagggcaatctttcttgaaataccctaccatgctgcactgaaagcatgtcttccagttgcactatccaggatgatgtttcttacaacgtgggcacttagggtaagagtaaccctaacgtccacctctgccttggtttccatggaatcgcttgctttgccccaagtcaccagatgccggggtaacttttctcttctgatcagtggtagaatcaccacaatccctaccataagcaggagtaggaagagtgggggtcccaccaacactcggagtcacatggggctcctgaagaaacttaatcgcaccttcagctcgtagagctttctcaaccatcttcgcatacgatgttgcctcattagtagtgatcaccaaatcatgtctaatcttcacattcaaaccagcaagatatttttctttcttactgaagtctattggtacgatacccgaggcgagcttggccaaacggtcaaactttgtggtatattcagtaactgacatcccctcagtttacaccaactcagtgaattctttccgcttagcactgcggattgcttcattgtaatacttagcgttgaataactctcaaaactcctcgcaggtcgttacagtgacatcccaggtgaggaacaccaattcccaccacactagggcatcttcctggaactcaaatgtggcgcaggtcacccgatcatttccaaccacccccatgaaattcaaaatttgctc

SEQ ID NO: 335063 - DNA, 1850 bp, Cannabis indica
cgccctaatgctaaggcacgctacagtgattttacaattacagtgctatctttgctaatcaaagaattttcttaaaaatcgtgtcaaattaaaacttttagtattaactatgaaactttataagctttacatcattatttataaaagttgggatcctgtttctaaactttttacaaaatattccaaaatacaatattcaggtcgcatagtgattacaaaatggaaattccagatgtcccgaaatcaacactccaggtcgcgccgccatgacatgtacaacttcatcctagctcaagctcactcctattcagccttcgcctttcctttacctacacataaaagtagaactgtgagtcgacagactcagtaagaaaagcatataacatatcgcatcctaccgacttgtatctaggcgcccatacacttatttacaaggcttaacagatgagtaagaatgttctaactaagatacgaccatgtatcactgtaccacatgcacttagtaccaccatcgtactagtgtaagtagggtatgaatcgtacctcgagtacttttaagtgttgtaccacaaacaccgtgtaccttcccgtactaaaactggtaacaccatgatgtactcttcagacatcgtacactgtaccaatgcactttgtaccgctaccgtacaagtgttggtagtgtatgaatcacaacaagcatgcatatacatttaacacatacatacattcgcatatatatatcacatattatatgttgttcttacctctttttcgaattcaagtgagttggtcgacctgaacaaaaagtctcgtgctggatggatgcgttaatcacatatttaaatcgggtaaatcactcatcaaaaccctaatccgggaaacccggacctacaacttaaggttctgttattaataaaagggactacaataacctaggaggcagggaaacacccaactaaggcacataagtggacatgaatcaagaaaacgagttgttcggggaatctgccaaaaccgattttacaggtcctggaaaactggttaatcgttttgctccaagttttctcaaacaactcaaaacttgtccaaatgccaccaaactttccagaacacctaaaataagcatacacaacatattctaatcaatagaactcaaaaaaaaaaacttagaatcaaaatatgccattcaaactcaaacttggtcatccaccacaacaatcaataaaacagcaacaagaacttaaattcaactcattttaagcttagattttgactcacacaaacttcaaaccctaacagcccctaacttccaaaattacataaccaaccaaacttcaaactcaagaactaaaagattatggtactaaggcttacctccacttggaaattgctttgattacttgctgaattccagaaaaacaagacaaaattgctggttttccttctagttttgtggtggccgaacaaggagagatagagagagaatgaaggatgagttctctaattttgacttttctttatttttctctaaatgaataaagattaataactcaatcttttgctgaaaatagaaatggccaggtgtccacaccctaggctgcacctaaaccctcacttgacaaattactaaagtaccccttaagcttaaacttaggcattttaaagtctaggggtaaaatggtcaaaattcataactccactcaaatccagtattctatttttctccaacatatattccactaagaaaaagggtctagccattctcatgtgattaaaatagtcatccatcgcattgtccgttgtcgctgagcaaaaattgtaaaaataacataattcatatataatacaaa

SEQ ID NO: 335064 - DNA, 576 bp, Cannabis indica
gaatttatacattaaatataatcatgaaataaatcatgtgaagcatgcaacataaaatgatttctgatctttattaattagtaaatctgattatattgaaattggttttatttagggcacaaaacccaacagttttgacggttacacttgattatattttattcccgatatctatttttgggggaaccgaggtgtctgaagcatttgacatgattaccctttttcatttttctgcttataaatagggttgtacatccttcacaaattaacttttaccaacttctctatttagtaagctcaaagcaaagaaggtagttttcgctttaagtctgtcgtgagatttccaccctaagtatccgagcagcttcgttgaaccaaattcagatgtcaaatcaaccagtaagttttcaattctttcctcttatattttgcatgcttaatttctgggttccttacatgcgttcttgactttcttgtagaggataagaagaaaatgtaggtttaaaactttacgactttctttgtaatgatctgtgaagcttcgtgattgatgacgtttagccttttatcgcacat

SEQ ID NO: 335065 - DNA, 587 bp, Cannabis indica
aattataactaattataaatctatttttatgttgtgattaaaatatctgtgtggcaaaagtattaattaaaaaaattaaaatttattgtgactaaatatatttttaattagtcacaataattatgttgactaaaaactaaattagtgacaacttttatttaaatactatattttagtcgcaagtaaatttttattgtgactaaaaatcacattaatcacgaaaaatttatattgtgactaaaaagttgtcagtaagggctcgtttggtacgccgtgtaagggtcgtttagtattaaataataaataacactacgtttagataaaacaatgtattttattaattattacgaccaaatttttaaatacaatgtatgttgtattatttaatacacaataaatgattcgtattagctattataatatttaaaaagggtttggggtcaccaccaatccgacctggaccggcacctagaaccggactcgaacctaggacccgcactcggaccgagacccgaacccggacctagacccgggacctggacccagacctgaacctgaacctcggacccgaaccccgaccccgaccc

SEQ ID NO: 335066 - DNA, 552 bp, Cannabis indica
aataatattgggtccaataaggcagtcagacagactcacaaggcttgaaaatagactaacgaatgagcctatgggccataagccggatcaccctgcaaccaggtccgagcctagccagtcagccaaacgggtggaaccaagtaaatattaaatcactcagaaagacggctactactccctaagaattaaggaagcaacttacttgaacgagtcaaatgggtgacgtggacgaagggcaacggtactgaagacacacgataaaagaaaccatacggtagacacagggcatcgaacattcgatactcaccacatagtccaaacatcattctgaaatattaagtctaaatccaactcggctgacctacatttagactaaggggaaaatggggtaccagacccatgcaagtcagccaaccagacaaaagttcatattacaatattaaaaacataaaacatcaaacatatagttaacacaagacagacgtgtgtcatccatcggaacatcgttcgtagtcatcccttcaaacgagttagccagctggctagttcgag

SEQ ID NO: 335067 - DNA, 1219 bp, Cannabis indica
aggaaatttgaataccatatgagcgagcttgacaacttagacaatcatgttagaccatatttacaacaagttggataccataaatggtcaaggtaccacgacaaacacaacaagttggataccgtatgtacaacagaagctcgatcataaatgacattaacttttttttgaatatcttgaataacagccatgacagacttgaaattaagatcaacaaaacacctcaacgaaataaaatcttcggccaacgattcttgactggaaataactaattccaacttagctttgaacatttctatatcatcagaattagatttcttagaagcggaaccactctcgaatgtttgctttgtttaaccacgatcatcgataaattcatccaaaaataagccatccaaattcgaattctgcctttcttcatcagtaggacgaatgtccttcacctttaactgaaaaaaaatgttacaaaaattgtaaatcaaaaacaacaaaaacaaaaataataaagattaataaaatgggacaaaacaaaaataaaacagtaaagaaactgaaaatcacctggttcaacgacaaatcaaatatcttgtctttcaagtccctaaaagttagatttttggccctgacatcgtcggtccaattcagaattctcggaatcctagatgcaactcttttgcaaaaacaatttaccatcgcaggacaacattcataaaaccatacaataaacacccacggacaccccaaagctctataccaaccatcataagactgaactccctttttctctttctttatttcatcttgataccatgttcaactctgcccttgaatgaatcaattatcaactcaaaggactccctaccccaacaatattcattccaacgaccattatcaatgatatctaattctgacctaacaacttccttctcaggagtattacttagaaggaaataatgtatgaaatacaaaatagttaatttcaaacctagtgattcatcaccccacctagtgcccaaaaaagcattctcaatagacttatgatcaatagttttggttccaggataacatacatcaaccaattggtttgattcttgagaaaataataatttattgcaatcaccaaaacatttagtaccaaaaataaaataaaatcttcaacactaaaccgtatacaacgaccagcaacctggtgggttttatgccctaaataaaactcttt

SEQ ID NO: 335068 - DNA, 822 bp, Cannabis indica
gtgtccttgttgattgttggccaataaaatccttatctaataatcttttttgatagactttgctaacctgcacgatccccacaaaagccttcgtgaatttctctaatgatctcgtttccttctatagggacaacacatcgaagtagaggcattgaataacctcttctatacaattttccttcaactattgtgtagcgaggcactgaatacaaaagtttttgtgcctcgtttttgtcagttagaagttgtccgtcgagtagatagttgattataggagtcatctatgtaggcgagctatctatcatcttgatgtcttccttttcacatatacttggctcgtttaacgtctccactagaagcaagtttagttcatccaagtcgttcttcgaggccaattttgctaaggcatcagtgttagaattttgttttcttgggatttgctcaattttaaaataatcaaatctttccaagttcttccgaaccctctctagatatttagccatttttaagcctttagcctggtattccctgaggaccttatatacaatcagttgcgaatcactatgacatatgagattcttgaccttcaacgcttctgctatcctcaaaccagtaatgaaggcttcatatctagcctcgttgtttgatgcatcaaattaaaatcgcaaagcataatgaaacttaaagccttttggcgaaattaatatcagccctgcacccgagcgttgctcgttggatgcaccatccaggaataacttccaagtgtccgtgtctcgttgaacaagtagattttcttctagagttattctttctattaagaaa

SEQ ID NO: 335069 - DNA, 948 bp, Cannabis indica
cacacctgagcacgaaaacgaggtaagatagcataaatattacatatatgtgaatggatgcttgtattggatgtttacactactgacactaacgtttatgtgatgagttttaagggtgttagtatagtgtaggattttagggtagttatagtgttaccaacacgagtaccagggggtgcgtcgtgcatgtggtacaacacttagtaactcccgagagtacaataatggctctaccaacatgagtatagagttggtactttagtgcatatggtacagtggtcatacttccattaagaacgttcttaaccatttagtgaggtcgatatttgggctaagggcggcttaagcataaagccggtatagcattgcttgtatatatgttatgcatatcttactgagtctgttgactcatcagtttgctatcctgtgtaggtaaagaaaaagctaagctggaggaacagtgagctggagcttggcagtgagtgtacatatggcggtagtgcaacttggagggtttcagtctttcaaccttttgagttgcttttcgatgttgcctgtcatttgtaatataaaaaataagtatagagattttgtaatagtaaatgaaattttcaactgtgctttatactcgggatccatacctatatggttatttaactataatataataagattagcttttgagttaagcaagtttcaaatatgggtgttacagtatcagagccttgaccaactagaagtgtggtcgacgaggacgtcagaccttgtgacagtcagtagtcccgtgatccgtaaaggaaaatactgggtaagctgtgcaatcccacagtgcttaggggaggtcaagtgggatgattatgagactatgtaggtatgagattacacagtagaagagagcttaaatggattgattggtactacttatatcaacaaggtgcatcttgtttt

SEQ ID NO: 335070 - DNA, 728 bp, Cannabis indica
ctcctagtccacggggccacgcccagagaaataaatcaattaataaagtgtcaacaattacaaagataattgacttaagcaagtttagaatccctctgaatttttaccgcaatcctttgtaatgcactttatgaatctgttttcagaaccaccttcaaacagcgaactccctttgtctttgaagtgtgggtgcttacttcctcccgaagaaaggcttgcacaagccttctcccgaaggcctttctcttgttcaatcaagatgttctaaccaaccctaagaccagtataagaacagatatataaacactagaacctagatgaacaactaggttctcacaaaaagaactctctcttcacaaatgagaatatacaaaaaatgaaagctagaagagttgattcgaatggctgctctctaggttctatttatagaacatagaaaccttagagacagccacaaaatcgaatctacagctgtacaaaactttcctaaagaaaatcctgttttgttgcatcaaagacaagttctgctgcagcaaactagaccagaaaaggaaacttgccaaaaacatgtccgatcatgtatttggtcttgataccggccaaaaatattgtgtttgatctaatcttatcaagacacaatcgaactcaataaagaaaataagaataatcaaagttttcataaaaagtaaactttctataagagaatttcttctcttacaagaagtttc

SEQ ID NO: 335071 - DNA, 524 bp, Cannabis indica
tcacggtttaataattcaaaatcacaaactacatcgcaccgcacggtttgagaaaaattcaaactgcaaccgcaccgcgaagaatttcaaacctcattttttttttgcgttgcggtgtggtgcgggcggtttgagcggttttatgtacacccctaaccctagtgatgtaagttgagtaaatgctacaccatgttaagtgtatgattatatgtagatttaagggttatgcgttcaaggcataatcaggttggactcggtaaccataaccgagatgaaccattctaaggtcttattgtatttagacgtgtgagagcaacacttaggtctacgccacgtagacataaatagacgtgtgagagcaacaagtaggtttacaccacgtaaacataaataggcatgtgagcccaacatgcaggtctgtgtcacacagacagatttagatggcattattgtttatattgtatgatgagcatattattgatatattttatactgtcttgctgggcttggctcacgggtgctct

SEQ ID NO: 335072 - DNA, 937 bp, Cannabis indica
cttacaagaagtttccaaacaaacaaaaagccagttgaaatagaatctttcctatgatagaaaatagcaataaaaatatttaaataaggtgagaaaatcagttttataaaagccaacaaatcgcaccataaataaaaaatattttagtatctaaattgccaaaaaaagactttacaaattccaagtcttgtttttatttatataaaatatattagtcttggcatgactattgtatatttgaattgggaggaacaaagaagatataaatgaaagttttttttagatgaataaaagtggaagttgaatcaaataggattttatttggttttttatttattaaatcatataatatttaaaaatattttaaatcatatgaattatttaaatgaggggtaatctagtcaaactaaaaatttaggtctactaaattcaaagagatggtaccaaatgcgtaggatttgtaaataaagggtaccaagtgatcactattagaaacataaggtactaagtttgtattttgaaaaaacatagaataccaaatagttatttaccgtctaacaaattaattttaaaagaagtagaagtctattttttgtaaaaaaaaaaaaaagagatttcattgcaaatattataatcaaatagtttgaatattaaaaatattataatagggatttaaatgtaaaaataaaattatttataattattaattactaaaaaagtctattaaatttattaattagttaatttttttaagttatatagtgaaccataattaatttaattctataaaaagaatgtttacctattaataacttattattaaaagtaaaagaaaatgtaaccatcatgttatgctacatgaaaaatatagggaaatttacactaagtaactctttttattagtattaaacatttatacttgctctctctttttttt

SEQ ID NO: 335073 - DNA, 683 bp, Cannabis indica
tcagctgctggttttttgatttaatagcttctaaacctccggatgtggtgcgagaagcagctatggttagctggaagatttgggcggtccgtaatgatcttgtgtggaatgataaaacttgttcagcgtatgaagtggtacgatcggctagagtcgttcttgaccaatggttaagtgctcaaacacaaaaacatggggcattattaattgatgatataataatgttaatgagcactggcggaaaccaatgttaaggttaagaatttgatggtgccatttttcaagcggaaaacaagttcggatttggttgtatagcgagggatcacaatggacaacttattgaagctatttctgggagccgaattggcttggttcaacctgaagttgctgaaatgattggggtgaaagaggctttaagttggatcaaacgaaagaagtggttaaatgtagtgatagagaccgatgctttaatggtggttcaggcgatcaaaagttcgatcaatatgccatcacaatttggtctaattgctagagactgtcgagagcttctttctactttaaataatatttctttaatgtttgttaaacggtctgctaacaaggctgctcattgcattgcaagagcgtctagtttaaagtcagattgtattttcagtgaggctaatgctcctttagagttaagg

SEQ ID NO: 335074 - DNA, 1537 bp, Cannabis indica
ataacacaatcttaataatataataaaatcttaaaacaatttataaaataaaaaataaagtaatatacattattaaaattagtataaattagatttatactttaatgaatgttgagatacaatattttctccagtaaaaatattggccggaggtataaccaccacagccactacctctaccttctgtttatcctaaaaaggagaaaaaatgtgatctttttaggtatatagttttaggtgtagaaaatagaagatttagaaacaaaaatgagctaaaataagtaaaaaaaaaaaaaaatcagtacaagaaatactcgttttgccgccgcattattgcactagcaaaagtacaatatatgcgtcgacaaaagatgtcagcgaatcttggtcgataaaggagtttttactgccgattaattgcgccagcaaaagttaaacgctggtgtaaacgaatacccttatctgctcttaacctactttgatattgttttgccggtgcagtaatgcgttgataaaaagtttgcattttttttcccagattggcaccaatagttttaccggcgcattattgcaccaacaaaattgttcacgccaatctgagaaaaggcgcgaaccttttttgtgttaagttttgccgtcgcataacttttttttaaaaaaaaataaattaattataattaattatattttattgtattttatattaaaaaaacaaaaataatttacattaaaagataagcaaatattaatgttgtactaaaattagtatataaacaaaacattaaaagatgttcggaaaaaaaaagtataattctaattggtatataaaatatctaacgatctatatgcgagtaatgtcattgttgttgtttcactgagtcttgggaggatgcgatgacgatccaacaccacgaggagtggggaatggtggaagatccatgggtggcaagttgaaaccctgcacagctcgagaaagatactcaaactgatcttggaatcgtctgaggtagagttgttgtgtttcatattgctgcctcgtatattgagttgtctgctctgcttcctccacttttttctgtaagatttcgtactgctccattgtaacggtcggtgggactgaaaaattcatggtaggtgctcttttggccccaactgccttcagtctggggagatggccaaagcctcctagatgtcgagatcgctccccgagtacttgcgtcttaataggcaagtctcgagggtactgtgtaggatctacaagagtctcaacaggctgatctttagtgggcgccggttgagttgcagctatttcaaccattattaaatggttaattttaatacaaaataaattgaaagaaataaatagaaatgaattaaaatgtaattttacgtaagcttgttgcgcgtactcgttgcgccaattgttgcctttatggtgaaacttgtgaaaagtttccactgcagttggaagttctcctgtgtcggggttagcctatttttaagaaaaaaaaatattattattgttattttaccaaaa

SEQ ID NO: 335075 - DNA, 683 bp, Cannabis indica
aactagaaatatccctatcaatgaataacatggcaattccctaaataacacaaaaacgggaaaaactagggttccaaaattgtcccaaccggtagagcggttccccaactagaattctggttcgatggggtttcctggagaccaaccggtcgaccgtttactacatgttcccctgaaccggtcgaccggttcagttcagagcagaaaccaccaaaaatgtccctaaaatcacaaaacaatcccaaactctaccaaaatctccagattacttgtagacatcataattaatccaattcaagcaacaaaactcaataataaactcagaatatcaaaacaccattagagctctaagcttgagctctcaaactttaacttcatccaaacatcgcaaaactcaaccaactcaacttaaaacaacctaaataatcacaacctagccccaaaatatcaacaatcccaacacatacagtaactaaaaaccaaacttaaaacctaacttaacttcaagaaacacaaagaaagagagcttaggaagcaataccttgaatcaaagtactcaattacaactagaaatccttgaaccagatcaaacaactccaaccctagctgctgcccagaaaaatcgagagagagaggtttttctagatttcttatttttttttcaaaccttaagtaaataaatc

SEQ ID NO: 335076 - DNA, 724 bp, Cannabis indica
ctggtcggccaagcattacgttaaaggctgaaggaacatccaatattaggaactgcgccatgatagttatgctcgttggagcttgtccaactgtgaggggtagccggatttgtcctagaggtgcaactccttgaccggagaaaccatagacaggctggaggcatggagtcagatccttgagctggagccccatcttctcgttagcagtcttgaacaaaatgtttgaagaagctccattatcgatcatggttctagccaccattttgtttgctatctggacttccacgaccagcgggtcattgtgcgggaatctaatctggacaacatcttcatcgttgaaagttatggttggctctcctgctcgtggaactttgggcttcctttcttccacggccaggatgacttcttcttgctcgtactgagctgtttgggcatatctctcttgagcttttcccgtatctccagcgatgtgtgggcctccaataatgacttgcaagtgtccatctatcggtggaggtaacagatcctggttgttctgaccttggttggccttgacatacttctgtaagtgcgagttgtttttcttgatcagatgttctatttcctgttttaggttgtagcattcgttggtgtcgtggccgtagtctccatggaaccgaaaaaattttgtcatgtcccttttattggtatctttcttcatgggcccgggcttcttgtacggaat

SEQ ID NO: 335077 - DNA, 796 bp, Cannabis indica
agggaataaagaatagttggtggcttattcatcaatgataaccaagcagtcaatcattttgttgcattctcaaaagactgactcttctctttatcattgataccattcatcgcgagaagctttgggtcataaaacttgaaaaattttctcaaatcgtttatgctctcccagatgtgcctgcattaaattgttaagtattagtgtcttataataatttcactagaattcgatatacaaggttaattgaattaaagaagagtatacatcatttcaaatagcattcactggctgccgatgaagtcacacaatgccacctactgcaaatcctctccagataacgtgatctggagacgcggtgctgtgaatccttggggcacccgaattgtgattatatcacatttatctttgattcttagaaatttaacagccatctatttcaatgacttagggattaaagccataacctttggtgagaataattaatcttcttcatcaccaccgccttgtggagaagccatgggacctttccccttcgacacatcatgtcttgatggtgattaagtgagtggaacctatacaaaacataccataatatatcaaatttcatcttaattctaccaaatttttggcagcataacagatgtaattgaatgcccccaaaaattttaaatatgcctatattatgacaaataacacagatataacattgtttattcatccatcccatcgcaacacatatattcgcataacctacttcactatggttgaatatttaagatattcaaactccgctaat

SEQ ID NO: 335078 - DNA, 817 bp, Cannabis indica
gtggcttaaaagtagggaagcaagagtccacacccaaaatccttacccaaataatgaaaaaaaaaacactttagctaaaaagtcttaaatttatttttaaaaatattatttttgtatttctactattatttattaaaaataatatatttaataatttattaaaaaaatatccaattatattttaaatttttatcgttatatattgaaaaagttagtttgacacggcttaggaatgagatataataatagattttggagtgcagccaaatattagtccatttgttaagaggtagtacgggtattttggacaattttaatgctaaaagttaaatgtagtgttaaattaatattaaaagaatataattttagcattaaatttttttatattctaattacaatactaaaatttatactaaaaatattttttattatactattttattaaactatcttacaatataatatatatatataaaaatataaaaatttaatcataaatatattattttaatattaaaatccaaaaaaaaaaaaattagtagtaatttatagtgttctatatttttagtggaacactatagactctcacatatataaaatagcatttagagttttattggagcaattttgtatctaaattctactactttttgaattttagtgtctcattagagaaagctttagtatttttttagtatattattagtattttacataatatataagtgattctacaatgcactctcttaaaagggatatattgatgcactccctacttgtttcagcatctagaaaattattttagtctaattttttt

SEQ ID NO: 335079 - DNA, 545 bp, Cannabis indica
atcaaaggtaattccaatcagaacagattgcatagttcaagcatgaaaaattcattggccaagtttatataatgtaaagcagccacatacaggggctgttcatacaatctacaatccgtggttctaaatcccatccaatccggactaaaacattcgagacttggaacaaatgaatccggtgttaatagtttctttaatccggactgcttataattctctggttcgatcacattttagaattttcatcagcggttcaaaccagaccaaactacttaattttttacatttacataattttttaatgaaataaagatattcgggaacaatcttctggagaatattgatattgacttaatattgtttttagactatttttatttattgctatatattggttttgtttgaacatttaattggtttgttttggttttgaatttttcaaaaaccataatactggtttagttcgaaagaaaatgaaaattcagaccaaactaatccgtggacagcccctacataccggtagttacacgcttcttttgtccacc

SEQ ID NO: 335080 - DNA, 899 bp, Cannabis indica
gtggacaaggacttcgaatgggtggagttggctggatggaactacttccaaaaaagccaaatctgtcatccaaccgaagctccccttctcgctgtccacaacgccatcgtggcatgagcgttgttagatttgagggaccgaacacgggtgcgccaaaccctccaacaaaattgggacgcaagacggattcataacatttgagttccacttaattatgcctaggtgcaattttgtaatggtagttggttgttcacttttattattggaaaattgtaatgttgaatactttattctaatgaaaatgtgaaattgtaatgtggttcctacaaattaattagcaaatataaaagatttctttattctaataacgcatttctatgtatgtctttccaactctgaaatcaaatttcatttggaatagtactttgaatattgaacctcctataggcagagaaataaattaaatgaaaatatgtttggaacgtatttcaatgtacgtcagaagctggatctcccatatctcaacaagttcaagtttgaaaataacgtacatcaatatatgtacagagtacttcacatcgtaaatacagtatggtatcacttgtttactcaatatttgaatataatgagataatgagatttcctttcaaatgtaaactataatttcggacatatttattcgtacaatactttattttaatgcagtttaaaccatttcctttttaggagctgtactaattttggactactacccattcttaatagtctcccttcttaagttgttgggaattatttaaaaattgttcaaataatgtaatcttcttaaccaagtatggactatttgctgtaattttaaattctaaatactcactaaaaaaaccagaggatgtcttatcact

SEQ ID NO: 335081 - DNA, 639 bp, Cannabis indica
aagattaataggaaacatgggagtgagattttagtaatgattatttaatatttaaaaatattttaaaaataattttaaaataaattaaaacccaaaaagaagcatgttgtcacaaatggtgacacctcatgtcaaatcaaagtttttttgaaatatttaaaaataattttaaaataaattaaaatcccaaaaagaagcactctgtcataaatagtgacacccacacgttaaataaaagcttttttgaaaaaaaaatttaaaaattgaagtggcaaaactcggtgaagatacgtgtaagccacaaagttttaatgaactttgtaccaatggcagtatactgccgtataaaacaataatttaatatacagtataaaagtataaatacgcgtgtagtagtatttttgaaataaaatggaaaaagttagtaaagcatgtaaattttccaaaatattagaacatctttaatggagaactatatactattttttagaatattttgctaaaatataattccaatagtgatgtaaaatgtgtgccaaattaagctcaaattttaacccacaataaatactacattttttaattacctttttgctacttattaatactttgaataagatatatttataaaaaattaaa

SEQ ID NO: 335082 - DNA, 921 bp, Cannabis indica
aaaggtttccctattgatctcaaaactcccccttttcgaatcaaaactaccaaaaatcttccaataagctccagaacacctatttatatcataataaactgaaaccaagcaataaatcataacaaacaacccaaaaaccaaaaacataaataaattcattttaactcaaaccttggtcagagcaaagcttgagttcttaaactcaaatattgctcaaacaccctaatagcccacaaaccaagctgaaatcaacataaataaattcaatttaacttcagaatacaaaatcaaacaccctcaaaaactcagaaccctaattcccaaatatcatgcacaaaactaacttgaagcttaagaaatcaaaactagggaggctaaagagttttaccttagattaaatcactaaagacctactagaggatcctgaattgagttgaaaaacttcgaaaatctagtggtttttcttgagggttcgagagagagggtcaaagggagagagaaagtgattttcttgatttttttctattttcaataaagaggaataatacctagtattatctagcataatccctaactcaaaaaaaaattagaattaactaattccatcatatttcactaaaggacaataatagcaaaatggcaaaacaccatttttcctctacataaaccaaaaagcataaagtcacctaggcgtatttcgatcaaacctaatatcgtgaataatctcgacattctcgatgtctatctagcttaactcgatattactaaaatactaaatcataagaaaatataattctattggccaaagtcacgttctacggttatcggacataaaaatatgaaaaaacataaattcatatttaatataaatacacacctagaattcaaatacatctctaaaaattcataaatcataactaa

SEQ ID NO: 335083 - DNA, 683 bp, Cannabis indica
ggaactaagaagaagaggaaatccaaacgtgaaaatctggctcttgttgctcatacctccctgtcagctatgaaagataactgctggtactttgatagtggatgctcacgacacatgacaggttcctgcaatgatcttaagaactttcattcatccaaagaaggttttgtcacctttggtgatggaaataaaggggagattatggggcagggtgatctagatctcttggatgtcttctctctgacaggcgtgctattcgtgaaaggactgaaagcaaacttaattagcatcagtcaactatgtgatgctaactatgatgtgaacttcaccaagacacaatgcttagtctcatctgatgggaaaacagttctcacagggaacagaacggctgatcactgctatgttctgaccaatcaagtaaaatgccacagggtgttcttggataaacctgatttatggcactacagactggggcacctaaactacagagacttaaagaagattgtttccatcaaagctgtccgtgggattcctgaattcagattgggaagagatagggtgtgtggtccctgccaacaaggtaaacaaattaagtcctctcatcctcctataaatgccctacttacttccaaagtactggaattagttcatgttgatctaatgggtccaatgcaaactgcaag

SEQ ID NO: 335084 - DNA, 542 bp, Cannabis indica
tcccaaatactcgcaccgtcaattaaagtcactcttgaagcggcagccaccaacgcagatcgacaacgacgagccctcaacggtaatggatcttcgattggggaacccagctccattggaatttgtcttgaccaaaacacactgaaatttcaagcgaacatggcggtacctcccctgaacagcccgacaatacctccgatacagcttggttcgtttggaaactcattcccgaacggtctggactaccgcctcccacgaatggaaatttcgctatttagcggcgacaaccccgatggttggatttcccgtgtcgaacggtattttttacttacgaaaatggcagagtcgatgaaacttgatgcggccattgttggccttgacggtgatgcactatcatggttccagtgggagaaccaacgccggcttattacttctttggcgatgctcaagcaaatggtttcctttgattccgacggtacctattgggtctctttcagaggagttgttatcggtggtccgaaacaggtacggtgaaggagtac

SEQ ID NO: 335085 - DNA, 813 bp, Cannabis indica
cacatactcaaaataattatattacactattaaattgacaatagtataatctttaagactaaattagcggtgttaattaatttttttttaagttaagtaaaaaagtaaatatttattttatttttattttattattttctatatatagttacctaatttctaattttacaaagttttttcaaaaaaaaaaaaaataataatgttatgaaagacaaaaaagtctgtagatgtaaatatctgtagcattgatgtatcataacaatgtcacatcaaatttatgttagtcaaatttgaacggaattcccggaagttaaaagaaattttttaacaatgaaatgatttgataatgatatattatttggaaacaaaaatcatattacttaaaattacaaaaaaaaaaaaaaacaatattactcataaattaataatttatcttaaataaatataaactactaaataaaatcaagagtttccttttgaggtatactgagctactttttttattggactacatctaatatttttagtattatgtagattcgatccaattatatattagaagttaaattttaccattcgatccaatccaattaatttcaattagccaattaaatcggttctatctattagatttattatatacatattggtttaatttaaattttttcaatattttagaactagtattttttgaatcagatcggatccatcaaatattttaagtccaatatgtattggattagatccattcaattttaaaaaaaaaatagtaaaattttaatattaatttttatatataataatataaaatta

SEQ ID NO: 335086 - DNA, 707 bp, Cannabis indica
ccattacatcaaagaaagttcaagactttattgtgaagaacataatctgtcggttcgaactaccgtacaagatagtttcagacaatggcaagcagttcgacagccaatccttcaccgatttttgtgcgaaccatggtatcatcaaaagttttttcgcagtggcgaatcctcaagcaaatggtcaagttgaagcagtcaacaaaaccttgaaggatacactggagaaaaaactcgaagatgccaaaggaaactggccaaaagagcttcctgaagttctatggtcatattgtacaaccgagaaaacgacaaccagacagataccgttcgcaatggcgtacggatatgaagctatgctgcccgtcgaactcgagccaccatcccacaaaagattgacgtacaatcaaggtaccaatcacatactcctagcagaatcacttgatgaaatcaaagaaaaacgagtcgctgcaaacttaaagttgatagcccatcaacaaaaagtagctcgatattgcaacaaacaagtgagggcacagaaattcttcgtgggaggttgttagaatttattttaccaggatcttagatctactcacaagtatgttgatttaacaacctaaatatgaacttcgtaaacgataaataaaacacataaaaagttaagaaaccttacaatgggtgcagcggaataatgtgtctccttccactcagat

SEQ ID NO: 335087 - DNA, 516 bp, Cannabis indica
aaaaaagtataaagtgcagtaatattttttttttagttttttttatttttaattagaaaataaaatatttttaaaaaatatgtttaataaaattattttcactttttaaatttttaattcattaatttcaaaaaaaattatacaatttttttcttaattaatattttaaactctaatcccaacttgtatcttagaacctaaattctagctttggccccagtcttaaactcagaccacgatctgaccccatgcacgaacctacactcgatttaaataaaaatcaaaaaataaaaataaaaattatataacacatttttttctacttttaaaataaaagtagatatagaacacatttttattttaaaaaaaaattaaaaacacaaattgacttttatttttgtaattaaaaattgaaaaataaatgtgttatcagatgccctcataatattttattgggataaggcactattttttttgtaaaaaattacgtttttaaagaattttttttatattttt

SEQ ID NO: 335088 - DNA, 780 bp, Cannabis indica
catttcagttttaaatgtgcctgctatacaaaaagaatttaattagtgtgtctaagcttactaatgacaataatgtgtatcttgaatttcacaaaaattgttgttttgtcaaggacaaactcactggagctgttcttctcaaaggaccaattaaagatggcctatatgtgcttggtgactctagccaacattctcatacacttcagtgtaatctcaccactttttctcagcccactactgcctctgattttaattcttgccaatcttgttgtaataaactcactgttaactcagtgaagccctgtaatgattccaatatcaataaagaaactcattctccttactctccatctgtttctttaacttcctttactcatgatattaatacttggcatcaaaaattggggcatccttcaactgctactttaagcagaattttaaaaaatgtatcacattcaggcactctcaacgatttgcaattttgcattgcatgtcaaaagggcaagagtcacaaacaaccctattctttgtccactagccatgcttcacaaccccttcaattaatccacactgatttatggggcccttctcatgtttcatcacgagaaggttaccaatattatattcatttcattgatgatcacactaggtacacttggatttatcctttgacacttaaatcccaagcctttgatgttttttaaatttaaaagcatggttgaaaaacaatttaatttgcctattaaaagtgtccagtctgattggggtggggagtacaga

SEQ ID NO: 335089 - DNA, 640 bp, Cannabis indica
aagcatagacatattactgaaactggtttggttttacttgctcaatcgggtctttctttgtcttactggtggtatgctttccaatgtgctgtatttaccattaatagacttcctacagctgacatcttggcttcaagagcccctatgaaagtttgtttggcagcctacccgattacaagattctcaaaccttttgggtgtgcttgttttccacatttgagaccttacaacaatcacaaacttgagttcagatcagatcaatgtatctttcttggatactcttctcatcataaagggtacttgtgtgaaaattctaaaggccggctctatattgcaagaaatgtggtgttcaatgaacgaacttttcctgcctttgaagcctccactaacactcaggtactgtcttctccatctttacctactgctgcttttacttttcccactgctacttctaatactgctcctatttttggttgtgctgctgtaccttcttacaacctgactacacaagcgtctgcctatccaattcaacaccagcaacccgccattaccaaccatcgacctgctcctaccactcaacaaccagacatacacattccccaacccccatctcaaacccaacagcctgaaacaacaaccca

SEQ ID NO: 335090 - DNA, 513 bp, Cannabis indica
tcaggttcaaaatctattaatatacagaattaattaaaataaaatcaattaattttatttagataattagatttgagatttcaaaaataaaaatctagatacaaaataacacaaaaaaatcaaaattaattccatgaaaaagtatgaaaaaataaaaaaaaaatgattttttttttacattgggtgcggataccatctgcgcgtgcgtaatggggatgctggctgagaaaactcggcccaagaggctgatggcatgatttctgcgcatggaatggggttcagacaagccccgtgtgcctgtttcttcagacatgcattgtccgaacatgtgtgacacccgtgtgtcacatggtgtccgcgcgcgcatggggtgatgccattccttgatattttttaatttttaaaaaatcataactaattcaaataaaatcaaaatcaagttccgtcaaaaattaaattacttaacttttttccatactatctaagaaaaataattccagaacaaaattataa

SEQ ID NO: 335091 - DNA, 801 bp, Cannabis indica
ttttttccatactatctaagaaaataattccagaacaaaattataaccattttatgtaatacttttccaaacatcaaacaatcatcaataaacacatagatcaacatgaatcacatacattgttttaaatctatatttcttcaaagtaaatcaattatcatggctctgataccagttgttggaatatattttaccaggacctaaatttactaacaagtatatttttaacatcctaaatatgaacttctaaaatgatataaaaataaaaacataaaaggaatgagaaaccttacattggttgcagtaaaattaaacgactcctttcgctcagatctctaatccatgtatcctttctgtagtagagtataatcaagatccgagcccaatactccatcagttgcttgaattcttcacagtcttacttactatgattgaagactaacttgctatgggtgggtatgcactcaatcaccaaggcttgaattttaatggtgaagaacactaagaattttgaaatagtagagagaaaagaagaaaacaaagtcttaaaatactagttgtctaacagaatgaaaactaggtttagaagcatttgaagcattattagttggataatgagacctttattttctttttattctaattcacttagggttagaattgaattatttggaataaaaaataataaaataatagtaaaaataagaccctatggtcagccacaagtgggcccaccactagttagatttttgccatttttctcaatcatttatctatttttcacaaataccactttttgta

SEQ ID NO: 335092 - DNA, 443 bp, Cannabis indica
attaaattgattggttacttttacatgtcaatcaacatatattctgcacaattacaaattttaaatttgttaatccaattcaatctgtacgtacaagtacgaatatctacgcactttgcaaatggattaaattggattgattattttacaacgagtataagctaacacttaaaaacacttgaaatattaccattgtaagataactctccatctagctctagtgctttcttagcaatattatgagtcattgtattactttctctcttatcatgagctaaagaagcataagagatacaagataaagagttcttaatacaaattatggcatcattcaaagagtataagtccatataataattattcctttagaatctgtttctatttattagtaatttgtaattagtataaaagtctataaatatgtaattatgtaattatattat

SEQ ID NO: 335093 - DNA, 693 bp, Cannabis indica
ttgattctgttagtgataaatggtggttttatgatctattgacgcctgggagatgtttgtctgactctgtgagtatttttatatatatttttgtatctttttttattgtttgtatgtttttttgttgttgtctataatttatataattttctttttcagcatttggatgttatattttactacttgagaaagaaactgaagtatgatcctcgggttactgtttctgcaactacgacagattttaatttttacaacaaggtggttgagttgtatgataactttgtgaagtctaagaaaaatattgattctgtgcctaagagtaatatggtaattgagtatatggaggggtattgtatgtatgctaatactcggtggttgtttgttgattatgttttgatatatgttcatgtcaaagatgatcaacattgggttttagttgtttttgatataaagaataggtgtctcaatgtctataattcaatgtggtcgaaaagagatggtgacaagacgacaggattgtatatcaggcctcttgctgttatgttgccaatatgtttgcatttgatggacttttatagtcgaagggaggatattgaccggagcaaaggttggtttagagggaagaaagacagtgacaagcttgatgtgtttactgtgactaatctgcctcagcaattggataagtaagtgtat

SEQ ID NO: 335094 - DNA, 688 bp, Cannabis indica
catatcatttacctctaaaaaaaagcatgtccctctcgtaatcgtgagatggacaggttgaacccaactccactacaaatttttttacttttagtgacaacaaaatttgtgactaaaagtgaaaaagttgtgactaattataaatcagcattcttatattgtgactaaaaagtccgtggctaaaggtattactcacaaaaatcacaatctgttatgactaaatgtatttttagtcacaataattgtgactaaaactaaatttgtgacaacttgtatctcaatactatgttttagtgacacgtaactttttattgtaactaaaactcatattaatttagtcacaaaaaatttatgttgtaattaaaagtagccttttttgtagtgcccataagattctaactttttttttgcattcagaggattgggttcaggcgggctggtcgggtttggattgaacctagtccaaatgttcagccccaattcccataattcaatatcaaatcgtcatttttgtaattattttttgtatgattgtaaagttaaatttaaatatcgtcacattatagtattatattaataaattatttataaaaatgagcaaaatatataactgaacaggagatgtttacaataactttttgtaaacataatttaaatacaacagtggattttaaaaaaaaatcaaaat

SEQ ID NO: 335095 - DNA, 607 bp, Cannabis indica
gactatcatcgacaaaaaaaaaacaaatgagatatggagggagcatgcctaaaaacagagattcctttaaggagttgagcatcttgtcgaactctaaggagggaagacaatccctcagcacagagaataaaaagttaaggggatagaggatccccctgcctgagaccccgagaaggcttaagagagcctttaacatcaccattgacaagaaatgagagagtagtagtagagatgcacttcataattagagtaacaaaactaatggaaaattaaaatggtacatgatactctccaaaaaatgccatttgacacgatcaaaagctttagccatatcaagctttaaagcagcccagcccctctgccagtttttcgagagttaatggcatgaacaagttcttgggtaataaggatattatcaaaaataatttgcccagagacaaaagcacttcgaaatggagagataattctatcaagaaccactttaagttgattagcaattaccttagaaataactttatatattgtggaacacaagctaataggcctaaaattctgttggaatttattttaccaggatcttagatctactcacaagtatgttgattaa

SEQ ID NO: 335096 - DNA, 942 bp, Cannabis indica
taaataaaacatagtctaattttcgaattataattgattaattaaaaccaattaactaaatctgcaagcaatattacaaccaatgtcctggaaaggacataacacttatccaatgtgtaagtatactttattgctgattatcatgtcagtctaaatctagtgtattaacaaatcatgagacttaaaattttgaaatatataatcatgattatattccattgtgttgaccaccctataatcatgaataactatatgatctgaatttaatagaatttatacattaaacataaatcatgtgaaccatgcaacataaaatgatttctgatctcttattaattagtaaatctgattatactgaaatgggttatttagggcacaaaacccaacaaactcccacttgcactaatataaaactacaagtgcatttcaattaatctcaacaccttgatgtccagatcaagtgtagtatgtagtattatctttgtaataagatccggcaagttgtatttagtacagcctttctccaccattacatgtctttagttacaaaatccttaataatgtaaaatttctctctatatgtgtactcctcttggcatactggattctttactttttgccaactatatttgtcttagttaagaagtaacactagtagttaataaaaatgtatagaacttttccaaaggctgaatatgtatccttcctaatactttaacattcagtctcactggcagagttagagacttcagataggtttttacacttctccaaagtcactactctacccctagagtaatcaccatctcataagtagactttctagcattaacgtaagtctagaaaattgatttggtgtagtctaagagtattaaaatacacccatattgactaacatatagttcctctttttaatcttaagatttacttgattatcttcca

SEQ ID NO: 335097 - DNA, 897 bp, Cannabis indica
gttcttcgatcatcaagggagattcaaagatcacttgcttccgcaccaagaaccatcaagaattcaacaaggaattttacaagaacacagattgaaggagaatgtcgatggcaaggttcgagctagagaagttcgatggatcaacggattttgcactatggcgagagagtttgaagggtatacttgtgcaccaaaaggtggcaaaggtactcggggatgaaaaattactggctgagaagaaacaagaggaaattgcagagatggaggagatggcatactacaccatcatcgtgtacctgtccaatggagttagaagaaaactaattcaagaaaagaccatagaaggattgtggaacaaactagagcagttgtacatggcaccatcaatctcgagcaagattaatcttcttgaaagattatacgggtttagaatgaattctttctttccttagatgataatattgataaatttaataaaataattgttggtttagctaacattgatcataaggtagacgaagaaagtcaagcaattatattgctgagatcattaccaatgacatatcaagaggttaaagcaccaatcaaatatggaagggatgtgatctcgttggagggtgttcatgtagcattaaaatcaaaagactttgaattacaactcgagaaggagactaggaaagaagaagcctatcttgcaagaggaagaagtccaaagagaggatcatcaaggaacaaccagtcaccatcaagattgaagttgaagattaaagacaattgacaatgttatcaatgtggaaagattggccacattaaaagattatgcactcaattgaagacgcaatctggtttcaaatccaactatgatgacaaaagatgcaacagaaaccagaaccagta

SEQ ID NO: 335098 - DNA, 696 bp, Cannabis indica
ttagcttccataggtgttgagatcggcttgaactcgagcattccaaatctttgcagcaaatctttagcatacttttgctgacagagaaataaaccttccttagttcggtcaacttcaaatccgaggaaatgtttcaattctccaagctccttcacttgaaagcgtactgataagttctcttttgtttgacaaatttctacatcatcatcttcaatgataatgagatcatcgatatataccagtacaattgcgatctttgcttcctttattttgacaaataagcttgaatctgcatgtgccatggaatatccgctttctactaaaaactcagcaatctttccttaccatgctcgtggagcttgctttaatccatagagcgcattattcagtttgcaaacatagtcaggatgtgctctatcctcaaaccctcttggttgcaccatgtctatctctctatccagctctccatgtagaaaggcattcttcacatccatctgccatagcctccagtctttactagctgcaagtgctaacagaacccgcattgttgtaattttagcgactgggctaaatgtctcgtcataatctagcccatattgttgagagaatcctcgagcaactaaccgagccttgtatctctcaattgaaccatcaagacgagtttttaccttgtagacccatttgcacgaaatgggt

SEQ ID NO: 335099 - DNA, 1066 bp, Cannabis indica
gtgtcccacacggtgctgagtctggaacgttcgtacaatgatactattgaccataatatcagcctatactcggtatgttagtcatactctaaccatacccatgtgatactgtcaagtagtagagtactatcgaccatagtatcagactatactctgtacgctagtcatactctagtcgtaccgatgtgatactgtaagatagtataaaagccaacatacatatctaatgtaatctaacaggcttactgacatgcacactaaacatgtctatacatatgcataatgttatactaatcttaccttgattctgaatttaggtgtgccggccaacctgagtggaacaaccgctcgacaaattacaggctgctaaatcacatcaatcataacataggtaagtgacacgctaaatcacttcccggggacttaaacttgaaactaaaagtttccctatcaaccaactgttattatttcatatcgttttagaagttcatatttaggatgttaataacatacttgttagtaaatctagatcctggcaatatcattccaacaaccggtatcagagccatggtaattgatttactttcaagcaatttggacttaaaacgatttgtgtgtgatttgaatggtttcatgttgatttgtgtgttaattgatgattgattgatgtttgtgaaatttttatgaaaaataattgaatttttgttgtggaattatttttgttggatagtttgggaaaaattaagcaattcactttttttacaggaacttgatttcgattttatttgaataagttatgattttttgaagttttaaaaaaagatcggggtggagacaccacatacgcgcacggatccgagtgatcactcggtcacgcgcgcttcagacaaggagatgtccgagttttctcggtcgggtgtctcagttttgtctgaatgcttggtcccacgcacggacaggctgcgtgcagcctctctggccgagttttctcggcgccgtcccctgctcagcgctcgcggatggtatgcaacgcataccatccatacaacttgcatttttttttttc

SEQ ID NO: 335100 - DNA, 1653 bp, Cannabis indica
taaaataatttccaacagaacgtgcagctcctgaatcaaataatacagtatacaaggagttatcgacgggaagctgacttatcacaacagaaggactggctgcaacatcagcttgggtgatagtgaacactcgagcaggtacaggttttacctcagctttcggctcttcttcctttgcctgagggcaatcgtttttgaaatgccctaccatgccacactaaaagcatgtcttccggttgcactctcccgagtgatatttcttgcaacgtgggcactcagggtaagagtaaccctggcgtccacctctaccttggtttccacgaaaccgcttactttgctctgaaccaccagatgccgaggtaacctttattttctgattagtggtggagtcaccaccatccctaccatagacaggagtaggaaaagtgggggttacaccaacactcggagtcactcggggctcttgaaggaatttcacagcaccctcggctctcaaagctttttcaaccatttcagcagatgtggttgcttcattgatggtgatcaccagatcatgcctgatcttcacatttaaaccagccaaatacttttctttcttgctaaagtcagttggcgcgatacccacggcgagcttggccagacggtcaaacattgtagtatactcagtaaccgacatcccctcggtttgcaccaacttagtgaactctttccgcttagcacagcggacggcttcattgtaatatttggagttaaacaactcccgaaattcttcccaggtcataactgtgacgtcccgagtgagggttatcaactcccaccacacgagggcatcctcctggaactggaaagtggcgtaggtgacccgatcattaccaaccactccaacaaaatttagaattcgttatcactgtgagccactgctcagccttcatcacatcgggacctcccagaaacactggaggtgcttgcttacggaaccttttgtacaacggctccatacggttgcgaacaacaggttgttctacttgcaccgttggaactgcaacggcctgcacaacttgctgaggaggcatggaaggagaaccctgctacctcaacctctaaatttcttcatcctgctggcggattcgatcttgcatttccgcaaatctctgctcccaatccagaggagcttgtggtggatttacagggcgacaatgcaatctttgctaatcaaactaatcaaagaattttcttggaaaaaaaaaaacttagtcaaattaaaacttttatattaaacattaaactttatattatatcaaaatatttacaagtgtcaggatctcgttttcaaacttctaaaacatgatataccaaaatacctattaatcaggtcgcacagcgactacagaatacaattcccagatgtcccaagaccgaacacaccacgtcgcattgctttgacatgtaaaatctcatcctagctcaggttcactcctgttcagctttcgcctttcctttacctacacatggaagcagaattgtgagtcgacagactcagtaagaaaagcgtataacatatcatataatttttgacttgtatttaggctcccatacacctatttacaaggatcaacatatgagtaagaacgttccatactagggtatagccac

SEQ ID NO: 335101 - DNA, 876 bp, Cannabis indica
ctaccaccacaaactctgtcatttgggtaactgtttttggggcctccctgagtgtcaatgggagagtgattcttcctgtgctggctatgctatctcttaaaaaatccaaccaaattggcagagcatggttgtaggtcttgcacacttaaccccattttttccaaggttatcttatataacaagttcatgttactaccgttatcaaccaagactctccttaccctcctgatggcgatttgagatattatcaccggtggatcattatccgggttttgtacatgatgagcatcctcattggaaaatgttatggtttggtcctcaattggactttgcttgggagcacgttgttctggtgtgaaaggagtctttgttggaattattttaccagcatctagatttactaccatgtatgttgtttaacatccttatatgaatctctaaaacaatgaaataaacacaaataaagtttaagaaaccttacagtgggttgcagcgtaatataatgactccttccgttcagatctctggcccttgatttctttctgtagcagagcattatcaagatctgaacctggatctctttctctccttcttgttgattggattcttcacagtcttacatactattattgaggacaaacttgatgtgtgtgggcacttactcaatcactaatggctggatattatttgataaagaaagactaagtgtttcgaattgaagaagaaagaagatggaagaggtctaatcaaaagctatgttattagctttggaggcattagtttggatgaagagaccatagccttccttttagactatcttcaatagggttagggttgaattattaggaataaaaaattgataaaaatagagtaaaa

SEQ ID NO: 335102 - DNA, 213 bp, Cannabis indica
ctacataataaacagagtgtttattcgtccaggtacctcaaaaacatcttatgaaatctggaaaggtaaacgtgtaagtcattttcaagtttttggatgtgtttgttatgtttctatgattgaggtatcacttgctgtgtgtgggtactactctatcactaagaggttcgaaattattcaaggaagaagaagagggtataggtggcggctagg

SEQ ID NO: 335103 - DNA, 634 bp, Cannabis indica
tttcgagtcactatcccaaattcatcagacttgtgtttaaaaagccattttctccctataacactcgcaccatcaggccgagggaccattatccagacaccaagtcttttaaaatttcccatttcatcctgcattgcagccaaccagaactcatccaacagggcatctcagacacttttgggctcaatttgtgatagatagcatgcaaaggctaacaagttctgcaattctcgtctagtgaccatggtgtcattcggatctcctatgacagtggcctgaggatgagctttctgaacccaggatgggggtccatttttatataattttgcttgttggggttctttggtcagggcactatcaacttcatttcctcttcctgggtcactggcagttgcttgattatcacctgatacacctggttctgtatttagagactctgtaggagtgtcaggatacacttgaggcggtctagtgatgactgctctagggccatagaggacacgtgcatcatcctcgacccacacttcttcatgtccttctaagtcatcaaatttcacgttcattgattcgaccacagagagagtccttttattgaataccctgtaagcacgactgttggtggagtaccccagaa

SEQ ID NO: 335104 - DNA, 1361 bp, Cannabis indica
tccgtccaacactcatcttgtgtgttgtcttttgtaaatgaacccaagtgagtcttgggaacttgggcatctgatcgaccaggatttgcttcaacttttgcacgaggttcatcctcgtcttcgtgctagtcctccttttagcgaaggaaactcttctgaccttgtacccagccataggatgatggcttgtacagagaaaaccacacgtctggctgacgcttatcgatcctcaagtggctcggcttgccactctgcccgacaccgaacaggagtcgaccgtcccgatggaagaggaccgtgagggggacactgaggtctaggaggttgaggagctagacgagctacgttcgggcaatccttccgaggcaaagggagaggaagaggttaaacccctaacttcggggagtacaacgaggctgggcagccagtcgatgctgacggggacgtcctggttgagggcgtggactacgtcagtgaggagcttgctgaggcagttcctcataggaggcagagtgccttgggcgccaggtgggtaagtcctccgtcaaagatttcggagatgcctccaaattctcgaccaggacgtgtacctgggcgagctagactgctacattcccgcccacgacaatcgcgccacaaatcctgataagggaatgtgcgcctggtcgggggctcacggccagcaaggggcgttgatgcccttgcacaagtacttcagggatgtggcagacttctttggccactgcccggcccaaattactccaaagggcattaagtatttgtccgctctcttcgtcctctacgcttcccaaggatgggacgctccttccccccacgaggtcgcctggttcttcgacctgaaatctacccccaagcaaggcaggtcggggtacttctacttctctcagccaggcttcaagtggttgagtggcactgatgacaaggccatcaacaagatagggcattttattgatgagtacttcatggtgaaggattcgagcatcaccccgactcggtttcagcagattatgcaggccggtttgaagttggcttacacttactcccgggctaagtctgttgctttcaagagtgtggctctgtccgacaccttgagggcggaggcggacttggccaaaaaggaagctgaggaggctagggcagaagctggagctgttcggctggagttgggcgaagccaacaagaagttgtttgctgccgagaagaagatctccgtgctgacaaaggatctcgaagctactgatcgctttgaggagaccatcgaggtcttatctgctgaatttaaccgaattcaggatgagaggacttctctgcggtaagttcttcttcggatgaaggaggag

SEQ ID NO: 335105 - DNA, 600 bp, Cannabis indica
tagaaatagaaatttcttagtggactaaaaataataacataactattaataataaatttttattaatattatattataattataataataatattacaatattatttatatctatataagttaacgttatacgttaataagtttatttatatatatatatatattaagttatcagtgaaacagaacaaaaaaaatcctcattctctccttcgacaaaaccttctcctcctatatccattttttttgatttttcaattcaaaacttagctatctaagctccggtagtagcaggatagcaaatccttgaaaagggaaaggttaaggtatggtttaatttcgttttaagtttacaaataattggttttggtatagggattttgtaaattcgaataattatgaaggttctgaccttatagaattgttctcgggtagtcatgggactagttctgatattttcttgttgaatttgaatttattttgagttagaaatcgagtttgaaactttttaaagcttagtccaaacgttaatggcatttttcatttaaggggtcgatttttatttctgttacataaggatggtaatatttatgttatatatgc

SEQ ID NO: 335106 - DNA, 619 bp, Cannabis indica
gttccaggctgtgggaacatccggagcttctcacggagtgggttaggatccctccttatgcgcggactgaacctacttagcttttccttcaacgggccaagacctttgccacatatgagaagaaggcccttggcgtcggggagttggtcacgacggagaactgccgaaaggccaagctgatccaagggcatcagtcggtggatgactccaaccaatccaaggtcatatgcccgaacataagggttctgatcgcggagaaggtactccgggaggacatcatcgccacggcggaagataagtaccagaagtacctcttccaaaaggcccaggagcaggcttataataaggcccaggcggccgccggaaggcccttccgtatcaagagcccggtggagagaaggaccccccaaaccaaggcctacagtcgaggtgtcgaatatgggggctcccgatgccagcacttcttgttttggtaagtcccctttaatgatacattacgtcccttctgtccgtgagtacgctagccttaggcctatagggttcgatgaacgtctccataggtttaggatgccttccacgtcggtggggggatcgatgcaaaggagtattacttctctca

SEQ ID NO: 335107 - DNA, 866 bp, Cannabis indica
attgagagtacttaatgatcctatagaatggccagaagggactaccaagattcaacaagaagaatacttggaaactgcaactggaatcatgatattcaacttatcagatgccataatcagattaatagacaaggaagaaacccctgcccagatttggaagaaactggaagaacagtttcaacaaaaatccctaaccaacaagattttcttgaaggaaaggatctttggttttaagatgagttcatccaaatctcttgatcaaaatttggatgaattcttaaggatgcaattgaacttgcaaattctggggaaaataaggctctaagtgatgaaaacccggctataatcatcctaaattctctacctgaatcctatagggaagttaagactgctattaaatatggaaggacatctataaccctagaagaggtgaattctgcactaaagtctaaagatttagagatgagaacagagaaaggtggaaactcaaatggtgaagtgaatttgagtagaggcagaccaggtccaagaaaaccttggaacaacagaggcagaagccaaggcagaggttcaaacaaaccaggaggatatcaaagaggcagatcaaattcaaacacaaggaatcctgatgaaactaatggttgttacaattgtggtaaacctgggcactttaaaagagattgttacttcttgaaaagaaataacaggcaataaccacatggacagggagattctaaacactcaaactctaagaataaacctgatatgcatgatgcaaatgtaattgatggatatgaaagtgatgaagtgtaccaagttggaccatccatcaaagatgaatggatccttgactctggttacacttt

SEQ ID NO: 335108 - DNA, 622 bp, Cannabis indica
aggataaaatatattgaagggtggaatggtaaatttgtccctactcgatgtagatcatctatagaagatcattgattattagaattataacaatagataattcatagcgtatctatatcgtggaacatatagagcgttctttataattaagagtgcaatttcgagtcgatagtggcgcaaggaggaattaataagttagaaaatttacttggtaaattctagagctacttattggaagcttgattatataggtccatagtccccacactagttgagacaatactgcttgtaagactcagttaattggttttaattaatcaattataattttaaaattagactatgtcttatttatgaatggcttaattgtgaagaaaataggttttaaagtttatttgttaattaagagactttgtaaagtctaattaataaatatacttttgcggcacataatgtggctaagtgggcgtttacccacaaacggtttggttgactacctatttcctccatttcgtcggaactcttttgtaatgatcacgaggtctaatttctttttatatatgcacacttatttcaaaaaaaaaaaattaataaataatataaacgataattttatttgata

SEQ ID NO: 335109 - DNA, 573 bp, Cannabis indica
ttcagttctagaataaaataaaatatgtatcattgttgttcatgattgattgctaaaggtggagaataattcttaattgcttttataatcgtaattgtcattcattatttgttttccttttaagctattttactgtaactcaaactctccctttaatttttatttgatagtgaataatatcatagtcctcgtgggatcgatctttatttaccgttatattgaagtgattggtaataaagcgactctggaaactatcatcattattttttgacaatttcttactgctttatttttcatgttagttattgttatcaattgtttagaatgatactgagtaactaaacttccttttagctaccacaaaataattttttttcaggtatgaatataatgaagactacacttcccaacaagatggaagatcaacttttaagtgattatttgctagtactcaaggtcagtcttgaaatttagtgggccataggaagaaaaaatatattttggccattattatttttttttttaaaaaaaagaaattactaaaaagcaactcatgaacaacaatgatacata

SEQ ID NO: 335110 - DNA, 1343 bp, Cannabis indica
aagtttggctttcctgggcgttgggtggatcttattatggattgtgtgactacggcggaatatgggtttttggtgaatggaaggccacggggtagtgtgatcccgtctagggggctgcgacaagggtgtccactttcgccttatttgtttctcttttgtgctgaggcgttatcttccctgcttcgtcaagctgaagtgagtgagttgatggggtttcggtgttccaggtctgggcctcgtgtctctcatcttttctttgcggatgatagtttgatatttggtcgagccaatgggagggaggcggagtctatccgtcggattctacaatgttatgagtatgcttctggtcagcaagtcaattttgataaatctgctattacattcagtccgaatgtcttacctgcggatcgtacaagtgtattgggaatattaggcttggggtcagtggctactcatgataagtacttgggtctaccaacggtcattgggagaaataagaagcgaacgtttgccagtatttgtgacaaagtccaaaagagggtccgagggtggaaaaggagtttcttctctgctggtgggcgcgagattctaatcaaggctattctgcaggcggtgcccaactatatgatgagtatgttccagcttcctgtggctacttgtgataagcttcgctccattattttacagttctggtgggggacaaacaatgataaaaggaagattgcctgggtgaagtgggaggatgtctgtcagccaaaatcgaaggggggattaggctttaaggaccttgtgctctttaatcaagccatggtggcgaaacaagtgtggcgcttaatgcaatcgccacattctctggctgctcgtgtcttgaagtacaaatattttcccaatacatctattctggatgcgaaagaccgtcaagggtcgtctcatttgtggtcaagcttgatttggggacttaagttgttgcatttggggttgaggaaagtggttggcgatggccaaagtgttgatgcgtttcgggatccgtggattccccgtcctgtatcgtttcggcctatctcgcccgcgcctattgatggtgtgatggtgagtgagttgattggttcggaggggacttgggatgtacaaactttatctcagtatttcctaagtttggatattgatgttatccttggtattcctttgcggggaggacaatgtgaagatgggtggtgttggcattacaattcaaatgggtgctattcggtgaagagtggttataaggttgcgcttgatagggtgagtgagaggaatgggggctcttcagcggatctggctcattggtggaatgggatgtggaa

SEQ ID NO: 335111 - DNA, 537 bp, Cannabis indica
caaaagtggacacgaattcgtacactatgaccaaaaattggaagcaaaactagaagttgacctggattggaactaggacttagacttggaatcataactgaaattggacctagatccacaatcgtaaccagactaggacccagactccatattcgaccaagacccgaattgggagctagacacggatcccaacccaaacctggacttgggacccgaacccgaacctgaactcagacacaaacatggaactagactagggacacatattcagggtcaggacatagaaccgcaccccagtctcaatcccgaacccaaactcagaagtgggacctcggacctgaaccagaacaagaccgagacccgtgacaatgatccagatcttgactcggcattcgggtaacagggcctggaacaaaccaatagtcagtgtctatatcagggacttagactaggactagatgtcagacgaagagccaaacacgaacccagacctagacctgggacccaaaattagaacctgaacaagaatcgccgaac

SEQ ID NO: 335112 - DNA, 752 bp, Cannabis indica
aggagaggacattctggttattttgggaggcccacatatcacaggggaaagcaataacgcccaaaaaagatatgtgaaagttataaggaacgagcagtcaacatgtgccctagaatcttccaagaaggtgaaaactgaggaacctcccattgtattcacggaggaagatgagaaaaatgtgaggtatcctcacgtcgatccattggtgattacaattcaactcgccaataaaaggatcaagagggtttaaatagacaatgggagctcggtaattatcctttataaggagactctacgaaaaatggggctcaaaaaggccaaattaagccttgtatggtgaatctttgcggattcactggagacagcattgccagtcttagcataatcgagctcgcattaaccttaggtgaggcacccctatttgccactgttatgcaagacttcttagttgtcgacctaccatcggcttataatatattgttgggtcatccagcactgattggactagggacagtcagttcgaccaagcacctatccttgaaattccaaacacaagaaggcgtgggagtggtgcgtggcgactagatgctacctcgcaattgctatcgcattgagctacagcataggaaagtcgatcatcaattgatggcgatattggcagaatgaaatgagaagaaagatgaagatcttgaccccgaagttcaagatgagagaaacctattgaaaccaattgaggaattggaagaggttat

SEQ ID NO: 335113 - DNA, 580 bp, Cannabis indica
tatttttgtaagttttcctaatagtattagcatacaacactaatagtaaagaagtgggagcccaatatttattagaacatattgtttctcatgcttatacaaatgtgaatgaatataaaacataaattcacaacttcaattccacattataattcttcaaatcatgttctctctacaacctactaaatgaattgaaattggagacatatcattattattaaatattgaattttaagtttaaaattgaaaaattattaaatgtccttaaaaaaaacaaaaaacaaaaaaataaaaagagaatatttttttaggaacgaccgataaatattatcataataaaggcgacaaaaattatacaaaaaacggtttcttatatttaaaaaaatttattgtctatcctaaaaatatgtttaaccaatctacgagtctcaacatgctcataggtgagatgccttacaaaactaaaaaataagactttaatattaaaaaaataattcataatttattcagatacattaaccctccaaagttagacaaaagaatattagatccaatgatattaaaaaaaaataaaataaaa

SEQ ID NO: 335114 - DNA, 613 bp, Cannabis indica
aaaattaaaaaacaaaagtattagccatgatacttatgtttttcaaactacacttaatccatatttgaaggatttggaaaacaaataaatacaaaataataattataaactaataaacccattttcttaggaatattaatttattaagcaatcaatcagtttgacttaattgtaaaaagtagttcaaacatttcccactttaccaacattttccaaatgaccaagtagaagtaattactctaagtttataatttatgagaaccaatgtccacactccacataacaatatacctctcaagtatatcattaacacaatcacattattatattgtaggtttgtagtttgagacacatatacttgactttgtcttatattttaacacatcaaaagataatgaagtggtgcattggagttctactatatatattaagaatgttacaaaagtgtgatcgaatatatatagggacacgattttgttccgttagtgtacttttacggaatgtattctatgatgtacatcagccgttaaatagagtagttatttgatctgagggctggagttgatctagggataatcagggttaaaaaatggtaacgtaccttgagacacat

SEQ ID NO: 335115 - DNA, 799 bp, Cannabis indica
cgtatctatatcgtgaaacatatagagcattctatatgagaaaagaggttttagggtttatttgttaattaagagactttgtaaagtctaattaataaacaagttaaataaaaattttatttgataattaattataactattacataaatagttttgacatttataggattaaaaaaaaaatatgccattagtgaaaaaaagataaatggttgaaaaaaatggcaaaattatagctagtggggccatctatgtggtcaaccttatatgcttatttttgctattattttatcattttttatagtaaataactaaaatcctaaccctaggtgaaataatataaaaggaataggctgctctcattctcatccaacaactaatgcatttaacctagttttcattctgttagataactagagttttgagagcctcctttccttctctatttttttaaatcctctctctctcttcaaatttttcgagtctatagtgaaagagtacatgaccccacaacaagtcaagttataaataccgtttaactttaatttggaaattagcagataattagggtttaattatgaaacttacatattagttatgaattatcagtttacagagatttatttgaattcaaaatgcattttatacgtcatatacagaattttataattttgcatattctatgtccggcatattcttagtatagcggggcaatatagttagacattgggaatgtcgggaatagtcaagattttaaaattgacaaaaatacagtgtgggcaagggcaaaatggtcatttt

SEQ ID NO: 335116 - DNA, 727 bp, Cannabis indica
tatcgcaatatatctttgtagctgcttttcataattctcccacgtcttcaagtattcttttgagccataaagcttggcttgtagtcattgctactgcaatgtactttgcttctgctgatgattgcgcaacagttgcttgcttttgatcccgagaaagtagtgcatatcccaggtcggtcatctcaaaatttttcatcatgttttgtttaaacttttttatcatcgtctcattattgcttgtgtagatgagatcatcaacgtataatgagacaattagagtatcattcgtaccttgagttatgatgtatagagttggctcactcttgctcctcctgagtccttgctcggtaaagtagctgtcaattctgctataccaggctcgcggagcttgctttaggccatatagtctttttcaatctaagaattttatcttcttgtctttgtgctacgaacccttgaggttgctctacataaatttcttcttcaagataaccatttaggaatgctgactacacatcgagttgaaaaatcttccatttcttctgtgtggctagagctattttagccctaatagtgtcaaagcgtgtaattggagcaaatgtttcgctgtagtcgactctgtattgttgtgagtatcttttcgcaactaatcttgctttgtgcttttggatagagctatctgcgttgagctttgtcttgaaaacccacttgactcctatagtatctt

SEQ ID NO: 335117 - DNA, 874 bp, Cannabis indica
ctccaaatgagctgattcaagatgcattggaaagataaaaaaagagatctaaaacttttatgttttgacttcttccaaaatctgattagaacatagtcgaattcaggcttaaagtttcagctttattctttttcaaaattttctttattttatagatcactgttttctgaaatttgtccaatttatacattccaagtgtataaacctaaaatcaaagaaaacaagcgtaattctattccaaaaataataataaagaagaaaaacaactataaaatgtgacccgaaacttaggctaaaaatagcctaacagttctccggtcaaatagctccatgcattaggacacattcgtctcccattcactataggaaagtctgatgatcgacatggtgatgtcccaacttttagtgattgatgtcccatttgctttccatgtcatgacaggcttgagattttgtgccctaaacaatatctaatttaatgtaacatatttactttcaataaagatcaggaatcataccacgactttgtcatattctttgttcacatgtttatatgtctttaatatataagttctattaagttccaaacatatagttactcacaattacagtgatgtcatcacaatggaagtaattgtgattatatgcttcagattatttagtcccacgatatatttatcagtgcactggatttacactaacgtgataatcaacgataaggtttatgtatacttgtgtaagtggaatatcttttccaagacattagtaaagtaaatcaggatcagatgtattagctatacatcagactgaatcgatattaacagtggaaaagatatcataaacttaccattatatctttgttggaaattatttt

SEQ ID NO: 335118 - DNA, 508 bp, Cannabis indica
ttagcatcacccaagtagtcaaattcggcctgaggattagccttccaaaagttgaagaaaagctcaagatcggctgtctctagagcattaaccttctctttcaacctcgaaacctcggccgaaagctcctcctccttagcttccttctcctccttcacccgatgaagaactgctcgaacagaagtcctctcatcctgaagactgttcacttcagcatataaggtctcgatggtctcctcaagacggtcagaaacctcgagatccttagtcagctcagttatcttcttctgggtggaaaacaacttcttgttgacttcaaccaactccaaccgaacaactccgagttctgccttggcgtcttcagcatccttcctggccaagtccgcctccgccctcatggtgtcggacagagccgtgttcctagaagcggcagacttagcccgggagtaagtgtaggccaacttcagaccggcttgcacaaagaaaaactttagcatttgagctaagt

SEQ ID NO: 335119 - DNA, 763 bp, Cannabis indica
tgtttatttcattgttttagacttcatatttgtatgttaatgaaacatacttgttagtaaatctagatcctggtaaaatatatccaacacgtgtatgataataatattgtcagtattatctgtattatcttatgcaaaatatatagtgtgtgtattgcatatttagttaagagttttattttctatttataatattttcttaagggttgagtttagacatttaagatagactaaaaaagataaaataaatatgcctagaaacaatcatagctgaaccttatagaggcccaatgagtttcaaaaatggcaattttatgtcttgacttatttttttttctcaataataccatttttagttctaagcctttaaatatgaattttgtctatttaataataatgacaaattatcaaataaaattaccatttaacttatttattaattagattttctaaagtctcataattaataaataaatcctaaatttctttttcttctcaaatttatctttacttagtggaactcataattaagacagagtattatttaaaattttaattgattaattaaaactaattaattgattctacaagacaacattatctctggtagtgtggggaccataagactatataatcaagcttttaatatatagttctagaatttactgagtaaatttcctatcttattaattcctcatgataaattctgaattatattcttaattacataagatgctctattcactaagaatagatacgatat

SEQ ID NO: 335120 - DNA, 530 bp, Cannabis indica
tccaaattaagcggcattagtacgctctcgtttatcatgaccttatatgccaaatcttggtttcgcaggctgttcaaactagatggacgccaggcgaaataccaggagtcagggcaactcggtcgggtgaaatgaaggtcagggagctcagtttccccaaaatgctaggggccgaggtagagcttttaggggcagggctcgtggccggggtgatgttaacccgccacaggctgcccaagccactcaggaagcaaagaattgggaaactaggtttgtagaaatgcaagccagaattgaggaacaagataatgagattcagcggttaagacagcagggtgctcctgcagtgcctgtaccagaagttccagtggcacctgcccctgttgtccaggccgaaccagtgttagcggtaaatagaattgaaaccctgtatgaaaggttccgcaagcaggcatgtaatacccaaaattaagaaaaaatttagcaaagccctaattaaataattatgaataattgaggaattatattat

SEQ ID NO: 335121 - DNA, 803 bp, Cannabis indica
gcattttcgggtgcacttatccaccagctcttcatgcataagatcaaatcagataaggatgatgaggtgcattttcacattgcaaagaagagatgtcgattcgcccgagctgagtttgccctggtgactgggcttaacatgttacgtggacctactgagactgaggttgaagagaaggcaaagtcagaccgtttgatagtagaatactttaatggagatccatccatcagtattggttgactgcgcagcgtctttgagagttgcactgagaaggatgatgtttacaagctgggtttggtgctgtttgtgatgggtgttttgactgggaaagaggagaagatcctagttccaccatttattatgagaatggctaacgaccttcctttttcctaccagtacccgtgggggaaaatttctttcaacttgttgaaagatacttggagtaaggacttcgtagaaaagaagaagcatgtggataagaagattgaaaagggaacaactcagaaggagtcgaagtactctgtctatggatatgttgtagcattgcagtattgggcatatgagtccatcctgaagcttgctgagaaatttgcgatcagaaaatcacacagctttcctagaatggtgaactgggagagtaaggaggcgccactcgggaaagaggaagtcatcagattgtttgcaaaaaatgtaagttttttaattcattttatttgttcacgtttatttatttatttcattttaatccaagtttaataatttttttgttcttatttgcagttgacagtgtactccattttatg

SEQ ID NO: 335122 - DNA, 648 bp, Cannabis indica
tatgcctgtgttgtcttttcaggtgtgttctgataggctggcgcggtatagtcacacccgggaatttcgagccgaaccgggttcgggcccgaaatgtagattggattgattatttggcatgttatttgacatgtgataatctgaaattcttttggcaatatttgagtgtgaaatggcatttatccccttgaaattgagtatgtatgttatttagccctaagggaaaaatggtcatttgaccataagggatttactttgaattaaatgatttttgaaaggaaaaaggaattatttttctggatttatctctctctcacccgaaccctccctttccctaaagccttttgattttcaaagttgattgttgagaattgcttggagttgggtgtgaattggagctttggaattgtggattcttgagcttggagtttaggtaacttcttgctgagtttttgtagaattttcatggtggtatcttgctgaaattattatggaaaagcatgatttaaatggtatcttgctcttatgattgcatgttattaagtgttgctataatcttaatgaattgagtgtgttaatctttggatttgagttcttgagcatggattttgattatagggtattttctagtattgaattatgtgttac

SEQ ID NO: 335123 - DNA, 812 bp, Cannabis indica
agacaacaaaatcaaaattacccaaacagcagagtgatgcagataaaaaaacacaaactaaggaaaagaaattattagaacagaaggaaaaatcaataagaaaagagagtttatcacttactgttttgatgaaattttctgggcagagggaaacttcgcgatcgaaactctgaaggttgtaaaactgagtcttgatgatttctggaacaaaaggtgtaatcagatgaaataggcaaaaatataagagatagtgaaggcatgcatgattggggaaaaagtggttgagatttttgctaaaagctcgaaggtccgatagttgaaaatggcgaaaatgatgtgcaactttaattttatacctaataagtgatcactgttcgatcaaagggaatctgatctaacaggtgggaactatacgagaatggaatggtcagaacattaaatgagtaatgatgtgtctcgaagttttgaacagccaaaattttaagcatgcattttttaaacatgataaatacaattatacccctagaagcatttaataagttcttattaattaaaaagcactttttagggagcaattgttaaacctaaaattcgactgttcattggaaaccaacacgtgtcctacaaaaggtatatggatcagcttaaagaatatgataattaaattgcattaataaatgcgatttaaataactcgttccaattaattaaagttgataaaaatattcaaactcactgagtacataggcatatgcgagataagaataataattattaatgaatttaattgacgagacaatatgtctgcctcag

SEQ ID NO: 335124 - DNA, 769 bp, Cannabis indica
gtaatgggttttatttagggcacaaaacccaaaaacctcctgggtttgttgctcagggggagttagagtgagtttgccatcttcgcaaatctttatatgggttgaaacaaagccctcgtgcttggtttggtaaatttagtcaggctgttgagaaatttggtttgttgaaaagtaagtcagatcattctgtgttttataaaagatcaactgctggtatcattttgttagtggtgtatgttgatgacatcgttattactggaaatgatactgaaggcatctcatcccttaagtctttcattcacacccagtttaacacgaaagatttaggggagctcaagtatttcttgggtattgaagttactggagtaaacaaggtatttttctgtctcaaagaaagtatgtacttgatttgttaactgagacaggaaaattgggagcaaaaccttgtaatgctccaatgaatccagctgtgcatcttacacgtgatgggaaaccatttgaagatcctgagaaatatcgcaggttagttggaaagttgaattatctaactgtgactcgtccagatattgcattcccggttagtgtcattagtcagttcatgtcttctccaacaattcatcattgggcagcattagagcaaattttatgttacttgaaaggagcaccaggacgaggtataatttacaaggatcatggacatacccagattgagtgtttctctgatgcagattgggcaggctccaaggtagatagacgatccacttcagga

SEQ ID NO: 335125 - DNA, 810 bp, Cannabis indica
taggagagataggtcagagtccaaagctcttctggaatctcaccaccaacatccattttagaaatattcctgcattgtgattataaccaaaactaaatcacaaaataaagttggatcatatatcactttaaaggatgttcacaacagcctacgccaatttctattattaattttaccattaaactgtgggaaattacagttagcatagaccattacctctaagcccaagaagccttcatattgtttttctttaagaatttttttgaatattagtccatagaaggcttatttttttttataagttgaggtatatatttttttatctattgattaaaaataccgtcatgttatattttataaaatatactgacttttatgagtgagttgcctaatatactatcactctttacttaaatctatcatataatttacattaaccaaaaggatttaatagggacatcatctataaaatgggtatattttaaagaaggctaattagcaatttctcctcccgaactttgacaagtactaaatcatgcccctgaatttttttgaccgttaaaaattcctcctgaactattaagattgttagatttaaggacttttgtctaattttagtaaaaaaaatactaacatgaaagtttaggagtataatttagtacatatcaaagtttgagggcacgatttggtagatatcaaaatctggagagcatggtttagtacataaacaatcactgaaacagtaaaattgaatgaaattagacaaaagtcattaaatctaacaatcttaatagttcaggggggattttt

SEQ ID NO: 335126 - DNA, 546 bp, Cannabis indica
gggcataaaacccaacaggaagaacatggccttcatgttgctccttataaatggtttctttaagaataccattaaggaaagctgtcttgaaatcaatttgccaaatttcataatcgaaagcggctgctatggagagaagaattttgatggagagaaaaatccttatagtccacaccttctctttgggtataacccttagcaaccagtctagctttaaaagtttcgacttcgcctccaacaccttttttcttcttgtagacccacttacatccaattggacgataatcatcaggtgcatctacatattcccagactttgttctttttcatgaaatctatttctgaatccatgccggctgaccattgtttctattccaaacttgccattgcctgtttatagattaaaggattgtcatcaataccatcaccaacgaccatattgatttcaccatccaagccataacgagatggttttgtgaaaaccatcccactacgacgaggagccgtgatcttcttaacaagaacattagtggtagatttctcaatt

SEQ ID NO: 335127 - DNA, 1846 bp, Cannabis indica
taggtcttatttattaattgaaagtactttattaagtactaattaataaatatattaaatagacaatattatttaataagtttttttttagtattaaataattggaattggcatttaagtggttaaattggaaaattggcatttttgagaaaatgggatgggaaaatgacaaaatggcaaaattgcaaagtgggcccaatccacaatccatggccgaccacacttagtgtaatttaccatttatttttctattattttaatgttaaataaatctaacctaaacctaggtggttacctataaatagatagtgatggcttaagagaaaagattgatgatacatcacattccttcagtaaaattttaagcctcctattctatagcaaaaccaaaaccaccattccttctcttttcttcttcaaattttcataccttgagtgatagagtaagtgcccacacacatcaagtggtatctcaatcatagtgtggaagactgtgaagaatccaatcaacaagaaggaggattgggctcaagaaggagagaaagagatccaggttcagatcttgataatgctcttctacagaaaggaatcaagggctagagatctgaacggaaggagtcattatattctgctgcacccattataaggttttctgaaacccttatgtgtttatttcattgttttagaaatttatattaggatgttaatgaaacatacttgttagtaaatctagatcctggtaaaatatttccaacagcagcctcttcgagccaagtgcctgagactctgcccatcgagagtgggagcgctggctcggagcattctacgcagtatgctagggcttgttggcgtcacctctgatccttcctgcctaacgactgggatctaatcaacaatggcagcctgaacgagatgctcgagaggagtgtccttttggtctctcggttagtttctttacccttctcattttgcttttccttctaacaaccttacaaaatacctatgcatttctttttatttattttcagcaaaccttcatctcttttgtcgcccaatgtcggggtctcgacaagatgagacaactggaaagcgagatttagaagaccattgggcagcgtgaggtcgtggccagggaatggaacgaggctcagtcggagatctctcgcctaaataaagaggtcgaggaggtgaagagggccaacaaagttgaacttgaaggaagctcaaaaggaggccaaggacaaatccaatttgtgccaaaagctccaggaagaactcagtaccgagtataggctgatattatggttgacgctatcacatcggtacgactagagtatgactagagtgtcgagtataggctgatattatggtcgatagtattgtcttatgaacgttctagactcagtaccgtgttagacacggggaaagggttatggttgggtgtatgaacacctgattataattcggatttttgttatgttaatgattatgctttccttactgagtctgtcgactcacagttgctacttccatgtgtaggtaaaggaaatgcaaaagctgaacaaaagtgagctttgagctaggatggtgtttgtacatgtcatggcgacgcaacctggagtgtttggtctcgggacatctaggattttattttgtagtcgctgtgcaaccagtttaaaaaatattttgataatgttgtaaaaatttaaatacgggatcccgacttctgtgaataattgtatgaaagtttataaagtttagcaattaaatcaaaagttttaatttaacacgattttcaagaaaaaaaaattaattagcaaaggtaacactgtaattgaaaaattat

SEQ ID NO: 335128 - DNA, 936 bp, Cannabis indica
ttggctctttaatggtgaattttaattttgagcatgctatgttgttatgttgcttgggttatgttctttggagtataatatgcaggtctagaaggtttggtttcgaattgattgacatttcgaatatttggggttacctggtgcaaaccgtttaaccagttttacaggccctataaaaccgattaaccagatgagcagctaggttctcgaacttttagtgttgacgatttgtgttagtttcagagctttagttggttaattccctattagtttagggtatttccatgttaacttttagtaggaaagcttttggttaaaaacctaagtccccagttgtgatttagcatgtcacttacccgtgttatgaacaatgtgatttaggggcctgtaactcgccgagcagttgttccactcaagttggccggcacacataaatttggaaacaaggtaatattagtataatgttatgcatatgtatttacatgtttagcatacatgttgtttatgcctgttagagtacattgataacagtattaatatacatagagttgtactagatactaataaatgtatgtttggctaatatactaatcgatgctatcacatcaatatggctagagtatgactggcatattaagtataggctgatattatggtcgatagtattgtcgtatgggcgcctgattataacccaggatgtaattatgtcttatgttatgcttttcttactgagtcggttgactcatagtttctatttccatgtgtaggtaagggcaaggctaaagctgagcaaccgtgagagcgagcagatggagattgtacatgtcggggttttaggcctagagcatacggtctttgggacatcagggcatatgttatataatcgctaggcgataaacttttgtatataaacagtgaaacttttgtaaatgcttt

SEQ ID NO: 335129 - DNA, 697 bp, Cannabis indica
gaaacaaataattatgatatagaataaatataatataattacaaaactttattatttatactttaagataatattatgcaatagatgcttgcaccttggctaagtttaatgctagtaaattaagttgaatagaacaaaagtttcttaatttaaaataaaaatatgaaaataataattttgttagacatatatatcctataatatacaatgtgataaataatttaaccaagttgatcatcaacattcatttattaatattattaattgaaagttgtcaaatgatgatggcccttgtttgccactaatactaaattattattatcattaaaataataaattaaagtaatacacattttttttgatcctaattaagtcctctagagatcggataaataatttcaccatcaattataaaatcaaaaacatcaaattaattctccaccatgtttatggtgatgattaagattggttggaggtaatgaaatggaatagaatagaaagaaaacaatttacattccattcttttgtttggttgcagttaaaaccattggaataccattccgatggaatgacctttccattattttggtagaatggctattccattttgaaatggaaggaaaggtcattccaatgcaagatttgaaaaaatttaataatttttttatcaattttttatgcattttacattttattc

SEQ ID NO: 335130 - DNA, 513 bp, Cannabis indica
tcattacttcgcaggtgcaaattgggggttgtgccgtcagactttattgcgtgtagcagtcccaacatgtttcctcccatgcggcattaaatgtgaaatgactgctcagaggaggcccgacacctcgcggagatgctttaatgttacttaggcttccgagagcatagggggctccgtatgccttctccgggaggcgtctcccggatgctgccttatttcataaagacttagaaaatgattcacgtatcaagatgttttgatccacgtgtccgtgttcggttggtccacgtatattgggcaaaatcaggggcaacacttaccttccaagccttctttatttgaaaaataaaacaaggcttgtttaagtgcctccggttgactcctcgatttcctggcacgtgctttgggtgcatgaaggtgcatttaatgatcaccattaatgcagtgattcactttttgcagacgtcgattcgtttcatgcccattgattgatacggcgcattaatggtgtca

SEQ ID NO: 335131 - DNA, 1072 bp, Cannabis indica
tttctttattatgtgtaatatatgtatttgtaattactccttttttttgcttagcctttgtgatcacgggtgctttgtggtgcaagaggtggaaagaatctgtgttcagccatgagtcagaggtctctcagtgatgtacatatcaactgcggagttttggcttccagtggacaagatcctcccattaattatgtactaaattgtaatcctattttcgtaatgccgattttgagacaaaaatgtaaaagtttgcaaacaggggatccccaaatccattagtgttttgaatgaaaatatatcttgtagtttaatctaaaaattttaactaaaccacacttttcttaaccagattagattaattataaaacttatttgtaaaggcatacacacgtggcattcctgtgagacagagtcagaggtctctcagtgatgtacatatcaactacggagttttggcttccagtggacatgatcctcccgttaattatgtattaaattgtaatcctatttttgtaatgccaattttgagacaaaaatgtaaaagtttgcaaacaggggatccccaaatccattagtgttttaatgaaaatttatgttgtagttgttgggttttatgccctaaataaaactcaaattcaatgtaatccgtattattcaatatcaataaagaaacagaagtatttttcattcatttgtgtaatttttggttcacattatcatttacttgttaatttgatttataaattcatccaaacccttttcatatttatattcttgtttattgtgtcgttatcacagtggaaagtaatcaagaatatgtggataaagattcctagatctatcagaacacagggttttactaatatgataatctacaacagagtttacttgcatttggagaaatggtatgttctttccagagcattggttaaagtaaagcttggattggatgcatggagtatgcatcggaagggaccgatattgaactttgacacagatttattatctattcaattcaatatcccctagttgatcctagatcaaatgatcttaatcctaatatgattaggtt

SEQ ID NO: 335132 - DNA, 714 bp, Cannabis indica
ttatttatttattttatacattaaaaataatttcaaacaataactaataatattttttcttcaattatttattgtattatttgtaaataaagtagaaaacatctaacataaaaccaagtatacgtgcatcgcacgtacctttcctctagtatatatatatatttatatatatatttattggtaagcgaaaaagaaaaagaaaagaagcaaaccctcacttctccttctccttctctcgagcaagaaaaagctagctaagggaccaagttctattagcatttcctatccaatttcatcatttttcatcataagttgcagctagaagaagactctagttggaagggaacatcaaggtaatgaccttagcttattcctcctttatttttccatggaaacaataggttttggagggtgagttttgtgttgtagttgttgtgggtttatcagggttttgtaatgattctaggatagaatagatgtgttcttgatgttcaaaccagtaggtttgctgcagtagtgaaggtgagagtcaagcttgagtttattgaacttaaagtttgaactctaatggtatttttcatgttatgatttgattttgagttctatcaattagaaaatgttattttgatactctagaaatgttctgtgaagtttcattgcaattggttaggtttggagttagtttggagagtttaaagttgaggtaaaatcgtg

SEQ ID NO: 335133 - DNA, 648 bp, Cannabis indica
ttctagttccattttgcgattctaggttcgagtttgggttttagttcgggtcggagttcgagtcctcgtctgaatttcggttcgggtcctgatttcaatctaggtccagatcaggctctgggtgtgggttcgcgtcttgggtcttggtctaggttgcgttcgagtcccaatttccaatcccggtctgagtcgggattcagttctgggtataagtccttggttctgatcatggtctggtttcaagttggggtccgggtctgggtctagctttgggtctaattctaggtgtgggtttgagttcgggtccgagtctgcgtccgggtttgtgtccatgtctggaccccgatctgggtctaggttcgggtccaggtccatgttcgagtcccgagtgcggatccaagtttggctctgggtcacgatcttggtccagatctaggtccaacatttcgatcccagttagggtctttgtccgagtccaggttcgtattcggatccctatctacgtccaagtctgtctttgggatcaggtcccagatttaggtccttgtctgggtctcagttcttgtctgggtacacgaccatgtccaggcccaagttgtagtctcagtttgggtctgaggctaggtctgtgttcggttctaggtctgg

SEQ ID NO: 335134 - DNA, 676 bp, Cannabis indica
ttttctcatcttcctccgtgaatgtaataggaggctctttggttttcaccttcttggaaggttctggggcaaaggccgactgctcattctttatttctttcacatatcttttctgggcattattgctttcccctgcgatatgtggccctcccgaaataaccaagatgtcctctccctcaacgggaataggttgtaaccactagttgtttgggttattgggccgactgggttggttgtatccatggccctgtcttttcacgtactgcttaaaatggcctcgagcgatgagactttctatctcatctttcgattggcaacattcgtcggtggtatgcccaatatccttatggaatttacaatacttgttaggatccctcttactactcgaattcctcatgggctcgggcttgccaaaggccaccttctgctcatgtgcaaggtaaatattctctcgagtttcattaagctcggtataaatagtatagattggcacgtacttatcatgcttcttctgtttctttttatccttcgacggttccttaactccgtcctttctcttcgaaccagaagccctcgagttatcaattctcatggaaagagttcctgttgaaacattgctgggtttgccttctgagcttgttttcaacaaattcatttccttttgggcttcttcctt

SEQ ID NO: 335135 - DNA, 1462 bp, Cannabis indica
aaggcacgattggttgtgaaagggttcgatcagaagtaatgtattgactttgaagaaatattttctcctgttgtgaaaatgtcctatattagagttgttcttggtttagctgctcgcttgaacttggaagtagaacaacttgatgtgaaaattgcatttcttcttggtgacttggaagaaaaaaattacatggagtagccagagggtttcaaagtcaagggaaaagagaatcttgcgtgcaagcttagaagaagcttatatggactcaaacaggcacctagacaatggtacaagaagtttgattccttcatgtcgagccatggatataccagaactacttctgatcattgtgtgtttacaaagaagttttctgatgatgatttcattattcttctgctgtatgctgatgatatgttcattgttggccatgatgtcagaaagattgagaagctaaaggaagagttaagcaagtcttttgctatgaaagacttaaaatcagtgaaacaaatacttggaatgaggatttcccgtgacaggaagaatgggaaactttagttatctcaagaagcttatgttgaaaaatttcttgaaagatttaacatgagcaaagctaaagtagttagttctccacttgcgggccatttcaagctaagctccaaataatgtcctacaagtgagaaagataaacaagaaatggtatcaataccttactcatttgcagttgacagtttgatgatgctatggtttgtatgaggccagatattgcttatgcagttggagttgttagttgattcctctataatctttggtaaggatcactggaaagcagtgaaatagatattgagatatctacgaggtacttccaggctgtgcttatgctttggcagtagtgaacttatgcttgatgggtacacagatgtagacatggctggtgattgtgattccaggttatccacttcaagattcttaatgacatttgcagggggagctgtttcatggcaatcgaggttacagaagtgtgttgctttgtctactacagaagctgaatacatagctgtaacgtaagcttgtaaaaaagctttatggatgaaaaagtttctacaagagttgggcatgcaacaagaaagatacattgtctactgtgatagtcagagtgccattcacctctccaagaattcaacattccattcaagatccaagcatattgatgttagatatcatttgattcatgatgtacttgagataaaagaattacacttagaaaaggtgcataccagtgagaatgattccaatatgttgacaaagactttgcctaaagagaagcttaaagcttgtaagcgaagagcgggcttaatagagccaaccaactgaggcggaggggagattcgttgggtccgcccctttgttgttggacttggaccattaagggcttaaggccgaaacctaaaagaaacaaccaaaa

SEQ ID NO: 335136 - DNA, 746 bp, Cannabis indica
aatgacagtgatgaaaggagaatcaaagcatggcctatactctctcattgggagaactgtcattggaagtgcagcaccagctgttgcaggtcaaaatgatgacactaaactgtggcatctcagattaggccatgtaagtgagaagggaatctcagagcttgaaaaacaagggttactcaaaggaaaattggacacaaaattgcccttctgtgaagaatgtgtatttggcaaaagttgcaaggtgaaatttaccacaggtcaacatacaaccaagaacaaacttgattacatccacttagacctatggggtgcctcaagaaccaaaaccttgggaggagcaagttacttcatgagcatcattgatgactattctaggaaggtgtgggtgttcctgttgaaaagcaaagacttggcctttgagacctttgttaactggaagaagttgattgaaaatcaaactagtatgaagataaagaaactcagaactgataatgggttagagttctgctctgatatgtttgcaagttattgtaggaaagaaggcattgccaggcatcacacagtggtcaagaacccttagcaaaaatatggccttactgagagaatgaacagaaccttgttggaaagggtaaggtgcatgctcataggagctggtttggcaaagcatttttggggtgaagctctaaaactgcttgctatttgataaatagatgcccctctacagctctgaactttaaaactcctca

SEQ ID NO: 335137 - DNA, 1066 bp, Cannabis indica
ggtgatgatgtttgcatgatttaagtggaaatctacataagcccgaattgaaacttttataagtgtcgaacagagctaaggacactaactgtcgtaactgtcaaaacagtttatattcttataactaactaataacctaatacttgtatcgagtacaagtaagtgtgtgtatgtgtatattacaagggcaatcaaacgcaacatgtgttttcaagatgtaaaagcccatcttgggtggaatgtgaatatcgtaaagtgcttttcaatttagtctggtggattagaagagctcacatttccaaatttaggaacatggttttctcagcatatatttggcagccatggtctacttaatttggacagttcggaataccgctttgtggcatgatcaagtgaggagagcccggattcacttatacaggatataaactatatgtggttaaacatagaatatagtatcatgcccaaaaaaaagtaaatagtatagataaaaattgctttgacactttgtaaatgggtatatagttccttaaatagttttacaatcaggccttgatgagaaaaaaaaaggtgttgtatatatacttgtaatggaacaaaaacaattacacgcgaattgagtcgactaacaaaatttgtaaaaaaattattttttttcttttttcactccgctatagtttctagttccgtagttgtgataaatctatgtggcatcttggtattttgtttggatgggtctgtggatgaaaacggatttggtggcatacttaactcttcacttccttccaacatgatttgaactacaactttcatggttggacggacgatctattggatggcattgaatacattgaagtcctaccattgctagtttttttgcaattttaccatctcctccttcatcgatatagattcgaaggtcctcaccttcttctaaaagattgaaaatccattcaggatagtaaatttcatttgtattattacttcttctctctcctataatttcgagtaatagcataccaaaactataaacatctgacttgtaggagacattaccgaagtttct

SEQ ID NO: 335138 - DNA, 627 bp, Cannabis indica
ctgaattgtaattttgcttgtttttgacagctgctcgaaaagacctgcccctactcctgagatggccgagcgacgcaggctcttgttgactctcccatacggtcttaggtcatgtgactttcttctgagcgaggtcaacctgaggtctgtggatctcctaaatgacaaggagtttacttgtgattataaatatcccaagtactcttcttggcaggaggttcctgtcccagacgaggagaaagcccaagatcgcgtggctcgggcacaatacctccagagcactacccctcgggaagccgaagaaggagcatcctgaggtaatcaatttggttggtcatccatagtgcttagggccgagcgtaatactgtagtttcatttcgagatagccgctataacttttacacctggaatcccctcctcatagatcatattacagataggtttgatagttggtatcccaggttccacgtccaaattaattgtactgagtcgtactatgggatagccgagtagtatgggaccatgacaaatagggcaagtcatttagacgtgagcagggatttagaaccaattaatccctatgatatattcaggatcacaggttgtagggattttagtggatatta

SEQ ID NO: 335139 - DNA, 492 bp, Cannabis indica
aaattggacttttggggaaaaaaaaccaaaaaaaatcgcaatttagggttggctgcccaggaggctgcacgtgcagcctccaaaggctacaaactggcccttacgcgcgcggagctggaggggacgccgagtaaactcggcgctggcaagggtcacacgggcgtgctgcagggtcatcgtgggcgaggtgcaggattcacgcgcgcgtagagggggttcttgaccgagggtctggtgcgcatgagcaccaccctcgacaccattgaaccccgatttttccaaaattcataactacttcatttttcatcggaatcgagttccgtaaaaacaaaaattgcttaatttttgacaaggaatctaaataaaatattttcaacaatagaaaaaatatttttcatggaaaaaatttgtacaacacatacaatcatcacataagcacataaaccaacatgaaaccatccaaatcaatacaaaatatcgttttaattcata

SEQ ID NO: 335140 - DNA, 1116 bp, Cannabis indica
gatatattgaaatacaaatcttcctttacaattcagacttaatttaatacatcatacagagagtccaaaatctaatcacataatccatcaaattaggaaataaaattgttcaagttattctaaacaaaaattgttataaacgtcattttaccacttgactaatagcaatactcagttaaagaaattcatcatagataatgttgattgattttcaaaatgtagattttataaaataacaaaaatgtagataattatatatgcacgtattcacccttctctgactgtctctctctgtctctttttaaatgtatgtattcaaattaaactaatcaaattttatcaactattcaaatttatttattattatgaacaaaattagtagacttgaataaaataatttaagatttaattaaaaaaaattagatcgaataatttataaagattggattttttttttataaaataaaaagattagatgaaatataataaatacttaaaatagaggacacttcattctcattaacaatgaaaaaaaaaaaattagataataattaaatcaaaatagcaccacatcatttgatctagaaatttgttaaaaagacaaatactattttagattctatattttataaaaattaccgattagatttactattttaataaaattggtttttttatcaaaataaaagttaataataatctgatcaagaattgttatgacaaaattgagtatattttctgcatttattcctgttaaaaattatctttaagtttgttataattaaaaaaaaaatgtcaaaaattatgcttagggtacaattttgtactattttaaaaaatataaggtttaatttgtcattttaaaaaatataaaggttcaatttgtaatttttacaaaacataaagtctaaaatagtattggcgacaatactacccaaactacacatttagttacacttaaccccacaaatgtaatttttgtggtaaagctctctgaatctcacttctgttttgctcattacacctatatctaaaaacctcagttaagtgttatagtgaactgcacacgtgacaaatttttagtagtccacgttatattaattattaaaaaataat

SEQ ID NO: 335141 - DNA, 502 bp, Cannabis indica
cttcttcttttagcgcttggtacctaaatagttgttctcgctgctgaaaagtcaacttagaaccaaattttaaaactttactattatctatggggtctataggtacctaaatagtgtcttccgcggcttgggccgctgtggcatgatccaggatccttggatccagatctggtccttccttatgtggcacctcttcgatcctaagaacctcctggcgaggaggtggtgcctccaataaatagatgacatttattgacttcttttccgcgagcttgactgctgcattgtagcattctcgcgagtctgactggattcctcgcacaaagcctactccagcgggagtagggaacttcatcgtgagatgatagattgatgttacgatattcatctccttcaagattggtcgaccaatcacggcattatatgccgaatactggtcaattactgcgaagtcagccattgacttggctgttacaggggcagttcccaaggtaatcgggag

SEQ ID NO: 335142 - DNA, 616 bp, Cannabis indica
aagttggctcctcgaaagtttagctcattgaaaaccttctcttcgaaattccatgtggaattctcctcctcatgccaacttccattgcatttgggagacttggtcgaagttaagcaacgactaggtgagccactccgggcatacatcagcagattcaagatggaggcgaccaaagtttcacgggtaattgaggatggaaagttatccgcgatattgggggcatctaagtcctcggtgaactttggaaagatatatggaagaaagggacggtagactcaatgagtgatttccttaacaaagccgaaggcttcatcaagctcgaagaagccattcaacgagcggaagctgaacaaaagtcgggcaagtcaaaggctccttccactaggacatctgtccaacttcccaactactcaaataattcaagctcaagtggcaagcgttcaaccaacaaccacaagcaaggaaacaggaagaaaggaaagttcactgataaatccagactaactccccgggagaatcatgccaaatacactacattcactattctgactgaagatatagaaagtgtacatatggaaacacagtcgttgtatcccgtacaagaagcccgggccca

SEQ ID NO: 335143 - DNA, 1238 bp, Cannabis indica
aagccgcttaccaatgtgaataatcttagtgagcggcccgagaagctgtttaagaaagaatgcgacgacatcacctttatggagagtgatgcgagatgggtccatcacccgcattccgatgcactagtgatagtcgccaatattggcggggataatgtccatcgcatacttgtcgacaatgggagttcagtgaatctgctgaatttccaagcattcaaacaaatggggttgcaggagaaggatctgcgacctatgacgtcgagcatttatggtttttcgggagatgtcataacaataaaaggaatgatcaaactcccaatcactttgggaactgccccagtgacagccaagtcaatggcagatttcgcagtaatcgaccagtactcagcgtataacgccgtaattggtcgaccaatcctgaaggagatgaagatcataacctcgatctatcatctgacaatgaagttccctactcccgctggagtaggttctgtgcggggagtccaatcagaatcgcgagaatgttacaacgcagcagttaaactcgcagagaaaaggacggtaaatgttatctaccttttggaggcaccacctcctcgccaggagatcctcagaatcgaggaggtgccgcacatagatgaaccagacttggatccaagaatcctcgatcacaccgccgcagcccaagccgcggaagacacaattgaggtacctatagatcctgtagataataataaagttttaaaaattggttctaaattaaattttcagctgcgagaacaattaacgacctttttaaagcaaaatcttgatgtttttgcttggaaacactcagatatggtcgggatatctccgcaagtcatgtgtcatcgcttgaacattgaccccgaggtgcgaggtgtccgacaaaagcgccgcaaaatggaccccgcgaggtaccaagcgctaaaagaagaagtcgaccgcctccttgcctgcggctttatacgggagtcgttttaccccaactggttagcgaaccccgtactcgtgcctaagcctaatggctcatggcgcacatgtgttgactttacagatctaaacaaagcctgtcccaaagacagctttccccttcctagcattgaccagcttgttgatgccactgcaggtcacgaactcttgagtttcatggacgcatactcgggatataatcaaatcccgatgtatgaaccagaccaggagcatacctcgttcattac

SEQ ID NO: 335144 - DNA, 805 bp, Cannabis indica
aaggagtcacacctctagggaaagttttccaaccctgcactgttgggcatgctctgatgatcatacctataatggcacaatttctagtattggacgttccatcagcctttaatgtcatgctaggccgaccagccttgtatgatttaaaagccattacgtcaatattgcattcatgcctgaagtttccaacaaagaatggggtagggtgtctaagaggaaaccagcagattgctggggaatgttataacctttctttagtcaacgctagacaggaagtatcctccagcaagagcacgggcaagggaaaaaacatttctaagtagggaacttcccaaggagggaatgaagatgtggatcctcaactttgggacccaagaaaaaatgttggacctgtggaagaactagaaaagatcgagatcgacccagatatcccagccaggaaactaaaaattggagaaggtttgttgctcaaagtaaaatcagcattgataaaatttttgagagcaaaccttgacgtttttgcctggtctcaaaaaggctggagccacatacgaaagattagtaaacaaaatcagataggacaaaacatggaagtatatgtggatgacatgctcgtcaactccaagaaggctagggggcacgtagatgacctagacgaatgcttcaaagtcctcaggaagtacaacatgaaactaaatcccttaaagtgctcctttggagtcagttcaggaaagtttctaggctttattgtcaatgctcgaggaattgaagccaatccaaagaagattcaagccctccttgatat

SEQ ID NO: 335145 - DNA, 1213 bp, Cannabis indica
atcatgattatattccactgtgctaatgaaactataatcatgaacaaatatgtaaatatatgttctgaacttaatataatttatacataatcatgaaataaatcatgtgaaccatgtaacatagaataatttttgatcttttattaattagtaaatctgattatattgaaatgagttttatttaggacagaaagctcaacagtttcaccacgtaactagattcccaccaacaaaggagcaataacctaatgtagatcttctatctaccatacttctagcccaatctaaatcaatataagcttcaatttctagatttcctcgtggtttgaacaagtgacctttttcaggcgttcccttaagatacattagaattttataaacaatatcgaaatgctttgaaccaggtgaatgcataaactgacttactatgcccacaaagaaagctatgtcttgtcgtgtatgggacaaataaattagtctcccaactaatctttgatacatcttccggtccttcatgttctttagatctagaggttcaagtttaacattaggttcactaggtgtttcagcaggtttgtagcccatcatacttgtctcacttagaagatccagtacatacttatgctggttaataaaaataccttctctggaccttgcaaactccattccaagaaagtatttcaaattacccaagtccttgctttcaaactcttcaccaagttttattttcaactttttgagtttactatatgttatacccgaaatttggctacactgcagaggatgacaagtgtcagttagtggaatatgaaccacctgatataataaagctatatcatttaaaaaaaaagaaaaataactcgttaaatatagaattaataaagtatattcataactcgctgactgtatagtcttaagcgagacaagaataaaaaattattaaaatctgtatcgacgagacacgagtctgcctcgaagtacatagatccaaagagaagattcgtttattttgaaggaatgagtgaagttacccaaagcaacttcagacaacatatagcgaggcgtccaccttgctattcataagaaatttgacaaggcgaattatttgttaaacacttagcgtatgttctgcattacaatagctaaggataacaacttggaaatatgcaagatatgactgtccagtctgcaaggccttatggtcaaagagcag

SEQ ID NO: 335146 - DNA, 545 bp, Cannabis indica
aggcctattgtagtgaaggccttctttgaacagcaagtttcacggaacctcccattgtaaatcaggactctggccacgatcttattggcaatgggggtctctatgaccaacgggtcatggtgaggaaaacacactgttttagcgtcttcttccgtgaatgtaataggttggtccattagccggggcatttgagctgggagttgagtaacttcccaaacctcatcgtgtttcacggcccctacgtaccgttttagctccttgcgggtagttcctccgatgtggggtcctctctagatcatagccactctcccgttgggtctacgtggcaggccgggagcatgcagggcatctccggggggaacaactggagccaatactcctgctgcaccccctggtgctccttgtggcaaagctccagccgcctgacctgggttgagatggggcaaccagtttttgatccactcgtagaggtgtcccaatcggatcaagttttcaatctcgtccttgagatttttccattcattggtgctgtgcccaatgtcgtt

SEQ ID NO: 335147 - DNA, 506 bp, Cannabis indica
aagcggcattaataagctcttgttgatcatgacctgatgtgccaactcttggtttcgcaggctgtttagactagatggacgccatgcagaacactaggagtcagggcaacttagtagggtcaaaccagggacaaggagctcagtttcccccgcatgctaggggccgtggtagaggtcccaagggcagggcccgtggtcggggtaattgtaacccgccacaggctgcccaggctgcccaagccaattaggatgcccagaattgggaaattaggtttgttgaaatgtaagccagaatagaggagcaagataatgagattaagagattcaggcagcatggtgctcctgcggtgccgatgctggaagttcctgtggcacctgcccctgttgctctggccgagatagtggtagcggcaaacagaatggaacccttgtatgaaaggttctggaagcaggcacctccggtttttctgggaggtccggatgtcatgaaattcgagcagtggcta

SEQ ID NO: 335148 - DNA, 535 bp, Cannabis indica
aatttagaatatgtctaatattatacaacacaactaaaaatcaagttcaataatcaagttcagtccctaatctcccaaatcgttaaactttgtccaaaagacaatcgcaagctctcaagtcccgagctccaattatttagtctaatcttagatattactctcacctatacaattaaatgattaaataattatcatcatcgcattctatattcaaaaccgagtccatcgacatataatatgactatatttaaaatttgaggttccaaaacctcacctaagcggtgcacattaatatcggtggcggtaaaaattggtgtaccggaaatattgccaaaaataatgtagtatatatcaaaaagactacctcgacgagtagatcacacccatgccaaccgtttgtcaaaactgtaacgatgtcgccaaaaattcaccgaataggggcggagcttctaaaatgtcatcgaaaaaagtagcgagctaggtgaaatagtttagtgtaggttgttcccctcgatgagctgagtttagtggtgaa

SEQ ID NO: 335149 - DNA, 811 bp, Cannabis indica
tacttaaattatatgtttcaatgaatgttcattgttatttagtacattgttatatacatgatgtttgtgttttacctgcttttcttgttgagtctttgtgactcacgagtactttattataatgccctaatgcttaggcacgctacattgaatttttaattacagtgtacacatttgttaataaaagggttttctcgaatatcgtgacaaatttaaacttttgatttaactttaaacttttataaatgtatattatacaaaaagttgggatcccgcttttaaaacttatatttattttcaaaataaaatttacaaacatgtcacacaacgactacaaaataaatcccatgtcgtcccgagaccaaactctccaggttgcaccatttcgacatgtgcaatcatccccgagctttgaactcactgttgttcagccttagcctttcttttacttacacatgaaaataatatttgtgagtcaacggacttagtaagaaaagcatataacatataatatattactgacttgtatttaggggcccatacaccgatccacaaggctaaatagatgatcaagaacgttcttaatagaaagtatgacatctgtaccacatgcactaagtactagtctcgtactagtgttggtacggctgaaccgtaacccgagtactactgagtgttgtaccacatgcactacatacttaaccatactaatgttggcaacaccagatcttaccctttgaacatggtatgctatactaatgcactcagtcccactactatactagtgttagtagcatacaaatcatacaac

SEQ ID NO: 335150 - DNA, 1044 bp, Cannabis indica
acttcgttgcttagagaaatagataaataaaggcgttagagcattatcaaaaatccatgcatccaggaataatgtaatgaaactaatcctaccctggtgatctaattctgccctagcaaaagtatgtatgaaaaggctggtgtcgtcgtcccttaggaagctatccgaggggaggaaccaactggaagataaataggtagaatgatccaaagggataggtgtgggaggaccggaccccatccgggaccggcctaaaaaatgactaaagtgtgaaaaataaaaactcttagcatgatcgccccatcgaaaatgggacatcctaaacctatgaagtcggtcatcaaattccaccggcctacaagtagagtaatcctgaacagaaggaacatggtgaacaatcatcggagacttaccagctccggaggtactggcatcaagagccccagtattagggaccgggaaaggaagcttgggccgggaggtcacctgctcttttccagcctcaatccaaaggaccctccctgcggcggcttgggccttgatgtaggccaattcttgttccctcctgaagaggtacttcttatatcggtcctctgcggatgcaatagtatccgcccggagcaccttctcggattcaggattgcgaacgttggggcaaagaaccttggataaattaaagtcatccaccgactggctctctgaaatcaacttggccctcctgcattttgcagtcgtgaccaagtccccaacattcaacccgtccttgtcgtatgtagagaagaccttggtgtgttgaaggaaaagttgagtgggaacgatgcgatgcatcggggggaccctaacccattcggtaagcagctccgagtgctcaatagcttggaagtaggaggagaagaaaaatcgatgatggtattccttaacatttttttggaaattaaaaggaacctgaccctcattagcaggatgggcatggagtttaaaaaaaccatctttgaatttgtctcccttcttggggacagataaaagttcataaaaataaagaat

SEQ ID NO: 335151 - DNA, 801 bp, Cannabis indica
gataggttggacgtttgctgatatcaaaggtattagccctcgaatttgcacccaccgaattaatctagaagaagaagctatcccacgaagggaccctcaaagaagactgaacccaccaatgaaagaagtggtgaaaaatgaagtgttaaaacttcttgatgctgctatcatttacccggtggccgatagcaaatgggtcagtccagttcaggtagtacctaagaaatcaggtgttactgttgtccaaaatgacaaaggggcccttgttcccaccaaaactgtgacgggttggcgcatgtgcattgattatcgaaaattgaatgccgcctcccgtaaagatcatttcccgctcccattcattgatcaaattcttgagcgcgtagctggtcatcctttctattgctttctcgatggttattcaggttactatcagattgagattgcattagaggaccaagagaagaccactttcacttgcccttttggaacatatgctttccggcgtatgccatttggactgtgtaatgcaccagctactttccaaagatgcatgatgagcattttcagtgacatgattgaaaacaccatggaagtttatatggatgacttaaccgtctttggaaaatcttttgacgcatgccttctcaatcttgaggctgttttaaaacgttgcatcgagaaaggtcttgtgcttaattgggaaaagtgtcattttatggtatcttctggaattgtcttaggccacattgtttctgaaaaagggattgaggttgatcaatctaaaattgacctcatctctaa

SEQ ID NO: 335152 - DNA, 521 bp, Cannabis indica
ctgaaaatcacccaaccggcagaccggttgtccaaccggaattccggttctgggaattttcaaaacccatccggaattccggatgcacaaccggaattccggttcctcgcaggcagaaattcaaaaattcataactcaaccaaaacaaatccaaacaacctcaaaccttccagacctgttctataggacccaaataacagttctaaagcaacaaaaccacccagaactcacagaatcaaaaatcaccattaaagcatcaagctttgagttttaaactcaaacttgatcaaacactaccaacatgcaatcaaaccagtccaaacctacttaaacatgcataaaatagcctctgaaaactactacaaacatcaacaaaatcacagcaacagattttaaccatttctctttgaaaaccatagttttgagctaaaaacttccaagcttgaaatcaaagcaattatcatgcattacactaactctaatctacttaaaacaacaagattaatccactgtaaatcaca

SEQ ID NO: 335153 - DNA, 760 bp, Cannabis indica
gccgcgacgtgccccagaggtggccaggagaacccacctcaagctccaattgattgggatcaaaggtttgctgaaatgcaagccaacattgagcaataagaggatgagattcgaataggcagcgggatgctcctgttgagcttcccccacaaccgcctgctccggttcctgcagcccctgcggtgccagctgagcaacacgttgctggtaatcgtatggagcctttatatgagagactcaggaagcaagcacctccagtgtttctgggaggtcctgatgtactaaaggcggaacagtggttgactgttattgaaaggatattgaacttcatgggtgtggttggaaatgatagagtggcatgtgccacgtttcagtttcaggaagatgccttgatatggtgggaaataatatcccttactaatgatgttgccagaatgacctgggaagaattccgggatttgtttaatgctaaatattataatgaggcggtccgcactgcaaagcagaaagaatttgttgagttggtacagggcgagggtatgtcagtgactgagtataccaccaagtttgattgcttggctaagttagcctctggaatcgtaccaacagatttcagtaagaaggagaagtatttggcaggactgaatgccaagattaggcatgaactggttattacaacaaatgatactgcaacctatgcagaaatggttgataaggctcttcgagctgaaggagcagtaaaatttttgcatgaaacccg

SEQ ID NO: 335154 - DNA, 570 bp, Cannabis indica
agggcataaaacccaacacttgaaagcttatgctctcctcaacagtaaacaatctactggagacttcaaggtcccaaagtattcagactggaaacgagttctagttcatgctgatgaagaagatagagattatgtggctcgtacctactatttgaagagcacaacccctcgagaagctgaagatgatgcctccgaggtaaaaactttggtactttaggaaggtccccatctatacttagagccgagcatactaccttagttaaatttaaagatattccgtacaacttttacatttggaattgtgtagatcgaattgctcataggtttgacagttggtattctgagcaccatgtccaattaagttataatagttcttacttcaagattgcccaacaatatggtactaacttcgatagggcaagccatccagattaagacatgtctcctctaaacccctttgatcttttcatgaaaactggttctaaggagtttagtaattattttggttcttcatcctcgtctgatgactatggtaattttcttgagtgggagattatctctccacatttt

SEQ ID NO: 335155 - DNA, 930 bp, Cannabis indica
aaattattttgaatttttaaaaaatttaaaggatattttaaataaataattaaatataatatacaatattgtataaaaatataaagattaaaattatttggatatcagtagcccatatagttattaattttgtggagttatatcaaatatttaaagtaaacggaataagtgatgatactatccgcttgagactatttccattctcgctgagggaacgagccaaaagttggttggtatccttgccacccaactccattgctacatggattgatttggcgacaaagttcttgttaaagtgttttcctccaactaaagctgccaagctgttaggagaaattaataatttttgtcaaatggacaatgaatctctctatgaggcgtgggagaggttcaaggatctcatcagaaaatgtccacatcacgagatcgaaaagtgaatgttggttcacaattttacaatgggttgattggtaataccagaacagttatagatgttgcagcttttatgcaaaaaagtgcaaacgaggtgtatgtactgctcgaagaaatagctatgaacaaccaacaatgaccaactgaaagaagtcaaacgaagaagtttgcttgtatgcacgaggtagatgtcatcaccaagttgacagcccaagaagaggccctgacgaaattgatgactgctcaagcgaaacagggctcaagttacttatgagctatgtgggggccctcacacatatggcacatgcccgatagatgtgaatagtttgccaatggatcaagcaaaagccatttgggaactattttcaaaacaataattatgagcacaagcaataagggctctaccagcagagaaatcagtctcaacaaaaccaacaacaaccgcaacaacaaagtcctagtggaggctaaaatatccaagctgatttattgctccaa

SEQ ID NO: 335156 - DNA, 663 bp, Cannabis indica
tactcttttctaaccttggcagttaactttccttttatacaatcaacacaggcagtgaaatcagagaagtcaagatcctgaagcacaccatctttcaccaatctctccattctatctttagaaatatggcctaaacatttgtgccaaagcatggaagatttcaaatatgatcttgtacatttagaaccaacaacaacattaagagaagaaaagggataagagagagaagtaacaggaacaacattatgtaaatcaagcttatataagtttccacataaagttccatttccaatcaacatagagtcgcaatacaaagtcagttttctagtttcaaaatgaagactataacgtagtttatccaaaatagatatagagatcaaattcctcctaataaatggtaaataagcaacatcatgcaactccaaaaaaatacccagtattcagctgcaatttaatactcctaaaaaattcaactctgtctttagtattgtctcccatgtatacatactcctccaacctactcgaccttctttgacttgtcattgcctgcaaagaatttgtaacatgaattgtagcactaatatctaactatcaagtatttgagggcacatcaataatattggattccaaacaaaccattataagacaattacctttcttctc

SEQ ID NO: 335157 - DNA, 542 bp, Cannabis indica
agaaagaaattagatggaggattagctcgcccatgctcgctccaagagctttcttcttgtatctttagggtaccatatggtctcccctctaaaattcgcgattccctttcattaaaatagacttttcagccgaaaaaacgagaaaagacgaagttatccttgacctgtacgaagtcggcgccacggcggctaatatcctcaccgcgacggctgtagaaaagtgaaaaaacggactttctatagtcccccgccgtggccactggacccaattttttctgcttcgacccctttcagtaaaatgggcatagctatctcatacaaactccaaatgagctgattctagatgcgttggaaagataaagaaaagatctaaaacttttatgctttgactttgtccaaaatctgaacggaacatagtcgaatttattcttgaagtttcagctttattctcttttaaaattttctctattttatagatcactgttttctgaaatttgtccaatttacacattccaagtgtcgaaacctaaaaccaaagaaaa

SEQ ID NO: 335158 - DNA, 1426 bp, Cannabis indica
tatgatggatgcattttcctcatcattagtgtttaaccacttctctttattgctactttcaatggcttctttgtaagaggtaggttctgagttttctaactcatttgctgctgcaagtgaaaatgcagcatagtctacaatgccatacctggcagggggtttaacacttcttctacttctgtctctggccaagagataatcatcaagatcttcttgagctttctgagagtcagcattatcttcttgagttggcatttcacctaagttgctgggaggatccacatcaatgttcaatttggtggagttgctatctgtattcagtgttaggacaagtaggggtttcattgccatttcttcctctctgaagattacatctctactgattatgcaccttttgaaacctggtttgagacaccatagcttgtagcctttgacaccatcagggtatccaaggaacatgcacttcaaggctctaggttccaatttgtcttgcttcacatgtgcataggctgtacacccaaagacttttaggtgatcacaattctgaatctcacctgtccatttctcttgtggtgccatgcaacttattattatagatggacacttgttaatcaaatagcaggctgtatgcaaagcttccccctaaaattttctttcaagtccaacacctttgagcatacatctaaccctcttcaggagggtcctgttcatcctttcagcaagtccattttgatgtggtgtgtctctaattgtcaagtgctttgcaatcccttccttgtcacagaatgccttgaattggttaacgcaaaattccaatccattgtatgttctcaacttcttaatgctttttccagtctggttttcaatcagctttctccacgtaacaaatgtgttgaaagcttcatcttttgatttcaagaggtaaatccagaccttccttgagaaatcatcaatggtgcttaagaaatagtgagcactaccaagggtaggaatcctagatggcccccacaaatctgagtgaacataggccaattgttccttggtattgtgcctgccaggggtgaacttttgcctgcaactcttgccatagacactttcttcatagaatcctagcttgcctgttattcttcctttcaagattccttgcttcttgagttcagcaatgcccctttcactcacatggcctagcctaagtgccatagcttggttaagtcatcatcgtctgcatttgaaatattggacactaaaccagtaactgttttcccttttagaaaatataggccattgttatatcttccctccataacaattttagtgcctttagtgattctaagcacattttcatttattttaatagaccatcctttagatgctaatgtaccaattgacaagagatttcttttaggtcagggacataccttacttc

SEQ ID NO: 335159 - DNA, 1636 bp, Cannabis indica
taggatgttaatgaaacatacatggtagtaaatctagatcctggtcaaatatttccgataactaccacctctaccataaccagatgtaagagaagtagtggctccaccaacatcttgagtccctcagggcacatgaacaacctttaaagtgtacgcagctagaaaagtattcatctcatgtaagtttctcagaataattgatttcccttgcatcacataatccctaacagttaattccattatgttaccagccattctctaatctactgagagcaacggaataaaagcaattggacttcagataaaggtacaatcgaagacctttgttgtctcaatctcttaatttcctcctcttgtcgttgaatcctagcttccatttcaatgaacttttgctccaaatctgttggaatcttcagtggatttttgtgaccacctccaaaagtctcttcacagtcttgagtaatagggggatcccaatctttctattttccaccagtattgctcacattagcccaactacatgattcttgccaaacgtccattctataggacaaccctgcacattcaagagtcgtctaggtcaagcagcaatcaaagtcaaaatctaattaccgcttattttggaaatttaaaacatgcacttattccgctatcacgctactaacatgcttcctatcaggcttttcttaaatcatactattaaaataaactgctaaagcaataaaggcttatttaaccgtgaggcgagttgatcgctatgatgaacatgtcgtgacgatctttggaagacaacctggtggctctgataccaaattgtaacaccttaactattttaggcatgttagtctgatttttaacatactgtgcagctcgttgctaatcaacgaggttatcgaaaatcatgattaattaaaattttacttatttaattgaaaacataaagttacatacatataaaattctgggatcccatttacaaaagtttaactatacatatacaaaagtctatcacctagcgactacacaacaaaagccctgatgtcccaaagatcatacgctccaagcctaactgccccgacatgtacaaccaccatctgctcgctctcacagctgctcaaccttagccttgcccttacgtacacatggaaatagcaactatgagtcaacagacttagtaagaaaagcgtaacataaaacataataatatcccgagttataatcaagcacccatacacccaaccataaccctaactgagtcaggaagttcttgacaaagtatgactacccgtgaatccagcatatactcagtactttagtcatagtgatgtggtagcaaattactcatactatctgatatcctagcatatatctgttggcatctcagagcatctctatgtacacctcactgatgccctaatatgataatgtgatggctatagattttcctattctgacagcaactgacatgtatgctaaacatgtataaacatgtgcataaaattatactaatcttaccttgtttttaaattctggtgtaccggcctgttgagtttgatgccctaaataaaactcatttcaatataatcagatttacttattaatatagataaaaaataacatttaatgttgcatggtt

SEQ ID NO: 335160 - DNA, 675 bp, Cannabis indica
agggtaggatccccaaacacttccttttctcaattttggtctatttcagtgtcttggttgggtgtttccctatttccagagtttgtgtaacccctaggatgtatagcagaacctagagttgtgggttcggctttcccgggattagaattttaatcacataacttacctggttccataatgtgattagggcatccatctagcacgagactttccgttcaggtcgaccagcacacttgaatcttgaaagaaggtaagaactgtatataatgtgtgatatcaatatctgagtgtatgtatatgttatgtgtatatccatgcttaaagtgtcagtttcactaccaacacttgtacagttaaggtatagagtgcattggtatagtgaatattatttgagagtacattacagtgacaccagcacaagttcgggaaagtactgagtgtgtgttgtatatcactcagtgatactcagggtatgaaacaaaccctaccaacactcgtacagtgaggtacgtagtgtatgtggtatagtggctataccctagtatggaacgttcttactcatctgttgagccttgtaaataagtgtatgggcgcctaaatgcaagtcggaaattatatgttatatgcttttcttactgagtgtgtcgactcacagttctgcttccatgtgtaggt

SEQ ID NO: 335161 - DNA, 801 bp, Cannabis indica
acttgtcagcagatcaaggctgaacatcagaaactggcaaggttgttgtagcctttaaccctaactgagtggaagtgggaagatattacaatggactttgtggttggattacctagaaccacgagcttatttgattcaatttgggttgtggtagatcaattcacgaaatctgctcattttctacttgttaagacaaccttttcactggatcagtatgcagatttttacgttaaagagatagtaacgctgcatggtgtgccaaactccattacttcagatagagatctgaagtttacttcaaattttggcagagtttgcaacgggctatgggtaccaaaccaaagttcagtatagcttttcatccttggacggatggacagtccaaaaggacgaatcagatactggaagatatgttatgagcctctgttatggattttgagggctcctggagtaagtacctaccattgatagagttctcgtacaataacaattatcagagtacgatagggatggctccctatgaactgttgtatgacagaaaatgtagatctctcattcattgggatgagacgggggaaagtaagtacttaggtctggaatctgttcaacgaattaatgaagctattgaaaagattaaaacaagaatccttgcctctcagagtaggcaaaagagttatgcagatctgaaacgcagcaatgtagactttcaagtaggggatcatgtgttcctacaggtgtctcctatgaaggggatcaattaattcgggacaagaggcaagttatgccctagatttacaggac

SEQ ID NO: 335162 - DNA, 1242 bp, Cannabis indica
aatgtgggaggccaagtcaattgaagctccagaggtgatgcggtataagaatgaggccacatcttgagacaccacggtcctgttggaatttggaacccaattgctaagagcaaaccgcataagagatgcatcatgagcaaatgtaagatgggtgattcaaagactctctctagatttcaattcagatcgtgcatccgtgagttcagagagcatcaattcacgatccatagacatcactgcattggagacattctcgggaagttgcaaagcttgagcaatgtccttttcagaaaaagaaaaccaatgaccccgaacatacactcttttaaacagtctagaattctcatcaagaaaatcatcagtgagattagcatagaaatccttaacaatgtttgcaatgtacccattgaaaccagtgagaatgttttcccattgatgaaattgaataaacttaacaattccatagacccgatgagcatgcaaatcataattcctctcactttcaaacttacgtgttgcatacaaattccaatcacgctcattatcacgataataaaatcgagggcagtgagaaagagttgaaggaacattaccaggagaaggctccttcattggctgcttgcctttggcagcagcagaagcctttgctgctgaaacagaacgagcaagagcagattttgtcaactcaggttctggctcgagtttagtgtcctcactgtctgatgaaactcccatgtcctctggattctccttctcggaatggagagaaactgatttgttagaggagaattccattggatcttcttcttctgaacttgaaaaaaccgaaggaggattggacttaagtttcttcttggctggaggcacggatttatcacgacttcgagaagcttaaagttccttctcagcagaggcttgctgggctcgagttcgagtagaaggaccggttggagtggtagcaggaactgatgcagcaggaggagggactgctaagggtggaggagatgccttcgacgattcagacgaagaagaggtccaaacggggcgaacagatttacgagccacttattttggaggtcgttttggcttctggggctgagattcacgctgaggaagcgatgaatctcctggttttgcagcagcaggaggcatggatgaagcagcagggggtgcattggaaggggttgcatcggtttccaccaactttttggtatgccctaggttcttggttctcaccatttt

SEQ ID NO: 335163 - DNA, 565 bp, Cannabis indica
gacccaactgaagtgaccagcagtgaccgtgtgtagcctggccgtcaagatttagtgatgatgaaaataatagcaagtgtgaagtgatactcatgactagaagtcatctttgcacattggagttcatttgcaaaggagttgagtaaatgagggttggggtgatgattgttaaacaacattttgacactacataattacttggctcaaataaattcaaacacatatttagaaaataacaagtataaaagatatgtttgtaaaaaaactaaaaattaaaatatattcaattattttctaagatttttaacaaactgatatcaatgtctcgtataggcgagagtcaaagatagcattcattgtatagagtagttagcttgtctaaaatagacaccattctagtaaccttttattcgatcaaaaaaaaaaatctgacgttgtcccatttaggcgagagtcaaggtcactcttatttcatgaccttctatcattgtttcatactttgtaagccatactcttagcagtcactattggggtcacgttggctagagttggtaaaggattatga

SEQ ID NO: 335164 - DNA, 1308 bp, Cannabis indica
aaatgggtttacaggcataagacagaaaacaatggctcacaacggtacaaggcacgattggttgtgaaagggttcagtcagaagaaaggtattgactttgaagaaatattttctcctgttgtgaaaatgtcctctattagagttgttcttggtttagctgctcgcttgaatttagaagtagaacaacttgatgtgaaaactgcatttcttcatggtgacttggaagaagaaatttacatggagcagccagagggtttcaaagtcaagggaaaagagaatcttgtgtgcaagcttagaaaaagcttatatggactcaaacaggcacctagacagtggtacaagaagtttgattccttcatgtcgagccatggatataccagaactacttctgatcattgtgtgtttacaaagaagttttctgatgatgatttcattattctcctgctgtatgttgatgatatgttgattgttggccatgatgtcaaaaagattgagaagctaaaggaagagttgagcaagtcttttgctatgaaagacttaggatcggcgaaacagatacttggaatgaggatttctcgtgacaggaagaatgggaaactttggttatctcaagaagcttatgttgaaaaagttcttgaaagatttaacatgagcaaagctaaagcagttagttctccacttgcaggccatttcaagctaagctccaaacaatgtcctacaagtgagaaggataaacaagaaatggcttcaataccttactcatctgcagttggcagcttgatgtatgctatggtttgtacgaggccagatattgctcatgcagttggagttgttagccgattcctttctaatcctggtaaggatcattgggaagcagtgaaatggatattgagatatctacgaggtacttccaggttgtgcttatgctttggtagtggtgaacctatgcttgatgggtacacagatacagacatggctggtgattgtgattccaggaaatccacttcaggattcttaatgacatttgcagggggagctgtttcatggaaatcgaggttacagaagtgtgttgctttgtctactacagaagctgaatacatagctgtaactgaagcttgtaaagaagctttatggatgaaaaagttcctacaagagttgggcttgcagcaagaaagatacattaattgtctactgtgacagtcagagtgccattcacctctccaagaattcaacattccattcaagatccaagcatattgatgttagatattattggattcgtgatgtgcttgagatgaaagaattgca

SEQ ID NO: 335165 - DNA, 579 bp, Cannabis indica
tgatgtcttgtggcgatttgagttgtttttaagttggtaaactatggcttgatgtagtttccaatcaacttcattgtagcttgtcttttgtctaaaaatcttatgtttagatcacaagtgtgtatcacctttctgtcatactttcgaattatgaatgactttgttggtccgtttctagatgccgttagtgcccacttgcattttggatccaagcaacaaattttgtatgttcttgcgcatgactttttcactttgaattggaagttgtttctaattgcatagaaaccaagcacactttggagtgtttctttgtctttgtatatttgtgcttcttctatttcaggatgttgcggatctgtgattagtagttcgtcataatctgtgatttctggctccctatttttgttgttttccagttgctcaaccatttcctctgccacaagttttgcatagtccatgaagtcaaaattttctcccccatcttccagtattgtagcttcaattgtatgttgttgatttgttgagtcttctgttgttgctgcattgtattccatcgtttcaaatgcgtttgtatgtgca

SEQ ID NO: 335166 - DNA, 656 bp, Cannabis indica
gtttgcacgtagagttaagcgtgatggcactcatgttttatattatgattgtgattaattgagaaccaggattagggttattaccctaaaatgagcgattatatggtctagggttattaccctagtaattaaaagattttgagtgttatgccatgcaaatatgttagaataaagaattatgcgcctaaggcataattaagctagactcggtaaactagtaccttgagtatagttaaatgcggtctagggttattaccctagaatattatgaaggtaagaaaatgatgatgtatggtaaaattgttaatcaagtgaagacatgagttagggttattaccctcaataggtgttattttgagcatgttgtaatatgttgtatgagtgattatttagtatggaagttagggttattaccctaagattctatatgttatagtatatgttaagtgcacgcatttatgttaagagttatgtgtataagacataattggattagacctgatatatatcactaggataaactactgaaagaacgtaatgtatggattacgtatatgcatgaatagggttatgcaagcaaggcataactaggttagactcggtaactataaccgaggtaaatgttgggttttgtgccataaataaaacccattaca

SEQ ID NO: 335167 - DNA, 754 bp, Cannabis indica
ttacagaatggctccagcagaacataaagaattgacaactttaggggttgcttgacctggggtttacagggcctagtgtgtcactctaagggagctcccgtattgtttgttaagaagaaagacagatatttacgcatgtgtattgactactgggaattaaataagctgactgtcaagaataagtatcccttacctaggatcgatgatctttttaatcaccttcaggggaaaacagtcttctcaaagattgatctccaatcgggctatcatcagttgagaatctgagaggaggacattccaaggacttctttccgcactaggtaagggcactatgaaaatctggttagaagatgagatccttgtgtactctcaatcagaagatgagcataaacaaaatctctagattgttctacatcagttatgagaacataagttgtatgctaaatttaagaggtgtgaattttggctatctcaagtgtcttttcttggacacattgtcagtaaggatgggatcaaagtggatccaaggaaggttgaatccgtcaaggattggccgagaaaaaatacaatcatcgaagttagaagtttcctgggtctggctgggtattatcgttggtttgttgagggattttctaaaatccacccttaaccgaacttaccaaaaagaattagcagtttttatcgacaaacaaaaacgaagcaagtttttaggagcttaaaaagagattagtcacagctccagtattagccctac

SEQ ID NO: 335168 - DNA, 774 bp, Cannabis indica
atagtcaaaagaataagcaagaccaagaggagttaatactagtcgcacttataccgattatatgcgatgaccaagcagacctctcctgcgactagtaaaaatcatttatttacatagattttggtccgattgactagtgtgttcgacgactcgccagggacttacatgttccacattctcaacacatagaatgtctaactatgtgatcaaagatgaaggtaaacattcaaaaaataggccttcaggccaccttgcaagtacaaacgcgatagagcctgtgaactcgtgtgttggaatatgaacatgccaaactcgacttatcaagtcgcatacgttgctgaatttaatacaagaacggattaaattgttcttcatttattctttaagatttcttttgattaaatactataatttattgtgaatacgattcttaatcgatcagttatgtaatcttaagggacacttgctttctatataaaggagtgatccaattcaaataaaccaagctaaaatcattgcaatgcactaagccaaccgagctctgactgaaccactataactttcttgttttctctttatttatgagttcaatttcctagtcgtccagaggtgtaccactagagggctggccagtaaaagggttggtcgaatggggggagttattgagcctgagatccctaactgacccttgggatctaactgttctcgccattagaccttcatggcatggcttgtcctccttcaagtagggaaggtttgtcctggttcctgaag

SEQ ID NO: 335169 - DNA, 706 bp, Cannabis indica
tgcagatatctgcactttgcagaatggataaaattggatcgtgcggattgattggattggatcggctattttatgaacactcctaatgttaattacattggtatagaagttaggtggcgattggttaagaggaatgaaaacataaaaatgagaatgagaataggaatagaatggaacaaaatttaaaatgtataaaaaagataataaaaaagttattaatttttttctcggcttgtatttggaataatttttttttttcattttaaaatagaatagtcatactaccgaaataatagaaaaattatttcaatattttaaattacaaatttacaatcgaacaaaaaaaaaaaaaatagaataaaaactacttcatttccattccattacatttcattaccactaacaaaataccactttattttatgtttaagttaagattattttaggaatttgttaaataaaaaaaatgttaaaagtaactagtattgtctaatattattatgaattgttatattattggtgtaattttatattagttccacatatttaaatttagtaattattatgaaaaactgcttactatcttatggcctgttatatattgatggtgattaataacaattcaagagaaaacaagtaaataatataaagttggaaaaagttgtacaagttagtaaaatgtccatcaataacaagtatcgatggg

SEQ ID NO: 335170 - DNA, 1076 bp, Cannabis indica
aatcaaatctttccaagttcttctgaaccatgtctaaaaacttcgccatttttaagcctttggccttatatttcccgaggacttggtttacaataagctgcggatcactatggcaaatgaggtttttggcttccaatgattcaactatctttaagccagcaatcaaggcttcacactcagcctcattatttgatgcgtcaaattgaaatctcaaagcatagtgaaacttaaagccttcttgtgttattaatattagccctgcacccgaaccttgctcgttggatgcaccatccacgtataacttccatgtttttgcatctcgttgaacagacagaatttcttctagagttataccttctattaagaagtctgccaaggcttggcccttgatggatgttcgagggtggtatgttatgtcgaactaccccagttcaatataccattttatcaatcttcccgaagcatatggttttgataaaactcgtctcaagggctgattggctaacactattatggggtgttcctggaagtacgatcgtagcttgcgagatgcatggactaggcacaatgcgagtttttcaagagggggatatctggactgcgcccctagtaacattttacttacatattaaataggttgctggtgctgaccctcttctcgtactatagctgcactaatcgcatcttttgagatagccaaatagagaagtagcctctctccagttatttgttttgctaaaactggaggtgtcgctagatgcctttttatgttctgaaaggcctcttcatactcttttttcccctcgaatttcttgttgcctcgcaatacattgaagaacagcacacacttatcatttgacttcaaaatgaatctgttaagtgtagccattcttcttgtcagggcttgtacttccttaggatttgtcagtgatggcatgtctattaatgccttgattttcttgggatttgctttgataccccttgcgttaactatgaatcccaaaaactttcctgaagagacatcaaaggaacattttttcgtgtttaacttcatgttgtacttctttaatattttg

SEQ ID NO: 335171 - DNA, 1495 bp, Cannabis indica
gtttaacttcatgttgtacttctttaatattttgaagcattctgtgaggtctgcgatatgatccccactttttattgattttaccagtatatcatcgatgtaaacctccatgttccgcccgatcttgtttgcaaacatatcattcaccaatcactgatatgttgctgcagcattcttcaacccaaacgcatgactttataacaataaagtcccatgttggtcacgaagtttgtgtgctcttgatctaggacatgctttttatctagttatatccagaatatgcatccataaatgacattagctcgtgccgagtaattgcatccactaactagtcgatcctgggtagtggaaaataatcttttgggcatgtcttattcagatcagaaaaaatcaatacaaaatctccaagttctattaggattagggacgagaaatgattagctatccacgagggataaaacacctcgcgtataaagtcattgactaataacttgtctacttcctgttttagtgccccttgtctctcgaatccaagggtctccttttttgtctcttcgctggggagtttggatcaacatttaaatgatggaagataatgttagggtcgatccctatcatatctccatggctgcaggtgaattgatcctggttcgcccttaaaaaacttattagctgctatttgagctgctcgtccaggttattcccaatttatacacactttgtgggatttcctgggtcgagaataacttcttccatttcttcaattggttttaataggtttctttcatcttgaactcgggatcaagatcttcatccttcctttcacttccttctgccaagatcgccattaattggggaccggctttcctatgctggaactttatgcgatagcaatcgtgagccagcatctggtcaccccacaccactcccacacaccacccccacaccactcccacaccttttggtgtttggaacttaaggataggtgcttgatcgaactaatttcccctagtccaatcaatgctagatgacccaacaatatgttgtaagccgatggcaagttgacaactaagaagtcttgcataactgtggcggatatgggtgcctcacccaaggttaatgcgagcttgattatgcccagactggcaatgttgtgtccagtgaagccgcaaaaatttagcatacaaggcctcaatttggccttttcgagccacatcttcctcagcgtttccttataaaggatgtttactaagcttttgttgtctattaacaccctctttatgttaggttttgtgccctaaataaaacccatttcaatatgatcagatttactaattaataaagatcggaaatcacattctatgttgcatggttcacatgatttgtttcatgattatatttaatgtataaattctattaagtccagaacatatgtatttgttcatgattatagtggtgtcaacatagtgttgtcaacacagtggaatataatcat

SEQ ID NO: 335172 - DNA, 840 bp, Cannabis indica
aacaatcaaacaaaaaaaaaaaagtgtgttcttcatggcttcttcatctaatccctcctcaagagaaaacaagagaatggctagtgaaattaaacaaagggagataagggcaaaagcaaggcaagagcccacatttttcttcaatgatgaggatcatcacaaatttgtcaatgacttctcttctaggaagattctcaaaggtaaaatttgtgatctccctagccttgattatgtagattttagtcatcattttgatactctaggttggacatctttcattcaaatcaatactccaatatatcctagactagtacaagctttttatgcttgcattaaaccttgcttagaacctttaggagttaaaggaacccttagaggaatggcttttgaactaaatgtagaatctctcaatgaaatgttaggagcacccaatagtggcatattgcttgaacccaaactctctcttaaaaataatgacatctttaactttgatgagtgttctagaaatctttgtggtgatggccctcttattatgaaaccaaaaagacaccaacttactttagaggccaaaattctccacaaattcattgtagctaaccttgcacctaggagtggacaccaagatgagataaattccattgatcaattactcatgcatctcatcctagccaaaactacaccaatcaacctaggctatcttattttaaaattcatcattgatgtggacaagcctaatatgatcaaggcacttccctttggttttcttcttagctatctttttcctctcttaggaatccctaccttacatgaaaagaaaaatgatcctacctctagtgacat

SEQ ID NO: 335173 - DNA, 614 bp, Cannabis indica
aaacgacttcgtagatcaataaaaaataagatcctcagattcctatcaagatgcaaaaaattttgttcttggaccaatcacagcattgcccgtcaaagcatagagctaccgtagacgtggcatcgatccgtacaaaatcaaatgcagtaaaacgctattatacatattaaatttcaaacaaagatagcgaaacactcagagacccgtttaaaatcacacccagagtcaaaactcaatcccaaccaatcagcaagagcttcggaaaacaacatcgtttccacagaggaaatgaagtcgaaatggttttatgagtggtgaactgggaaagacaaatggctacgattctgaaccttctactgtttaaagtgtgatacgacaattttgttaacgagatccaaatctgctaacaagagaagcgaatagaagcaattttgttattttattatttataaaaaattaatcatataactaaacggaaatttaacatatagattattttttaatagaaaaatattttacatgttcgcagatattgtggaaaaaatattttatattctcagatactgcagaggtgtagttttaaaaaaataaaatagttttacatgcctttcata

SEQ ID NO: 335174 - DNA, 1069 bp, Cannabis indica
aagcatgcataacttataacaaatatgaaaatgaaactaaaacttaactaccccctcaaaataagaaggtcaagatttacacaaatcaaaataaacaggctaagactaaagaaagtatcaatgttcttaggaatggagacaaaaaataaaagggacaagaaaaactaagcttctggggttttaaacaaggttttgacagcatccaaaattgaacgttggagtccctcaagattcagaactcgatcagacaaggcatcaagagaagcttgaacaccagagagtttttttgtgacaggtgctgaagcaattggaacaggagcttctgccgaaaggtcatccgaagcaaatactagagattgaggcttggatttctttgatgatgaaggttcaatatagtatcaggaattggtgtagaggccttgtaggatgcaccagtggaaggagccaccaaatcttcttgctctatctttagatcacttttctgcatacttaagactttgtaaataacttaaggaaaaggaagatttaaatttttcttgttacctttccaaaaactaatgatttggtcatagatgacgctggcctaatcaacgtcatgtccagtttcaaccttgtacaagaaagaatccatattaaagaagatggttgcagtgtgagaagtcggtttccaatttgttgtagaaattttgtgaagcacgacatacatgtaagttaaatttgtgactgagataacaaaattttgaggccacaccatcttttgacccacaatctaagaaagaacctcatccttgtcaagtggttcactctcctcttcatctggaatagctagagaaggaagatgcaaggcctttgcaacatcttgtggagagaaagaaaaccaatgacatctcacaaacactctacaaaacatggtagagttaggatcaacaatttcattattgagattagcataaaactctttaacaatcctatccacatagccagaaaaattagccaaagaatatgcccattttctctcttgaagaattttaagaacaccattggacgatgatcactcaaaatataattt

SEQ ID NO: 335175 - DNA, 1706 bp, Cannabis indica
aactaagaatgggatatttgtagggaaggggtacgcaactgagggaatgtttaaattgaatgttcaagtcaataaagttaatgcttctgctgatatgttgtgttcttttaatacttggcatgctagactttgtcacgtaaataaacgcataataaagaacatgagtagtttaggcctaattcctaaattatctttaaatgattttgaaaaatgctcattttgtagccaagccaagattaccaaaactataaagaccgcttagtttaatttggaaattagcagttaattaagatttaattatgaaaattatttatagatatttaaataattatttatgttgctatatttgaattcagactgcatttttatgtcatatagtgaaatttcataattttgcattttcggtgcccgacaacatggaacgcggtgtatggcttagtagaatcacagtttagtattttagtatgctggggcagtttatttagacattggcaatgtcgggattagtctggaatttagaatttcccaaaatacccttagtaccccttttgtgctatgttagtgtgaaggggtaaaatggtcattttgccccaattatgttttgtcctttagtgagcttattatttggtgatattatgttttattttatgttatgttggctgatattaatttaaataaaattaaataagaggattcatttacttctttttacaaaatcaaagaaaagcaaaaattcttttttctcaaactctctttctctctttcggccctctttgagcagcaagaagctgggtattttctttggtaatccaaactattttctcaagattaagtgatctctaatccttggtaagattttggtaacttgttcttgatgttttcatgaatttttgaagaaaaatgataggttgcatgcttagttttggattgttgttgctgctgtaattatgtgttgttttcagaagtttaagcatgcttgattgagtgaattagaataggttttgaggcatgtttagttgcttcggttcaagtttagaattttggctcaaaaactatgggtttcaaggtaaaatgatgattttcgttgctgtggttgttgttattgttaggtagtgttttctgtggttaaattatgttgaaatagattgaattatgcatgatttggtggttgtttgaagggttagtcaagttttgtgtttttgaactcaatcttgaaccttcaatggtgaatctcgtttctgtgtttgaagcttggtttctttgcttgggttttgttatttggggtatttagaacaggtgtggaatgttgcatgaagtttgaggttgatttgagtgagaatcgaaattttgaagtttcctgcactgaagcggaatttcggttcagtatggcttgcaggaaccggaatgccggttggtgttctaggttccttccagaatcggaattccagttgtagaaccggtctaccagttggggaaaaattgggaaccctagttcttcccatttttacgttgtttagggtattgccatgctttttatcgatagagaaacttttagtttctagtttaagtccccaggaagtgatttagcgtgtcacttatctagtgttgtgattgttatggtttaggagcctgtaaatcgttgtgcagttcgttccactcaagttgaccggcacacctaaattcagaatcgaggtaagattagtata

SEQ ID NO: 335176 - DNA, 707 bp, Cannabis indica
gtttgccccttgtggcactttttatgttgtaaagacaaatttgccaggttggatggccaacatggtttttctctttatttaatgcctcgtacttttgtgtttgaactttaatacataattgtttgcttgcattttattcacaatttaaacaatcatattttgatcatatacaatgtgctttaggaaatttccattgctcgtttattcttttaatattgagcagttagttaattgactactatatgcacgagcagtttattatttctgcctcgcgataacagttataatctgttttcaagcaaacttgaatatacttataatgatctcatcactttgtatatttttgattgcttgcatgaatagttagattgtctattcatacactaggtttaagtacttttatcaagacacattgatgccttgtttaatactttcctatacagtgcgagtcgctaatactcaaattcacacacaagttatgagttatatctcatttataacttttgattttcctttctcgtcagataggtttttaatcaaagagttatgatggtttgatccctttctcgtgagaaaggtttgatcaaagagttatgatggcttgatccctttctcgtcggaaaggtttgatcaaagagtaacactatatcatgtatatttccagataaataaattctggttaatcatacacatatgcccctcaagta

SEQ ID NO: 335177 - DNA, 801 bp, Cannabis indica
gctgagtaaatcttttctttctcacttctgactgcttcattatagactttgcattgaacaattcctggaccttttctcaggtcatcgtagtaaaatcacaggtcagggaaaccatgtcccacaatactagagcgtcttcttgaaactggaatgtggcatcggccactctgtcattacctgtgacgaccatgaaattcaaaattcttgtaataacagtcagccactgctcagctttcatcaagtcgggacctcccaaaaagactggaggtgcctgcttgcggaacctttcatatagtggttccattcagttcactacaacaaccggtcctacctgcacagtaggggcaggagctacctgcattctagggcagggatcgcaggagcaccctgctatctcaaatgtttgatttcttcatcatgctaattaattctggcttgcatttctacaaacctattttcccattcttgggcagcctgcggcgagttaacattaccccgaccacatcccttgcctctaaggcctctgccatagccacaaacatttaagggagtgtgaactccgtaaccaccactagatctgacagagttaccctgactcctggtgtttcacctggtgtccatactagtagaatagcctgcgtaacaaactaagagctagtttgctcagatcgtgatcaagaataacttactaattaccgcttaatttggaaatttgaaacatgcgcttatttagctatcaggttactaacatgcttcctatcaatctttccttaaataatactattaaaataaactactaaa

SEQ ID NO: 335178 - DNA, 674 bp, Cannabis indica
aagcagccagagtggcgtactcgtgtataagagccattcattccgtgggtgtaaggacccaatggaggcttgaagcggggacgttacatgtttagtacacactgtgatagtaaaatcaatcatcctgaaattgatccttcatgcacacacttgtcttgtagtgttgagactgatctgaaagatctgtggtgtaaatttttgcaaaatcaaactgtattggactggatgatcttttgaatatacgataagatacatggatattctaataaatatgaaaagaggggctccaatataaaggttgtaatattgtatatatatatatatatcatatcatttgcaatatagttgtgttttggagtttctgtgggtttgtaattgtaatattgtatatatatatcatatcatttgggtatttatggggatcaatgaatgtattgtatatgtcgtaaatgattcaattcacataaatagcagaaaaaagaaatacaagcaaaaattaatccaatccacaatcggcaagttggttaatctgaaagacggctccatccactactacaatatgggcctttagcttcccttttgtttaacccattttataaaaagagaagctaaagggtgtcaaaacacccacctgattcaaaattgacatttagaggcagttttttggtaaaaac

SEQ ID NO: 335179 - DNA, 528 bp, Cannabis indica
cgactatcaaaataaagcatgttgtctcgaagatctaacactccaggtctaaccgccctgatatgtatgctcactactgttcagcctaaactttctattacctacagatataaacaatatatgtaagtcaacaaactcatcaaactgagtctagaatgttcgtacgacaatacgattgaccataatatcagcctatactcagtactctagttgtactgtgataacatcaattcgtactatgccaaacatatatccgtcggtatttagtgcaactctatgtacactaatatcgccattacagatatgtaatctattaggaattcttaaacatgcacgctaaacatgcaaacacatatgcaataattatactaatcttaccttgatttcaaattcaagtgtgacggtcaacctgagtggaaactactgctcgacggtttacaggcccctaactcacaatatatgtataactgataagtgatacactaaatcactttcggggacttaaacttaaaactaaaagtttcccta

SEQ ID NO: 335180 - DNA, 649 bp, Cannabis indica
ctatgtcatggaagctaagcaacacaaattggagattaatgcagttcaaaaagatgcaaatattgatctttggcactagaggctcgatcatatcagcgagaaaggacttcaaactcttgctagaaagtaattcttaccaaattcgcaaggtacgcctcttaaaacttatgatcattgcttagctggaaaaacacatagagtttcttttcatacacgtccaccatctagaagatctaatgttattaatctgattcacactgatgtatgtactatgcaaactagaactctttgaggtgcactttattctgttacttttattgatgaacattctagaaatgtttgggtttttgatttgaaatctaaagatcaagtgctcgatgctttcaaagaacttcatgccaaaattgaaagagaaatagaagaaagttaaagtatgttcgagtagataatggtggtgggtatagggtccatttgaatactattgtagacttcatggaatcaagcttgagaagtcagttccaaaaactcctcaacataatggtgtggcagagagaatgaataaaataattgaagaaaggattaggtgtatgctttcccatgcaagctacctaagtccttttgggggtaggctatgagaactgcagttgat

SEQ ID NO: 335181 - DNA, 1296 bp, Cannabis indica
ggtaaaattcagtttctttacttttttttttttttcagttttgtgctttttgttaatatttggttatttaattgtttttgtttcatttttttattgtgtttgattacgatgttcgttaaagattaaaaatatatgtcctgctgatgaagagaggcaaaagcttcaacttgaaggtttatttcttgatgaatctattgatgaccgcagtatatctaaacaaacatttgagagtggttcatctttaaagaaatctgattcagatgacattgatttgatgaaatctaagttggagctagtcatttcgaatcaagaatccttggctgaagacttcatttccttgaggtgttttgttgatcttaatttcaagcttgtaatgactgtaattaaggatattcaacagaaggttaatgccattcatcgtcgtccttctgatgaggtatttaattatactttattgtttctgtttttacatgctttgtttttagtttctttactgttttaagttgcatttgtgttgtatgaatcagggaaagtcatctgatgacttcgtaacacaagattctgatgatgatgatgatgatgatgatgatgatgatgatgatgatgatgatgatgatgatgctgaagatgatgagaaggaactgcctgatcctaaaaatattgattcagactccgatgatggtgatgagttggttaaagatggtggtgatgctgatgaagatgataaggttgttaatgatgttcctgcttctgatgtgaatcaatctgaggctgttgcaggcagtgatgagagggctaaggatgttgagaaccttaaggccaatgagtccagtttaaagggggatgatttttttgatggtttaagccagcttgaaattgatgatgatcaagttgtgttggctggtttagaggctgttcgtaaaatcaatgtaagtgtatcttaatttgtttgcaagaaaattatgttttattttagttgcttgacagtttaatgtttgttttgcaactgtttattttctgactttgtttttctttaggtcccagaacccaatccagatgttgttggtgaaaagacagctgccattcctactgatgaagaagctgaggacactgtttctgatactcctcttttggataagagaaagcgtgcaccggcattgaaatcgccttttgttgatttcgggtcggctgatgtgaggagcactccaatggaggtaatgtcctcagattctcaattaggaggggattagagggattttaagatgattacttatgtgaagggcctttatgctctta

SEQ ID NO: 335182 - DNA, 736 bp, Cannabis indica
tatgacccacacagagtcaaattgtcccgtggttctaggaaaacctaccacgaagtccatagcaatatcttcccatttccactctggtatgtttaatggctgcagcaaccctgcaggcttttgatgttcagccttttcttactgacaggttagacacttagcaacatactaagcaatgtcattctttatgcctggccaccagaacatggtctttcggtcttgatacatcttcgttgaccctggatgaactgagtaaggagtcgcatgagactcattcataatttctcttttaataccatcatccacaggcacacaaacatgattcatgaatcgcaacgttcccgtttcatccactgtaaaatcactaatcttcccagccgaaaccctatcttgggatttcactaatttcggatcttgcaactatgcctctttgatttgctctaaaagagtagattgcagggtaatattagccaatttccttacaaccaactcgattttagctcgggtcctctcatttgcctattactgggagatttgtttcacaatatttatttgactctacccctttctactcaaggcatcgacaaccatattggccttaccagggtgataaaggatttcacaaatataatccttcaccgactctagccagcgtctctgtctcatgttcaggtctctctgggtgaagaagtactttagacttttatgatcagtgtatatctcacatttctcgcca

SEQ ID NO: 335183 - DNA, 745 bp, Cannabis indica
attaaattaaaaaattaaaatatacagtgtctcttattaaaaaaaaataaaaataaaatttagtgggtttttcatatttacattaactatttggattatttcacaattacacaaaatataataaaaaaacttacaaaaatatggttgtacagaatttttaatatttttacgattttaataattttatttacagaaaatacggtctttatatattgtactcttattaattttttgttgatttttttgttatatgtatgttattttttcttgttgttttaatgttgtttggatgttattttcctattatttttatatagttttcttattgttttcgtgttgtttatatagaaagccgtcaaaaatttacaaaaaaaatctttaaacataaaaatgtaaaatttttacaaaaaatagtgttttatgtaattattccttaactattttttttttttcattaaattatgtgataattgttatgaaatattatttatggatgtccaaatcaccaaattaattatcaccattaatgttttgttgtactttcctttattacattaatttagtttctcattcttttagtcatatttttgtataaatagggattcaccccattaaaataaataatttagaaattctcttccagtttctctttctatcttcatcttcttcttcttttcttcttatctactttatattattctatattattttataacacgttatcagcacgagtctctgctcaagc

SEQ ID NO: 335184 - DNA, 727 bp, Cannabis indica
aaattgaagattcaagcatcaaggagaaaagatgagaaacttactcactgttcgaagctttgagtttgctcggatgacgttggtccactctttttgttaattctacgaaggattctagagagaaaggtgttttttgctctgaattcactaaacaagaaaaattctataagtggtttattaggattttttgccctattcataagcagattagtgaaaaggtgcaatcatttcgaatttcaaacgccttgatttccctccaaaagtaaaaattctgaaatccaaagcaattaagtacctagagaagggtaaccgtcaaaagtgtgtgaatagttggtgcgtctcgaggtgtgatttaattagagcatttaattagacaaaacctgaagggactctttgtcagaatcacgttagattaccaacaggcacatcggacatgtgccacccgttcagatacggacttgagatgagtgaagtctacacgcgacttcggaagtcccgtgcaaacttgggggcaaatgtgatcccattttttgcactatgacatggcaacacatactaatgacacgtggctcctatttcctacatctagttgaaggggaattccgaacagagctcaacatacatctgcaggaatagagtctgcctgaccgagcagggcaagggtagacgatctgtacaatgtatcaagacttagcagtttcgatacttacatcgtgaagcacaaaag

SEQ ID NO: 335185 - DNA, 787 bp, Cannabis indica
cttatgaagagtatatgtttggtgttgtaattgtcttcaaggagtttgagatcatcaccaaagaaagcatcagataaaatacattgactgcatgatctactactaaaaaacttgaaattcctgacagttttacaccgtcaggtaaagaattctcgacggtctataaaactgtcacctacacaagtgttgcaaatatttagtagaatagacgacggtgaaaaaatgtcggtataaaagaattcccgacagtttaaaattgtcggctatagtcaatactataggccacagtttaaaattgtcgtctatagtatataaatgcccttatatagagagagagacttaataatgtgtcaatcaatgttattcaaaaacaaaaagtaagggataataagaattttagttgtacggacttttacatatatcaaatcgtgtattttaaattttttagtcgttaatttatttttaaaattaattaaattattggatataataatttttgtttaattttattaatgtcatatttgtgtatgtatcaaattgtgtcttccaaactttgacaaaaatatataaatttaacaatctcaatagtttagtgagaatttgtaacaacctaaaaagtttgaaaatcataatataatacatgttaaagttcgaggacaaaaattctacttaaccaaaaaagaataaaagatgaattctatttgcaccccacaaaataaatatatatactctaatttttaaaaaagttaatctcaaaataattttttaaaaatcactcttaatatat

SEQ ID NO: 335186 - DNA, 586 bp, Cannabis indica
cgaagtaccaggaggaggcccagcagaaggagcctcaggcggaggcgaggcaccaggaggagctgaaggcggaaggcgaggctacagccagggccaagcgggagcttcgggaagccagggaggctatggacgaaatggctgccaagttaaagtccttggaggagttgcatcaggcggacttgcagtcgacggccatcctgattgtggaggtgaaagagctaagggattttaaggatcaggccttgaaaaaggccaaaagaaatgagctcctgaccccagttgtctgcaagcattgcgtcaagcgctttgacgatggcgtctatatggcctggcagtcgaatggccagagtatcaagtttgacttttatcccgaacctcaggaagctcttgctaagttccaggagaagaagaggaggcttgatgctttgctcgaagaacgctagggccctcgtcttcctcctcgtattgaataggccgagcagtccaaccaatttcaccattaaaactatatttttttcttcttttacatttacagtatcttttctttcctttcagacaatttgaattattatcttctaaggggaga

SEQ ID NO: 335187 - DNA, 622 bp, Cannabis indica
tagtattgttataatttcattgtggcatataatttcatttgggaatttgcactatcaataactaataaaataccccatatcaacatttagacccctttctaatttgtacaaattgattttactaattttaaaagattcataaaatactcctaaattaaactttccctctctctctgactttccctctctctctgtctttctctcttcacacgaccacgaaccaaaaccaaccaccgcaaaaacctagactcccatggcgtgcttggaaaacgttcgtcccaaccttctccaccaatctccagccgaccacaaaaccaacaaaacccacgaagagtcttcatcttcgccgaccaccacgattgaatccctctctctttctgttgctctcaaattcgacccaaacccacgaaccggcgaaccgtcgacccaaacccaaaccacctcagttgacccaccgtcgccaccacgagcacgaaccgacaaagagacacatttctttccaagaccacgaaaccaccacgaactatcaccaccaccaccaaactcagtcaaaggttaaggtttttttttttaaaaaaaaaaataaatttttcatagattttgtaatgaccgctttagtaaa

SEQ ID NO: 335188 - DNA, 652 bp, Cannabis indica
aagaagaagatgaagaaaaaaaagaaactgagtgagaatttctcagtgatttatttcaatggggtgaacccttatttatacaaaaatattactaaaagaatgagaaactaaatcaatgtaataaaggaaaatacaaccaagcattaattatgataattaatttggtgatttggacattcataaataatatttcataacactcccccttggatgtccataaaaaccgtctcattaaaaaccttgctgaaaaacttggtcaaaagaaaaggagtgcagtatgaattaactcccactcatttagacattcgtggagatcttctaatcgacaaatttctatcttgtctctcatcttctcaaatgttaatattggtaataactttgtgaataagtctacaagattgacacatgattgaatatgttggacaccaatatagccattctccttaagatcgtgagttaagaagaatttggtaaaaatgcctttagctctatcttcttcattatagctttagttgagcaatgcatttcatgctattttaaaagaaaattgctaatgttgatactgtgttacagagtacaatccatatgtttcccgaatatattatgttaataatctcactcccacacattctctacttgcttcataaaatgc

SEQ ID NO: 335189 - DNA, 778 bp, Cannabis indica
ttattcaaaaaaaaaaaatttaagtaataatgatgcctttaatatttctataaatacacatatataggggcaggcaaagctagaaataaaaataaaatagggcaattatatatttttatatcatatggagattataaaattttaataaaaattatgcaatcagatataataaaatatatttaattatcttaaattgatttttatggagttagattttcaccttccattgctaggtagtttaaataccaacaataatattttagttctatttttttaaaaaaatgaaagtgtgaacggttaaacttgtgacttccttaactaataaaaaaattaccactataccaagcaaccttattttatattatttaacagaaaaatgtttgggataagaatccaaaaaatttagttacaattaaaatccaaataatttaagatcggttttaatatttttcagctggtcgggcgaccgccccacctagtctacacctagctatgcgtggtagttttgtgtaaaacatctcatcacgattcaacaatgaacttaattagtaaaatccctttaatttttgttgcaaattaagaatttaaagccaaagaaaataacttgccaaatgccaattaatgatagtagtgttaaaatatataaccttttcaacacgagtcttgattacaattagctgtgtaatcaaaattgaattagtacttataatccctttgtacttagtgctgttcttgtacaatataaccatattatatatagggaattttgattttatat

SEQ ID NO: 335190 - DNA, 999 bp, Cannabis indica
ttgatagtattgcactatcaaattgtagtaattgctatggatcaatcaggtacgcatacataattattatatattattattgtgttctatattatataaaattaatcttgagtttactattaattttctttcatgtggtataagatttcgtattgtatatgatttagaacctataatctatataacgattaatatgtatatgttaattttttttacaattacatattgatttccttattattttctgttaaatttttcgttgttaatcttaaaagtttaggggttttattcatcataaaattctctttttattgatatcttatatgactaagaatgttgagtaaattaggagaattttaagattaaacttttagggtttatgtattttctttatgaaattaaatttggattttttgtttcaattgtttatacagtacaattgatggtgcaaatctcattatcaattaatttacaatgtttctacttaatttaatttttaattcggctgagaaaaaaatcaaaattgggctcctttgtttgttcttagttttcggattgaacacaatctgatcgacacccttttcgtcatttatacccgaaattaataccatatattcataagaaatttcatcccaaacaaaacccatcaaaaattgcatcttttcatcgtgaattgggccggttttttgtctcgacccgactggatagaactgggttcgcgcgacccatttttagacccgcccaaggtagaagatgaactccagccacaaagctcactctcacgggcggcgcatgtgaccacgtctgacgtcatttttcgacgtttcttttttctagcgtgcttaaaatctaatttatgattttttttatgttttttaaataatttttgactctatttaataattattattgttttaatgataattatgcgcgcagttaaaaaagtattaaaaataatttttgatgatttttcgaaatccgtaaatcatagaaattttt

SEQ ID NO: 335191 - DNA, 597 bp, Cannabis indica
tcttcaaaggaaaagaggccttccgaggaggttattgatctttccgatgagttgactgctgcaaacccctctacccccaaagctgccaagtccgaggagtctggagcaccaacggttgggtctgagctggtcaggagtgatctagaacgggtgcgggcaccaactcaacctttgtcagtgcttctagaggccaaaaagggcaaggacatgctggcccattacatgaaccggttggttcctgatgtcaatgagcaactggctggtgctgacaatgactcttctttggatgtgctggtgggcggagttttgaaggagttcaccagggtaagtctttttgatacttccctttaatcttccacacttatctaaatatgctaaagtagttctgtttgtgcaggccggtctgaagttggcctacacttactttcgggataagtctgctgcttccaagaacgcagctctgtccgacaccttgaaggcggaggcggacttggccaagaaggatgctgaagaagccagggcggaagatggagctgttcggttggagttgggtgaagccaacaacaagctatttgccgctaagaagaaaatcactgt

SEQ ID NO: 335192 - DNA, 718 bp, Cannabis indica
tgaaccggaattccggtcagggaggcctgtaggaaccggaattccggttggcttccaggaatttttcccacaatcggaattccggtcggcgaaccggtctaccggttgaggcaaatttgggtattttttcccatttttgagttatttaaggtattgacatgttatttatcgatagggaaacttttagtttcaagtttaagtccccgggaagtgattttagcatatcgcttatcaatgttgtgaatgatgtgatttaggagcacgtaattcgccaagcagattgttccactcaggttgaccggcacacttgaattcgtaatcgaggtaagattagtataacggtatgcatatatatttacatgtttagcgtgcatgttagtaagcctgctagattacattagatatgtatgttggcttttgtactatttgacagtatcacattggtacggctagagtatgactagcgtaccgagtataggttgatacagtatcacatcagtacggctagagtatgactatcccaccgtgtataggctgttactatgtcaaaagtgccgtcgtacgaacgttcaagactcagtaccgtgtggggcacggggattaaggttatggtcaggggtatggacgtctgatcataatcagggaaatatgtatattatatgatttatgcttttcttactgagtctttcgactcacattgctatgtttatgtgtaggt

SEQ ID NO: 335193 - DNA, 781 bp, Cannabis indica
attttttattgtgactaaaatttacatttagtcacaaaaattttatgtcgtgattaaaaagttgtcactaaaagtgattctttttttttttttttttgtagtgtaaaataaaatagttacataatcataccttttaaaatatacgtctcgttaaaaatttccctaaaatatatgagttacataatcatgcccctcaattaggttttattactttaaccgttaaaaactaatatttttactccataaattttgatcaatactaaattttactctcttttatataaaaaaaaattaattttaaaaattatatttttctattaatatgatgtgttgatattaaattgcagcataagtccctaaaaaatttactttaatgcagataagttcccaatttcgaaaaattgtagcaataaccccaaactcaaaattcccgttagtccatagatacccaatttaactgctttgtttatagttctttaaaattattatgtgtcaaaattttattggtccacatcataaaaaaaattattacttcaatattttttttttcattttcttttattaacttaaagaactttatatatatatataaaaaaataaaaaattgtagaaacttttacgattttcgatgcatctttcttggtggtggaggtttactgccgactagtaccatcccttcatctgatccaccttctttgtcacatcccattaaaagaaaaaagaacaggtgcgatcaggatatcaggatcttgatcttggagagagatgaaacttttttttt

SEQ ID NO: 335194 - DNA, 513 bp, Cannabis indica
aacataaatggaggtcttttctccattcatagaattttatcttgaggattagttctacttatcttgtttacagttgtcattttgatgagaggctaccgagctttctctgcccagcttcttagccattctcctttgctttactttgctcttgttcaaagtatttacctctcctcctgatcccacaaatatatatatgtatatatatacgaattcaagtaagggatcatataattgaattcttttggcaaacgggttcgtgaaaacattgaaatcattaccaggcttttcgtctgttttagaggcatttggtcgaacacttggtgatgagtgattttcaagtccaaaattctcatcgttcactgctgtaggaggtaaaaggggcccaacgattcggcctcggcgagaagcatcgatcttcagattctttttccgaagtctcttccgctgagctctagtaagcttcccaggctcgttttcaccatcatcgtcgtcctcgctagaggaagccttcga

SEQ ID NO: 335195 - DNA, 572 bp, Cannabis indica
atattaaataatataataatataattcctcacttattcataattatctaattagggttttgctaatccatctattaattctagggtattatagtgagattaaagtgattttagagtgtcacatcagcgcttcatacttctcctttatagatatataaaagtgaataaaaaattaaaaaaagagaaaattaaggagagaagagatagtgagattaaagtgatttcagagtgtcacatcaccgcttcatacttctcctttatagatatatagattgattaaagtgattttagaatatcacatcaccttatttattaatataattaataataaaataataaaaaaatatgagaaaataaataataaatatttaaaatttaataaaaaattaaaaaaaaaagagagaaaagataaatctatttgaagtggttttagaatgccacgtcaccacctcatacttctcttttatatatatatatattgatattgatatattgattgatatatagatatatatatatatatatggaggaggtttcaatagttacatttttttaagccattggattactatt

SEQ ID NO: 335196 - DNA, 956 bp, Cannabis indica
aaattagtttttaaaccattttaaattatatgattatttattgaatctttctcaattaaattatagagcacctaacataaaactaagtatatgtgccttgcacgtaactttcttctagtatatatatatatatttgatttttttttttcaagtaaaccctcttaattttaaaaccttttaagctaatgaattattagtaaatttaaagtggcatctagttaactgtcaccataaattacttatgtgtataagcacaactaatattattattttaaaattaaataaaataataaaaatgaaaatgaaatatttaaaaaaataaaaaaatattataaattttaaataataatagtaggtatactaatataaacgtgccacgtgtattagaatatatacataaatagtctatattggcagttaactgtagaaatttaaggtgacatcttaaatttgctaataatttaatagtttagagagttttaccactaaaatttaagttcaaaggttaagtgtaaatgaaataataattgagagaatttagctgcaaaaaaactttttttattaaaaaaaattacaatgaaaattattttcacccattactatttgaagaatatatatatatggaacacttggttactaaacaaagttaactataaatattaattttaaaaatattaaattattaaattttgatctaataagaaaattttaaatagctatgcttagtttagctacttaattataaaaatgtcaaaaaatatatatttttacactatatcaaaaatatatttagatacaaaatctttaagtcaaaactcttttttatcttttttttttgttggaaaactttctttgaaattttttttctagccgataaaacaaactcaacctataaatataaaaataagagattaaattaattaaataaaaaaattaaacttaaaaactaaaattta

SEQ ID NO: 335197 - DNA, 1127 bp, Cannabis indica
aaactgtcaagaaagacttacccttatgaattccttcaagactcctcccatcagcagctccaaagaagattcgttgtcagcaccggctagttgctcactaacctcaggaaccaaccggttcatgtagtgggcgagcatctccttgcccttcttggcctctggaagcactggcaaaggtggagtaggagcccgcatcagctcggatctaccttttggctgctcaggcctgtacgaacttcctccttgagaatcctcgaacttagcaacttttggagtggaggggttcgcaacagttagctcctcagaaaggttgatgacctcccccggctggcgccttttccttggaaggggtcccttcaccgccccttgatttcttggccagaggagatgcacttgagcttcctccaactctcttcttcagagtctcgagcatcttctgagacatgtctggacggaaaaaaaacaacatggttagagaaaacagacatcagaaacataaagcataatagtcaagaagcataaaaacaagacggagtagtatgcaagacgattgcccgagcaagactagaaagtccatcatcacctgacaagcctcttatctcagccataacagctttcccttttcctagcacgggagaaggcggtcgagcaggtgaactgggctgcctaatgcgaattgcatgttcaataggcctgggttgggtcggaagtttcttcctcctttttagcggagtcaactgctcttcctccgcttcatcttcaggattcaagggcccctaagcatattgcttggcccttgcacctcccttcaacttagcctcgcgcttcagttgaatcagctcattctccttatcagctccctcagcccggccagtgccatatttcctcttccttcccttcactagcttaggaatgaaatctttcggatagggcccgtacttcacaaagttgtcctcggaggtcaactggatgatattctggaaatccctcggtagctgagcaagttttgagctctatccctaagagtaagagtgaggggagggcggtgatatgtagggatctgttggaaccgagtgtgggtggtgcccataccatccaccatgaagaacttgttggaaatattttac

SEQ ID NO: 335198 - DNA, 774 bp, Cannabis indica
cttgctgagtcactgtgactcacgggtgcttcatggtgcaggtaagaagattagcagttctgttcggccatgagttagaggtctcccagcaatgtacatatcagccgtggggtcttggcttctgggaagcaggatcgaattcccttctatgtttgaaaatgtaacctactgcaaaagatttttttttttttattaaacaggggatccctatattacgacagtatttaaaatgaaagtctttattttgaatttaattaaagatttaaaataaaccacacttttccaaaatttatagattagtgataataagtttataaaagcacacacgtggcgtccctaagggtcaggacgttacagcccaattaacctgattgggtttcattcttttagtttttattttataattatattatagataatataacctaaataataatatataatataatcttaaaaaaaaaagaaagagagaaactttattattagcctaaactaaagtgacacattcccattctattattatcgcactctatctatctaaccctaaagtcaaagactcaatcaaaccctttttcttctttttcctactactgttaacactcatcactcagcagtcatcacctttggtgtagcaacgggcagcaggaggaggtgactttctatctcggccaagacccaacgtcgacgactccacccacccaagacccaacgtcgatggctcccctaagaacgaagacccaatcatcaatggcttctagaaagctaacaactaca

SEQ ID NO: 335199 - DNA, 536 bp, Cannabis indica
caagtttaaattataaaaataattaaaagaaaatctagagagagagagaaagtgaaagactaggcctatttcaggtttaagatatcagtacagagacctaacaatggccaacggtactgattcttttcattctttctctctttttcaagaggaattttactacaactttctatattcttgaggtttttgtcattttcctcattttttttttttaatttggtactaaaatggacggcttcaaatttacattggtattattattatataactacgtacaattaagtgcatgaaaaatttcatattctatattacatttacacctaatattattatgttatcccaaatccaattcccaccaacaaatttttaataaagttattctcaaatctcatggtagaagaagaagtagccttgtagcagtcactattaggccactttcatgtttttattatttatttattgattttaagtcatcatcataaaatattgaaatcattttttttttcaaggataattaatgccattttcaatatata

SEQ ID NO: 335200 - DNA, 652 bp, Cannabis indica
ttttgggtcccaggtctaggtttgggtccatgtcctggtccagcttcaagtccttctctgagtcccaaatcaagacaccgactatgggtcttgtccaagccctggttcccggatcccaaaacaagatctgaatcccaatcacgggtcagagtctggttttggttcatgtctcaggtctcgatctgggtctcagtctaggtctgagaccgagacttgcatgcgattcttggtctcgatcccagttttgggtcccgagtcctgttccatgttcaggtctaagttaaggtcttggttctggtcccgcatcctggttcggggttggattcgggtttgggacccaatcctagggtgggtttgtgtctgagtgtgggtcctggtccggttatagtttaaggtatgggtttaggtcctggtcctgttcctaagtcctgatccgcttctggttttggttctagtttcaagtcacagggtatgggctcaggtcaagtttgggttcgagtttgggttcaggtcttgatttttgtctagggcgaggtttaggtctgggtttcggtcttggttagggtttgtagttgggtccggtgctgggtttaggtccgagtccaggtctgctcctattccaagatcccagtctggctccagttcaagtttt

SEQ ID NO: 335201 - DNA, 984 bp, Cannabis indica
gaccctttttccagggggtgttgtgtttggtacttgtgattactttagatttgaagttagcttattattttgttattttagttttcaattgtgtttgcctgggggagtgtttgtttgttcttgctaattttgacttgcaggtacttctttgttaaaaaatattttgattatttaaagtgccaaagggggagattgtaaagtcctttttggcaatttagatgccaaaatattttttattttatggtgagatttatttgctttcataatcgattttctcacctttattattcggtttttattactcttttctatcttaggaaagatttattttcagatggacttttcttgtaagagaagtaattctcttatggaaagttggtttttaaaggaaactttgactattatcattttctttattaagttcgattgtgtcatgattatatcagagcatacacactgtttatgcaggtatcaagacccaatacaggatctgcttttggcaagtttccttttctggtctaaattgctgcgtcggaatccgtttttgatgctgcaaatcaagttttccttaggaaagttttgtacagctgtagattcgactttgtggctgtctctagggtttctacgttctataaatagaacctagagagtagccatttgaatcaactcttctagttttcattattttcatttttcttatttgtgagaagagagttctttttgtgagaacctagttgttcatctaggttctagtgtttttcatatatgttcttactctgtcttagagtttgttagaacgacttgactgaacaagatagtggtcttcgggagaagacttgttcaagccttacttcgagaggaagtaagcacgcacacttcaaagacgaaaggagttcgctatttggaggtgtatcagaagtcagattcataaagtgcattacaaatgattgcggcaataatttagagggagtctaaacttgttta

SEQ ID NO: 335202 - DNA, 733 bp, Cannabis indica
ctttcttctacggccaggatcacttcttcttgctcgtgttgtgctgttcgagcatacctctcccaagctttgctcgaatctccagctatgtgcgggcctctaatgatgacttacagatgtccgtctaccggttgaggtagcaagtcttggttattatcgttcctctgattctgatcggccttgacatacttctgtaagtgcggattatttttccttatcaagaattcaatttcctgtttcagattgttgcattcattggtgtcgtggccgtaatctccgtgaaatcgacaaaacttggtcatgtttctcttgttaacatccttcttcatcggggcgggcttcttatacggggctagcaattgagtggccatgtaaacactttcgatatcctaggtcaagatggtaaatgcaatgtactttgcttgattctctcggggaggttactcgattttgccattgaatttgcctttcttcccattcccttgcctgttgttgttgttggaacgttttccatttgagcttgaattatttgggtaatgggggagttcggcggacgttccagtggaagcagcttttgacttgccaggcttttcctcaccttttgctcgctgaatagcttcttcgagcttgatgaagccttcagcacgatcgagaaaatttctcattgagtctacccggccattcttccttatgtccttccaaagttcactgaggacttcaatgccccccagta

SEQ ID NO: 335203 - DNA, 573 bp, Cannabis indica
tctcagagttgttgttgagtaatagggactgggacatctccttgttaagggctatgttcgactctgccacgattatgaacatcctgaaagggggtagacctagcggccagggaagagataagtggatatggactaaagagggttgtggtaaattcactactaagtctgcttatctgacacatgcgtatgatagagccccggcctgtgtggtggctccagccttatggaacaaactttggaattcaaaagttcttgagagacacaaaatcctttggtggagtatcctcgctaatgctctgccggtcagaggtacattggctaggagaatcaatattgatgacgagacttgcccgttgtgtggggaggaggcggagtccattgaccacctttttctctattgcaattttgcataccacatctggaggtcctccccttagggggtatacccgttaaatggttctggtggtagggtctgggattaaattaaattcctttggaacataaagttaaatggggatgatgcggaaaagttgtttctttatgcttcaatcgctgtggacatgatttggaaaa

SEQ ID NO: 335204 - DNA, 687 bp, Cannabis indica
cccccctcctcctggacggctggatcttgttcggcgttgggcaaagtgacgtgccgagccacttgagtgtcacacgcgtcaaccttgcgcattgtctttttggtacgagccaacatcctaaggctggacaaaagacctaaggaagaatgcctttcactagaagaaggtgggctaaaacagagacgaggatggtcctcgtgtaagagttgaagcaagtcctggtcgattcgatgttcgctctcccaaaactcacctgagttcatccacaaaagacaacacacaagatgagtgtttggtcagaatatcgagcatttaaacaagcaaatatgccgaacaggagaactcaattgattaaaagaataagaatatttaacgaaaagtcaaaactcaggaagtttgaaattttctcgagtgagggcaaaaaatttcatgaagcttagaataagcaagatgaaagacatgcattatgtagttcagaaagcaaacactctggacggtgaaatagcatgaacccatgacaaaggagaatcgtagagtttctaaacttagggtttcctacatatcttctacagcaaagtcaaaggtgcattcaaaaagtaaacatgcaaagtaaacataaaggaaatcgagaacttaatcaacgatcagatgtctggattcaggtagcgccaaaccaaacgagcagtt

SEQ ID NO: 335205 - DNA, 645 bp, Cannabis indica
tttaggagatttgttagattttatttatttttttttaaatattttctaacaacctaaattttaaattcaagttaagatatattttaaatatttaattttttgaaatagaattatcttaacctactttccagttatctgttacatgtttgttatgtttgtttatttctttattcaattttttttacaaacatattatttatttgatctaaattgctatgattaacttgttgacatatccaatgatctgattttaatcaaagttcaattgtcaatagatcttataaataatttgtaacaggtaaattttacaatttcttttatctctgtaaacctagaaacatgatgggacccaacccaatcattttacctgtgtgagcctatatgtttgctttttggcttagatgcatataggaagctcgtttaagttttacttatttaaatagactaggtttctaaaatataataacacattagatagttttatttaggcccaattagtattgggcttattcaatgaataacaattatttaattaatggttaaattcttctcatttgggccttgtgtgagagttagagggccattagtagtgggtacgacatactgaacccaaccctccctcacacaaaccaccccaattgtgaa

SEQ ID NO: 335206 - DNA, 1912 bp, Cannabis indica
tgactttaattgtcgacctagtacgttgcatttctcaatacttagttaatatcaatgttaccttatgatattgattatcatatactttttatttgatcgcagatagaccggctcgacctgccttggactcggttagcagagaagttgctgaagttcttggttgtctccttgttcaagattgtgactggcgattattgtgcacgaccttgaaattgcgggaacacaagctaattctagagaatgcaagtcttcatcgggagccagtatacaaggagccgtctgagaagcaaaaggagaggatagacaagcgtctttctaagtagacttcttgaccaacatcaggtatcacatcgcatatgtgtggtatatatatgagtcattgtttatatttgaacttctcttttcttgtctttgcagaaatgactttcctgaagcaagctcctgtgcttaaccacaagtcgaagactagaatagcgacgacttctcttgtcgttccccataagaggaagagcgacgtcgtggttatccctgccgcggattcatccaagaagctagctaagcctacgcaagacaaggggaagaaagtcgtgattgaccctgccgttcgagcccgcgacatactaacccttcaagagaagttcatgggcaatgagttcatatcaaaggtcgacaggattcctactgaggaactaatgcctcgttttgtagagttgccttcacagttcattactatgtttttgagggctttcattgctggttccaagggagtcaagcttttaaagaagcagaatgtccagcttcagtagaacgtcaagaagctgaagcaggaagcgactaccagggacaaagagctcgaggaactccgtaagtctaaggagcaagttgaacttgaagcaaaaaactcttaggcgaagattgaggagatgtctcgcaccttggaggttgagaaggagatggctgaggcttttcgagctatgtcacccacgcagacccaaggaggtgggggaaatattttccctgaagacgttgaagctgcaaatgccaaagaagtcgctaaccaggctgctagcaaagtcgtagatgaagccactgttcctattgctccaaaattcttagtttatttactttatgaatactttattttgccaaactttttaagcggtacgcgggttctcacaatttgtacttagacaaatttatctttattgtatttaatatttcgaacaacatatatccctttggggatatttatttatgttatcatattcgtaatacacgggtactcacgtctttcgctatttcaattgcggttttatttacaacttggtttaaaaaatgctaaggtaaagtgaattttttttaaagctcgagaaaaatttaacttttataaagaacaagttaattgttatcccaaattttccactctgacgtggcatcacgagaatggtgacacgtggagtccacttggagcatctactcgggaagatagatggagtaggatgcctcgctggcatatccagaagaagatattcagcgatccgtgcagagaactcaatacttagcgaattcagccttcgcatcatgagtcatcagctcaatccctataactcagggatcaacttacgtggatacggcatacacacgatcccactatcagcgtattcagccataatcccacgatccttgcattcagcattgatcacacgatctttctgtttatgcgcattgtaaggagagaggaaactcttcctcctcaagtttcccagccctataaatagtgatacatgttcactgggcaaggggaccgagagattgaaagtcgatacgcagctaagctaagactttattattatataagaaggctcaggtttttctctgaaggaaaaatagaaaatttaagtgtaaatttcct

SEQ ID NO: 335207 - DNA, 700 bp, Cannabis indica
aaattatatgtatattttataggaaaattatagtaaatgacctcatatcttagtactatgtaagtaaatattcttattttaaaacttgtagagaaatgacccttttacactatttattatttatgttatcttttgctacatgaataataataataataatttttcatattttattttagaattagaagaaaattacttaaagatcatgatatatatactagtgttatactcattttttgcaaaaataaaataaaatggctactcttgcacaaggtccacatgccaagagtaccttgaggacactcaagtcaaccctgagactttgaccaagccttataaatatcaaataagttaagacatcctacttgagggctccatggcacctctaggagactcgaaaacattgaccaaccatttggtgtcgggactcacacacccaagtgtgcccaaattagggttcatgggctcgtgcgagcgttttcaccctagaggccttaatccatcaagaaaaccaacaaagacttaacttatttgggcatgaaaaggcttagatttgcacataaggccaaaatagcataaaaggaacaagcctagctgaccactaccatctttatcgcacaatgagtggcagtggtcagccatgaagaaggggatgagatttcttgccaaaaatacatttttaccaattatatgtcaaaac

SEQ ID NO: 335208 - DNA, 791 bp, Cannabis indica
gggttcgggtccacttttgggtttgaaactgggtttaggtccgggtgtgggttcaggtccttattagggttcgcatccagggctgggtcccaaatccaaacacagtcttgttccatttctggtgccaggtcacgagctaggtcctaggttcaagttcgggtttgggtcgggtactagctcccggtcctagttctgtttcccaggtccctatccagattctgggtccaagtcccacttattttgtgggtttgggtccggtctaggttcgggttccaatcctagtctcgatttgggtttccatctctgtctggtttttgatctgggtttcggttcagatttaggtcctggtcgtggtcctagtcctagttcagttctagttccatttgctattttgagttcgatttcggtttgagttcgggacggagttcaagtccttctgagtttggctttgggtctagttcacgtcctgggtcttggtctaggttgggtccaagtcccaagttccaatccagatctgagtctggattcagttcagggtctatgtccttggtgctgatcctggtctgggttcgagtttgggtctgggtccgggtctagctttgggtctgattctaggtgtgggtttgagtttgggtccaagtctgtgtccccgtttgtgtccaggtctggaccccaatctgggtctaggatcgggtcaaggtccaagttggggtcccgaatgcaggtccaagtttgggtctaattcaggatctcagtccagatctaagtccagcatttcgatcccagtttgg

SEQ ID NO: 335209 - DNA, 609 bp, Cannabis indica
ggcagcgtgaccgagtgttctgtctcgggacatctgggtatattattttgtagtcactgtgcgacttggatattgtattttggcaattttttgtataaaagttaagaatcgggatctcggtgtttgtaaattaatatgtaaattataaagtttaatatttattataaaagttttaatttgacacatttttcaagataaatctttgattagcaaagaaagcactgtagcgtgccttagcgttagggtgttacaatagccttccttttatactaatttccactagggttagagttgaattatttggaataaaaattgacaacaagggagtaaaataacaatctagtggccgaccacatagtaggccctacactagtttggtttttgttatttttctcaactattttatctatttttcacaaataccactttttgcattttcaaccctataaatgcaaaaactatttatttaataattaaaataattatcaaataaaattatcatttataatatttattatttagactccataaactctcttaattaataaatagccctaaatactatttcttcaccatcaagccatattttagtgaaaaattcataaacta

SEQ ID NO: 335210 - DNA, 829 bp, Cannabis indica
gtaacaagaaaaaaaattaattattttttatcaattttttttatgcattttaaattttattctattccattcctattcctattcccattcctattcctattcctatattttcattcctcccaaccaaacactttttcctcagtttctcttttagtgtcgaagaactaaccgacgctaattgaacttttttagcttcagttattctttgaagcataaaatcactagctatttattgtgtcggtcaactattttgtgtgacgcgttgaccgacgcaaaatagatattttgtagtagtggtaagaatattgaaggtcttaatgaaagcaccaaaatattggttgggaaaattaccaactgactcagaggctaataaacgttgattaatcaccaatgaaagttaagaacaataaaaaaaaatagaaagaacacacagcaattatagaggtttgacccccttatatatgggtaatgacctactccccttttagttgtatcgattatgagataacgttgtgcatatctttaaggaagacagtgaattctagctacaactcttaagatgtttacagagaatattcagcaaagtgttctaaagtgcgagattatgtttcaagtcccttccccctgtgaattcattcactatttatagggtaaggttgttacaattagcttcgtaaaaggagtaactagatagtaaatatccctataatattgtgatcatcaatgagaaaatatggagaacatttagattttttaagtttgtaaaagaggtatgatcaactcgtgattgttaagatttgaagtagggtatgcagaaagtcatccaatc

SEQ ID NO: 335211 - DNA, 506 bp, Cannabis indica
ccttgtggcacttttgtaaagacaagtttgtaaccaatcttaggttttcttatcgtaagtgccttgtactgtttttattcgaacttaatacaattgtatttgattgcattactattcacaatgtaaacaactatattttgatcgaatatacagaacttttgggtttttccattgcttgtaatcttcttgtttaggtagttagtaatctaccaaactttatgatttcgagtcgttgtcaattctgcctcgcaattgcagttataatctaccttaagcaaacttaactatactttaaggatttatcactttgtatatttttaattttctcgcatgaatagttatcttatctatccgttttttaggtttaagtactttatcaaggtgtcgtgatgccttgtttagtactttcctagctcgtgagaaccgttagtatttagttttgtacgcgagttataacttttgatttttccaatcccatcaggtaggttataaatcaaaaaattata

SEQ ID NO: 335212 - DNA, 560 bp, Cannabis indica
actcacatagtgtagattcttcagtcgaggggccaccgctcatcttcagtcccgtgatcaatccaaactcagaccttccaaatctggcctcggttttacccacgtaaaaccacacttcatcattctttacctcagtcactttcattttcctcaacagtagttgatgcacaatcaccccggagaatttcagatcattcgcattccaaaaaactccaaaaggagtttccttcaccctctcggtcaggttaaaggcttcaaactttgctttaattgaagcaaagtacccatttcctcggtaagtgatacgcccaggaaaatgctcagccaaggggagaatgagttctggagccatctgcaaatacaaacaggaagattataaatcgcatatacgtcgcatagaaatcgcacagaaatcgcataacagccaatgaataacatactacatcgcacaaactcgcacataaatcgcacattaatcgcactaccagaaataattacattctgtttcctggttggcaacatatttgaatataaatcgcacacaatcgcacaagacatcg

SEQ ID NO: 335213 - DNA, 527 bp, Cannabis indica
tggggtccctctcctattttgtcaaaacctagactcgggtatttgttacttttgtagatgagtattctcgtgtaactaggttatatttaatgaaaaatcaatctgagttgttttttatactttgtgctttttgtgctaaaattcaaaatcaatttaatgtgtctgttcgtactttgcgaagtgataatgtcaaggaatacacatctgttcaatttcaatctgatatgatctctaatagcatgcttcattaaacttcttgcgttgatactactccccaaaatggtgtagcagaatgcgaaaacagacactttcttgaaactgcatgtgccttgttgtttcaaatacaagttcctaaacctttttgggccaatgcagtttccatagcatgctttcttatcaatcgcatgccatcctcaatacttaatggtgagatcccatttgaaattctcagggtaagtcattgtttccagttgcgtctcaagtatttggcagtgtttgttttgctcgagatgtttgtccacatgtta

SEQ ID NO: 335214 - DNA, 622 bp, Cannabis indica
ttagggcataaaacccagcactctctagcctacaccacttgtagagtgattagaggccctcacctagctggaaatgaagtaaggtcttagaaatgtatgcaagatcacttcgacatgaaccaagagccgaagtcctagaggtagcagaatgccctcgaaaggctcagtgctacagatgtgaacatatcaagtaagatgttagaaaggtatgtaagatcattttgacatgaaccaagagccgaagtcctagaggtagcagaatgccctccaaagtctcagtgctacggatgtgaacctatcacttttgggtgatcagactcttaccatgtcagctaccctcacaatgagcctctagttgttaaggttcaaatagctaatatgatggtggccagggtaatgatcgatgacagagcgtcaacaaacatcctattcaagcaagccctactcaggatgggtttaactttaaaagacctggaaccatgtgaacatcttatgtatggtttcagtggagccgactgttggaattatttttaccagaatcttagatctactcacattgggtgcagcagaatatatgtctcctttcactcaaatctctaacccttgattcctttctgtcgca

SEQ ID NO: 335215 - DNA, 1281 bp, Cannabis indica
cttcatgggctcagcctccgtccactttgtgaagtagtcaactgctactatggcatactttacccctccctttcccattggcaagcacccaatatgatctattccccagaccgcaaagggccagggactagtcatcagggtaatctcgttgggggggctcttggtatgttcgcgaacctttggcacgaatcacatttctgtacgtagtctatccaatcttttttcatggttggccagaaataccattgtctcagtatcttctttgagagacttgggcctcctctatgatctctgcagaacccctcatggacctctagcataattttcttagcttcagggtctgatacacaccttaggtacgacatgcagagtcctcttcgatagagaatgatatccatcatcacataacggtgcgcttgatactgtatccttctggatagtgccttttcttagggaaactcgcccttggttatgtattcgatgatggggatcatccagttgagctcttgttcaactgctcccacaatacttttggctttaattcttggttccaagaggcgttcagtgggcaccaccccccagtttctcaatttcgctgtctgatgctaacttagccaaacaatctgcgtgagcattcttttctctggggattctttccactttgtagttcgtgaactcatggagcagctcctggacaattgctacatacgcgaccattttttctccacgtgtttgatattctcccgatacttggtttactaccagttgtgaatcactgaagacttctactcttgtggcccccacggcttttgctaacctcagccctgcaatcaaggcttcgtattcggcctcattgttagaagctgtgaattcaaaatgtagggccgcctagagtcgaagtctgtttggggatatcattgctacccccactctggatccgttttcgttggaggcaccgtccacaaagactttccatgctggggtttgtggtgtgggcacgcttgcactagcttctgcttcatggcactccgttatgaagtctgctagtacttgtccttttatgaaagtgcgcggtatgtaatgtagatcaaacttgcttaattccatggcccatttgagaagtctcccggatccctccggcttctgcaggagttgccggagcggatggttagttaacaccttaattgggtgagcgtgaaagtagggtcttaactttcttgaggctattaggaggcaaaaaactagtttttcgatcaccggatatcgtgtctccgcccctat

SEQ ID NO: 335216 - DNA, 1120 bp, Cannabis indica
ttgtattcttttgtgcaagatttcactactttgtcatgaaatgttttcttgattgcagagtagcatagtgtacttatcaatgtatctttgtccttgtaaatttctacattttctattgtttcatctcgtttatcattgatgataatcatttctgtgttgtcgacttcctcttcttcctcccggttgttttcaagttgttgtaccatttctgcagccataagctttgcgtagtcggtgaagtcgaaatattcatctactgctgtagttttttctctgttgttttctggttgttgtatggttgattctgatgtcacagtccctgtttctagaaaaaatgtatcatcttgaactgatccaattgtgtgcgcagatagttgttgcttggaagttgttgccaggttgtttgcaggttgctgcacatctgcttgtgctgagttgttgtcatacgatgccatcatcatattgttgcacatcattgtttggttaggtggtgctgtgttgctaattatgttcacacacaatgggtaccttgcgaaatcaacctctttggttaatagctttatgtagaacagctgacttttgtaatccttgatttgtagtggttggcctccttccttcagttggtatctcagttgtatttgtgttgtttcagggttgcattggagttcttccatcattattctcagtagttcatcaaaagtgcatttggtggaaattaattctccacttgattcatattcaacatagtttttgttgtcatcccaatacccattgctctgtaccaaaattttaatggttctgtatcttgaaagaatgtaaattatttatttgtttcagtttcagtagttgcaaacaactatttaaatatggcaaaacaactaataaacaactctttccagcaacagcttttgcaaataacattcgatctggacgactatttaaatatgtcaaatcaactattaaacaactattttgaagcattcagtaattaataagaatagattcatcttttctcgtttgtagatcccaaacaactattatttactgaaaaacaacttatgaacaactgtttacagaataaaactctgtagcatctatttatatgcattaatattttttt

SEQ ID NO: 335217 - DNA, 1943 bp, Cannabis indica
agctgtatcacccagatattatgaataccccttttccttcgggattcaaaaacccgcatgtcttgtcctatgacagaaccacaaatccggtctcgcatttgaataactttaacatgataatgcgagcgagtaatgtgacgaataatttacgctgtattttgttccccacctcgcttgttggagcagtgagtagctggtttaacaaatttactcgtcattcaataacttcctgggagtagctgtccagggatttcaagaggcaatttcatgccacaagggataggcgacccgaagcgacctcactaaccaatataaggcagcaccctggcaaagaacttaaggtgtacttaagtcattttagcacagctgccgctagggttagatatttggatgacagcatgcaacttacaacccttcaagcagggatctccactgatccatcaactgccaagggcgaattgtgggatgatttacaaggacgtctggtaagaagcatcactgagttcaacgagagggctcaggtgtttgtcaggaaggaagaagcccaaaaggaaatgaacttgttgaaaacaaggtcaagaggtaatcccagcaatgtttcaataggaacagcttccacgagaattgataactcgggggcttctggtctgaaaagaaaggacgaaattagggaaccgtcgaaggatagaaagaaacaaaagaagcatgagaaatacgtgccagtgtatactatttataccgagcttaatgaaactagagaaaatatttacctcgcacatgagtaggaggtagccttcggtaaacccgagcctatgaggaattcaaggagcaaaagagaccctaacaaatattgtaaattccaaaagatattgggcatacgatcgatgagtgtcgccaattgaaagatgagataaagagtctcatggctcgaggccattttaaacagtatgtgaagagacagggccagggatacaaccaacccagtcagcctaatattccaaataaccaggggttacaacctattcccgtggaaggagaggacatcctggttatttcgggagggccgaatatcgcaggggaaagcaataacgtccaaaaaagatatgtgaatgagataaagaatgagcagtttgtctttggcctagaaccttccaagattgtgaaaactgatgaaccccccattgcattcacagaggaagacgagaagaacatgagataccctcatgtcgatttgttggtcataaccattcaactcgcaaataagaggatcaagagagtgttaattgacaatgggagctcggtatatatcatttataaggagactctaaagaaaatggggctcgaaaaggccaaattaaggccttgtatggtgaatctttgcggattcaccggggatagcatcgctagccttggcataatcgagctcgcattaactttaggcgaggcacctttaactgctactgttatgcaagacttcttggttgtcaacctgtcctcagcttacaacttattggtggatcgtccagcactgatcggactagggacagttagttcgatcaagcacctatctttaaaattccaaacactagatggtgtgggagtggtgcgtggcgaccagatgctggctcacgattgctatttcatagagttgcatcataaaaaggccagtcatcagttaatgacgatcttggcaggagaaaacgagaagaaagaagaagatcttgatccctgagttcaagatgaaagaaacctgctaaaaccaattgaagaattggaagaggttattctcgacccaggaaatcccacaaaatgtgtgtacattgggaagaacctggacgagcagctcaaatagaaattaataagctttttaaaggggaaccaggataaatttgcctggagtcatgaggatatgatagggatcgaccctaagattatgataggga

SEQ ID NO: 335218 - DNA, 622 bp, Cannabis indica
tctttattattatttttggaatagaattacgtttgttttctttcgtttcaggtttcaacacttggaatgtataaattagtcaaatttcagaaaacagtaatctataaaatagtaaaatttttttaagaaaataaagctgaaactttaaacctaaatttgactattttataatctgattcagaaaaaagtcaaaacataaaagttttagatcacttttttatctttccaacccatcttgaattagctcatttggattttttacgtgaaagttatacatattttactgagagaagtcgaagtaaaaaaaatgggtccagtggccgcggcgaggcttttggtggctgtggtgagggactatagaaagcccattttttcacttttctatgatctacgtagcgaggctattggccacctcaatgctgactccataaaggtcgaggatgtaaagtccttttcttagcaagttagatgacaaaatatttttcttttatggtaagattatttggcattcatactcgattttcttaccttgttaattcggttttagttgctcttttctatgttaggaaagatgcacttttcagctggactttcctttgtttggaaacttcttataagagaa

SEQ ID NO: 335219 - DNA, 411 bp, Cannabis indica
gtaaaatatttccaacacctccgacattaagtagttaatttcctactttacgtgcgagtagcttatccgctcgttcctcaatctacgagccttcaacgattccacctcattatcatcggagatgatcttattttaagcaaattcaaatatatttttaatgaacttgtcatcttatatatatttttattgcttaaatgagtagttaaattttctacccacgtgtccgatttaagtatttttttcacgacatttggatgtcttgtttaatactttcccttagcgcgagccgttagtgttcagctttatgctttagtcataacttttgattttcctttctcgtcagataggttataaataaaaaattacagttgtttaatccctttctcgttagaaaggtttgatcaaggcgtt

SEQ ID NO: 335220 - DNA, 453 bp, Cannabis indica
ggtttaagatcgagactggggtgcggttctaggtccggacccttattttttgtccctagtcttgtgccatatttgggtctgagttaaggttagggttcgggtcttgagtcaaggtttgggttcccagtttgggactaggtgtgatttggagtcttcgacctggtccggttacggttctagaccttggtcaaatttcaattctggttccaagtctaagtcctagttccagtcccaagcaacttccggtttttccaattttgggtcacaaggtatgggttcgggtccacttttgagtttgggactgggttcaggtccgagtgagggttcgggtccttgtcatggttcgagtctagtgctgggtcccaaatccagacaccgactataggttttgtccaagccctcggtccagatccggatccccatctcgggtcctagtcctagttcggttctagt

SEQ ID NO: 335221 - DNA, 621 bp, Cannabis indica
ttgccaatcatcctcttgtgcactttgtcctgtataacaaaatgatcagtatagaatttcacataaagaaagttttctttagttaggcaattcacagatataatgttgtatctgaagctaggaacatacaacacattatttagaatcaaattagatgaaagtttgactgaatctcctttatcaacaagcagatagttgttatttggtagtaacagtctaatgggatcgattttacatataaactggaacaattttatgtcagaacatatgtgccttgtggctcccgaatcaagtatccaagtttcattaaggggaagtttggtcacattggaaagcataatacaagtgttacctgtagatatgctaggatctgcagtagcagtgttgttttgttgcagagccaacaaatttagaagttgctgatactgtgcagaagtaagttgaggaaggatagcttggctgtctccaccagtattgctagtttcagggctggcttgaacttgattagcagctgcatcttttcccttgttttgattgtaaccaggagggtatccatgtatttgtagcatttctcaattgtgtgtcccaagatgttacaatgggtacagaagggcctatttc

SEQ ID NO: 335222 - DNA, 1003 bp, Cannabis indica
atttttttatcaaataaaatattttattttttaaaaataaaaaaaataaaaaatctgataatatttttatttcaaaaataaaaaaaataaaaatatagatatagtgacactctataaatgtagctattatttttacagtctgacaatgtgtgactctaaacgtttatagtgacatgcaatgaatgactgtagacacgctgtggagtgtcactaaaagctatttttccattcaccctcattagtgactcgcagtgaaatgtcacttaagagttttagagtcactcaacatgggtcactgaaacccatttttctagtagtgagtgttttaagaataaagtacattgaatggtgtaacggtaaattagtccctactcaatatagatcatctatagaggatcattgattattgggatgataacgaatggataatctcatagctcatctatattgtggaacatatagagcattctatataattgagagtgtaattttaaatctatagcggtgcaagaagaaattaataagttagagaatttacttggtaaattctagatctgcttattggaagctcggttatataggcccatggtccccatactagttgagataaactgcgtataagactcagttaattgattttagttaatcaattataattctaaagttagactatgtctagtttataaatttttactaagttgtggcttgattgtgaagaaatagaattttagggtttatttattaattaagagactttgtggagtctaattaataaataatataaatgaaaattttatttaataattaatttaattattaaataaatagttttgacatttataggattaaaagtgcaaaaagtagtatttgtgaaaaatagataaatgattgagaaaaatggcaaaaatctaactagtgatggatccacataggggttggccactaggtcctttttttgctcttattttatcatttttttttatttcaaataattcaatcctaa

SEQ ID NO: 335223 - DNA, 1476 bp, Cannabis indica
taaaaacacatggttcccctacatggaactcaacatctctacgtttcgaatctgcgtaactcttattctatcaacggtagatacttaatccaagagctttcaaaatccgtaacacaagctcgtaacatatcctccaatattttgattgtcctttcggactgcccatctggctgaggattgaatgctgtactgaattttagtttggtacccattgctcgttgcaagctctgccaaaacttggaggtgaacttcggagccctattcgaaactatagattgtggtaccccatgaagccttactatttccttattgtacaacttcgctaactgatctactgaataggttgtttggactggcggaaaatgaccagacttcgtgaatcgatccaccacaacccaaatagaatcggacaaacctatggttctaggtaacccaaccacaaaatccatcgtgatgtcctcccatttccattccggcagggttaaagactgcaacaaccctactggtctctgatgctcagccttaatctactgataggttaggcatctcgatacgatttctaccaaattcttcttcataccactccaccagaagtaaggtttaagatcctgatacatcttggtggtgccaggatgaaaggaatatggggtagtatgagcctcttcaaggatttcatttctgagttccatttggaacacaaaccctagctttaaataataacatcccattgtctgacactgaaaaatctatgatttgaccagctgaaacctcttctctattttttactaacttcggatcagtcatctgagggaccttaattctttgtaatagatcatattgcaacgtcaagttgtgaagcttgcctaccacaaactcaatgctagatctgaatcatgctagctacctgcccgggacccttcttgcttagggcatcggccactacattggccttcccatggtgataaagaatctcacaatcataatcctttactaactccaaccaaaacctctgtctcatattcaaatctttctgagtaaagaaatatttgagacttttatggtcggtataaatttcacacctttctccataaagataatgccgccaaattttcaaggcaaatactaccgcaaccaattctaggtcatgggttaggtatcgctgttcttaatcctttaactgacgggaggcataagcgataactcaatcagcttgaatcagtatacaccccagaccctgtctggatgcatcacaataaaccacgaatttttctttttcagaaggcaaagctagcattggagctgtaattaacctctgcttcagctcttgaaaactagcctcacatttgtctgaccatatataccgctgattcttttcggtgagctcggttaagggtgttgaaagtttagaaaacccttccacgaaccgacgataataaccagccagaacaaagaaacttctaatttctgtcactgttt

SEQ ID NO: 335224 - DNA, 1408 bp, Cannabis indica
tggaaccgacaaaacttcgtcatgtccctttagctggtatctttcttcatgggcccgggcttcttgtacgggattaacgactgagttgccatatatacactctttatatcttcagtcagaatagtgaatgtaatgtatttggcatggttctctcggggagtctatccggatttgtaagtgaactttcctttttccgtttccttgcttgtggtgttgcttgaacgcttgccacttgagcttgaattattcgaatagttgggaagttggacggatgttccagtggaaggagccttcattttgcccgacttttgttcaccttctgctcgttgaatggcttcttcgagcttgatgaagccggctcggttaaggaaatcactcattgagtctaccggcccgttcttccttatatctttccaaagttcacggaggactcaatgccccccagtatcgcggataactttccatcctcggttacccgtgaaactttggtcgcttccgtcatgaatctgcttatgtatgcccggagtggctcacctggtcgttgctttacttctaccaaatctcccagatgcaatgggagctggcacaaggaggagaattgcgcatggaattctgaagagaaggttttccatgaactaaactttccatgagccaacttgaaataccattgctgtgcggctttcgacagagtggcagggaagattctgcagcatacatccccccatactccttgtaaatccatttgtatctcaaagtacttgagatgggaaagaggatcttctctcccagtatacatcttccacgttggcattttgaacttgtgaggcagtggcaggagattgatctctggtgagaagggagttctgcgtgctcggtttaactcaagatcattattacgctatccagcgatgccatgaaacatatttttcaatttgtcaagttgggcctgtacggctgggctgacctactcggcattctggtcgattaggattacgtcagcgtctttctgggcaaggatttgagtacgggttccagggtgcacgatcgttgtagtattctattcgtctgttccccttcttctgtttagatcgttccttaggtcatgggttgctcccaacctttcgaacacagaagagcctagttgccttagtgattgattcgcttggttgacaggtggaatagcgccattagtctggttggaaccattaggtatgactcctcctgatgaaatactagacaaggtctgctcgtctaccgcttggcccatgagcaaaactcgtaaccgaggattgggcggctgaccattggtagtctgggaagtattcatcgttaggtcctcttccgtttctcctaggggaatgacgttcgacgattgctgacctacagtttggtaggctcttcgtatcag

SEQ ID NO: 335225 - DNA, 793 bp, Cannabis indica
agaggacagtgactttcacccctaaatttggagaggcattcatatttgaaggagtcaaagtcaagtcaagcctaccgctagttacaaccctgaaggcacaaaggatgatacgtgcaggatgtcaagcatactaggctagcatagtagacaagtcaagagaaacccccctcaagccagagaatgtccacatagtatgtgaatttcaggaagtttttccggaagacctaccagggctacccctagatagagagatagaatttgtgattaagttggagccaggcacaacaccaatctcaagggctccataccgtatggctcctaatgaatcgaaggaattgaagactcaactacaagatcttatagacaaggggttcatcagaccaagttactcaccttggggtgcgccagtattgttcgtcaagaagaaggacggtagtatgcggatgtgtatagactaccgagagttgaacaaagtgactataaagaacaaatatcccttccctagcattgatgacttgtttgatcagttacaaggggcaatcgtcttttgaaagattgacttgagatctgggtaccgccaatgtgcgagaggaagatatagcaaagaaggcattttgaatataggatgggcattataaatttctagtgatgccatttgggttaaccaatacctcaacaacctttatggatttatggcatatttacttatcaggattgtgaatgtgatgtagggtaatgattcattttcttttgtttacttttatttaataataggaatgctttatgggttaac

SEQ ID NO: 335226 - DNA, 542 bp, Cannabis indica
aagctcatttgacacattcagaaaactacccacaaggtcagagcttctctctctaatttcattctttagaaattagagcttctgacacttagtatttttcctgtaattaccatctcatgagaaataaaaactcaaagtagatgtagctccattactgtcgcgatacagaaagtgaactactataaatttattgtgtctctcttataattatttaactactttttcattctcgctaatctagcgagcagatgtggcttagaagtctaatccagatttttgagccaacaagtgccttgaaatcaatcagcacagaagatgaattacgagcaaaattcataaatactaatcttgactataggcaacattcataccaagataaacccatagctccagaatgacccttgagacacctaaatggtgcacactatgtcttataacccacatgcaagtaatcaccaaaactctcaatagagaagaaacctatcctgccaagaatataagcacgcattttatcacaaaaagaaatcaacagttccaagggg

SEQ ID NO: 335227 - DNA, 462 bp, Cannabis indica
agtcagtcaacaaggagcgacttctcgtaggacgaagatgataacgccccggctctttttccatcaaaaaatagaagtggatgacgtcagacacttcccactgaacacccgccttatcccctaatacaatcagacccaaaagaatagcccacacattagggagtaactgggcaggagcaagcgaataatgtgtaagaaattccttaataagtctaggaatgggcaacctcagcctaatcttcgactcaaaccagtatgagtgtaggcatacccactcgttttgagaggaatccgccctttcgtgctgtttaggaagcctaatgtaaagcccgcttagttaatttggaaattatcagttaattatgattaattatgaaattatttatagctatttaaataatttattatactgttatttattgaattcagaaatgcattactatgtcattcagtagttttcat

SEQ ID NO: 335228 - DNA, 588 bp, Cannabis indica
aaacattcttctaggtcatccgcctgactaccttcgatttgaccagcatgttgtccacgtatacctccatatttctccccagaaggcccttgaacattcggttcaccattctttggtaagttacaccagcattctttagtctgaaaggcatgaccaggtagtagtatacccccttatcggtcctgaagctagtgcattcttgatctgcgatgtgcattttgatttggttgtacccagcgtatgcgtccatgaaggataatagcttgaatctggaggtggcgtccaccatctggtcgattcttggcaaggggaaacaatctttggggcaggctttgtttaaattggtaaagtctatacaagcccgtcatgtcccgttgggctttggcaccaacaccggattagccagccattctgggtaatacacatcccgaatcatgccactagttagcaacttgtccacctctttttccaaggcttcagcctttactgagtcgagggggcgtcgtttctgttgaaccggtggcatgtccgggttgacattaaggacgtgggttatgacgtgggggcttatgccggtcatgtcttctt

SEQ ID NO: 335229 - DNA, 1155 bp, Cannabis indica
gaagaatgtcgccaattgaaagatgagatagaaagtctcattgctagaggtcattttaaacagtacgtgaaaagacagggccatggatacaaccagcccagtctgcccaataacccaaacaaccaagggttacaacctcttcctgctgaaggagaggacatcctggttatttccaaagggccacatatggcaggggaaattaataatgcccagaaaagatatgtgaaagagataaagaacgagcagtcggcattcgccccagttacttccaagaaggtgaagaccgaagaacctcccattatattcacggaggaagatgagaaaaacgtgaggtatcctcacatcgatccattggtgattaccattcaactcgccaacaaaaggatcaagagagtgttaatagataatgggaactcggtaaatatcctttataaggagaatctatggaagatggggctccaaaaaaccaaattaaggccttgtatggtgaatctttacggattcactggagatagcattgccagtcttagcataatcgagctcgcattaaccttaggcgaggcacccctatctgccactattatgtaagacttcttagttgtcgacctgacatcggcttataacatattgttgggtcgaccagcactgatcgggctaggggcaattgttaggctatttttagcctacattttggatcactttttatagttgttttccttctttgttattctttttggaatagaattacgcttgttttctttgatttcaggtttcacacttggaatatatcaattgatcgaatttcggaaaataacaagctatagaatagagaaaattctacaagaaaataaagctgaaacttcaagcttaaatttgactatgttctaatccgattttggaaaaagtcaaaacataaaagttttagatttctttttcttctttccaacgcatcttgaatcaactcatttggagttcgtatgtgaaagttatacatattttactgaaagatgctgaagctgtcaaattttgctccaatagtcgcgaccaccactttctatggtcgcgaccatggtcgcgactaggagccaaacagcgagtttttttttcgtattttgcctatggtcgcgacagactttatgtagtcgcgactagagg

SEQ ID NO: 335230 - DNA, 556 bp, Cannabis indica
aaaaaatttattgccctcacttgcttgttgaagtaccgagctacctttttttgataagccactagctttagctttgttgaggttcgtctagtgattctaccaggaggcatgattagctccttaatcgtatgttaatcttctgtgggatggaggctctaattccacgggcagcatggcctcataaccataggccatagcaaatggtgttttcctggttgttgttttctttattgtttggtatgaccataatacttctggtagttcctctggctagttccctttagcttcttcaagtgattttttcatggtgtctttgactgtcttattgattgcctcgacctgaccattttattgagggtgtgctactatgtagaaactttttatgattccatctgtcacacaaaaatttgtaaacagctggctgtaaaactgtttgtcattgtccaaaacaaccttgtgcagaagtttgaaccgacatattatgtttttcaccacaaagtccaatactttttaaatgtgatcattgctaaagcctcggcctccgtccactttgtaa

SEQ ID NO: 335231 - DNA, 804 bp, Cannabis indica
gattgtttgtttgtttttggatggtatcatgttgtaatggtggcgagtacgaggaaaactttgacgagtacgacgcctacaacgaaggcagttacatagagctgctgctcttaaaacaaaaggctactaatcacgaagctgagatcacatcccaaaaagagtaaaacaaaaagatgcaagaggttatgatcgccatgcaaaaagtcatggagacagcagggatccacatacaccctaaagccatccctgcgggactcgaggaaacaccggaagagtcctcaccaagcactcagaagtataagtccagggagcctagccccatacggtatccctctaaagaacgctgaaggaaggaattctggctgagctagccatactgtgcaaggacattgcccgagtctccaggagacaaaagggggacaactcgaactttgactgtgaggacgggagccatgcgctagacacattctagaggcagagctcctcaaaaattttaagatgcccgaaatggcagcttacaccagggactcggaccccagcgatcatttgtctcggtttaaccgagtaatgacggtcatgagagtcagcaatgacgccaagtgcttatgctttccacttacattaagcaggtccgcagaggactggttcaaaaagttggaaccaggatctgtggactgctggaacaagttgcaagttagtttccggagacagtttgtcgccgcgagaaaaataaatcttgaagttagtgccctgactaacatcaagcaactacccatagagacattgaaaaatttcataaagagg

SEQ ID NO: 335232 - DNA, 673 bp, Cannabis indica
aaatcctcttggtcctacttatttttttgactatgcgaggcatagtatgcgactagaccctgtcatggtcgcatcatctcgtgagtttagatcaagcgaggctaactctatgagagtcatcaattaacaagtcatcattttctcaagaactgggttcacgtgtcaattttatacgagattgctcttgtatttctaggcgagaaatttgcactataacacatgttcctagtttcgcaattgacaattgtgtcatatagagaaactattaatgagaggcagttgagttattgtcacgagatggtgatatttagctatcttgtcaagggtttcaacaagaaggttgcatttattattttttatcttcccaagatgccatgtcatcacacccttcagggtgtgtgtaggcatgctcttaggtaagcattggattaggcaacctttggtattcatctaccacgtgtccatatccaaacagataggaacgcttcgtatttaaccctctcaaatacaaaatcgatcacacttcactttccctcccattctgaatctcttatttgaatttttcttttcccaaaagctactaccgagggctaagggagttttaaagtgacaaccaaattctgtaagaaattggaaccaactgaaaaaggggcaattccaagatagttacaga

SEQ ID NO: 335233 - DNA, 761 bp, Cannabis indica
ttggcaataatgatgttatcaaaaataatgcgatctgagagaaaagcgccctggttatgggaaataaggtctaggagagtagatttgaggcgatttgcaatggttttggatactaccttgtaaagagtggaacagagactgatgggacggaaatccttaactcgtgaagcgtttttaactttgggaatgagcaccaaaatagtttcattaaccggcctaagatcagcattggtagtgagagcatataaggccgcctggcagagatccttgccagcagagtcccaatttttttggaaaaaactaggattaaagccgtcagagcccggggctttatcacccgcaagctgaaaaagagcagctttgacttcatcaaaagtgaaaggagagataaggaacgctgattgagtaggggtgaggcgcttagagagaccttgcgtagcaaaagtcatagcgtcagtgtgagtgccttgggacgcaaagaggtcagtgtagaactgaacaaaagaggtggtaatatcattgagagtggtaacttgagagttgtcatccagagttaaagatttaatgaaattggtacgttttcgcgcagaggcacggttatggaaatatttagtgttcttatcacccgctttaagccaatttactcgggagcgttgcttccaaaagatttcctcttttaccaaaaggctatctaaatttttctggagatcattggcttttttgacatcagaaggggagacagtaggacccaccatgagacg

SEQ ID NO: 335234 - DNA, 1436 bp, Cannabis indica
cgcctaagatagttagggtgttacataaatttacgaagtatgaaacaatagtggaagctcataaaataagaataaccttgactttcgcccaccgggacaacgttagattcttattttgatcgaataaaaggttgctagaatggtgtcctttttagatgaactgacaactctattcaatgaatgatatctttgactctcacctaccgggacactgtatcaatttattggaaaccttggaaattatttaagatgtgtttgttctgtattcacatgtctttcttacttgctaaatgtatgataatttctaaattgtgtatgaatttatattgaaccatgttgtttttgttattaatattggttttataaatttcgaatcttcattgttggtctagcttaccttgttattttaataagacaaattccaaaggattgtcatatgttagacaaattaaatagagttagatcttgacaaataagtatttgtggatgcaacatctagtggtacatccaaagatgacaacatagactggtatttataatatgaaacaataaagaatttataaaataagaataactttgtctcttgcctaccgggacatcgttggattcttattttaattgaaattatccttaagtttttcctcttagctttttcatttagaatttgcttagagagtatatcattggatgaatggtttataaatcatctgttgggattttatgccctaaataaaactcatttcaatttgttatcaatagaagattataaatcatttatgtttacatgtagtttttatgtttatggtttagtgtgtacgatttctgttaagtcaagaacatatagttattcacaattacagtgatgtcaacacagtggaagttgactgaggttttcgacaaccaattaaatagtagaatgagtagaggtgtagaaagtttaatgcaggtgatttttacgtggttggggcattaatgagccttagtccacgagtctttgttatattgtgagagcgtttttacagagaatgttcttggtgaatctctctcttctttactctcttcgcttcattaattaatcgatcgacgccttttccattctgtctgtgagggtatttatagtgtttttcgaggagatcctagaaagggatcacttgtctttttgtgttagtctcttaggggcacaaattcctagcagatacaaaataggaaatacatgacctataccgtaggcattttaggggttaggtggatataatcttttatcctcccttgattgatgtgattcctcatattgtagccttcactagactcatcgattgttgtgtaatcgtcgtaaaaaggggcttaagccatctgtcaaatccttttatggaggttctgatacgttttcccccatgcgccattaaatgcgaagtgactgttcgaacaatctcttt

SEQ ID NO: 335235 - DNA, 396 bp, Cannabis indica
tttaattataatttaagtaaaattttattttttatttttatttttttaaattaaacaataaaaataatttttagaattgaacacatattaaaattaaatttaaaattaaacacaattgtggtaatttttgttaattaatatgatattaatttatttttctattttattaaaaattaatataataataaggaatatttttttagtgtaatttttggtgcttaggttggagtagaaatatttttttatgccaaatttggtgatagtgtaacaccaaatttggcgtttccttggagatgctccgagtacatttatagcttttgcatgatgtttagtaaaagtagagtacaatgttggaatttattttaccaggatcttagatctactcacaagtatgtt

SEQ ID NO: 335236 - DNA, 1057 bp, Cannabis indica
aaaacgagtttatggaaaattctgatactgttcatcaaggtggactttctgaaccaaaacttccagtgacatctagtcttatagtggatccagttggaatgccacctgaggtatattaatctggccattatttatattttattgcaccctttttaggtgcacatgtgttgggtcattgttgccttaaggtgaatttccagcacgtatgtgttgttaggctgttttacctgggcttatacttgaaacaaaaaccctgatacatttttagatgtaattatggatagcttcgacaaggacatagatattaaatagagagccagaaaggaaaaccaaaaactagacagactcttcctctttattgcagaaaataggatctgatctatttgagaggccgcaataatacttccagattttttctgtctaaaactcttctcttacttccttatataccactgtactaacacaactaacttctgaacaatttgtttgaaccaacctgaaacaacagaagaacatgctggaacaaaaattactgctctttattatttgtatacttgtcctgttattgtaaccctctttccatatttataatatagcagtatggtgtcatgttaaaggaacacaaaaagggctaaaacttaatagttatccctaattttaagttgcttacaacaaatttgcttgactattactgatactagcggattactggagtttatactacggaactactggagttttgtaactaatttctagtcgggttgcgtgtgacatcctatgggtctaatattttttgaagtaactgttctttggttgtttgcaatgaagtgtatttttgtattatcaaataataatatttatgcatgtcatttataaagaatatagaatgttatttatttacgctatgtttggaagttgaattttggcgaggaaagaaaaaggtaaggaaaatgtagagaagaagagaagcatggagaacaagaaaacaaatcaatttttcatgtttgatatggaaagttttgttgaattgaaaattttctttccataccaaatataa

SEQ ID NO: 335237 - DNA, 709 bp, Cannabis indica
tatgggtctaacagtgttgacttttgtattctattttgtcgcttaggtcggctagaaagaaaggacttgtaataagtttgtaaatatttttgggatcccaacggtttaaaagtttaaaagtattacaagttttattttcattccgattaatttaaaactttaaattctgcgctatttttgattagtaatcccgaattaggggattaggactccataagcattttgggtagcgtgcctaattatttagggcgttacatgaccagtcgttgtggctaggtttgtgatgcctgccaagacggggtttgccacatttttcgggtttgtggagattctagttgtggctggaacatgaacatcaagattagccatcatagggtcttgaggaagacccgatgaggcagaagttatagttggatttctgcttgtgttaaccattatgtttgatcagataaattggcaaagctctcaatgaaagcaccaaactgttgacctcaatttggccaacctagagtaaagtcatatttattactgatgctaccggatgtacataataagaacataaaaagacacaatatttttataggggttctcccctagttagctagtaatgacctactcctctttttgttgtattaataacagagataataccactcaaatcacaatatatgaattaagtaggcagatctcaagtaagagagagagagag

SEQ ID NO: 335238 - DNA, 459 bp, Cannabis indica
ttaagcatcccctgaagttgcaacttaagctccttgacttcagctggagccattctatatggagctttagaaatatgttcgattctaggtgtcagatcaattacaaaatcaatttctcattgcggcggcaatctcggcaattcctcgggaaacacgtcgagaaagtctcttaccaccctgaccgcctcaggcccaaatgtatcgggtctgctggagtcaatcaccactgctagaaatcctacacaaccactgtatagtaaatatctagctctcagtacataaataaccagggcccgagacccctgaactgatccaatgttaaatgccaaaatattacatattttatagtgtaaaaatacgaaataaaattaattctttataatattttcaagaaattaatgcaatatattattatattgaaaatattttatttaagattaattttatctttgtttataa

SEQ ID NO: 335239 - DNA, 687 bp, Cannabis indica
cacaataatatgctagaaggtttgagcacaagtagagcaatattttttgatggggtacatttttctattggaaaattagaatgaaaacttatcttcaatctattgattatgatttatgtcatattgtatgttattgtaacaccctactagcttaggcgtgttatcgtgatttaaaatttattgtgcaactcattgctaatcaataggtttattagaaatcgtgtttaattaaaacttttcttaattaatctttacttaaaataaaataaactttacaaagccgggatcctgtatttcaaaagttagaatctggatacaacatattaaatacgaaagttgtcgcctagcgaccattcaaaatatagcttactgtcccaaagatcgtacgctccaggtttaatcgccccaacatttacaatcttcattcgctcgcactcactgctattaaaccattagctttgcccttgcctacacatgcaaacagtaactgtgagccaacacactcagtaagaaatgcataatcataacataagtataactcgaattacaattaggcgcccatacacccaactataaccctatccctgcaccctaggtggtacttgttaggttttatgccctaaataaaactcatttcatataatcagatttacttgttaataaagatcagaaataacattttatgtt

SEQ ID NO: 335240 - DNA, 738 bp, Cannabis indica
aaccttgtttatttgtttttcttcttattacagcctaagctgcttgaactcagttgctatcttagcgagttgaatcggaaagctggacaaagggtggagttcgtccatgataaagatgaagctcgtattttaattttaaattaattgttttagtttttcagaacaatttagatttcaattattagtttgggattttattccctatttttctttcatattattgcaaacaatttttttaagagtttataataaagtttttccattttataaataaattgcaatatatgagttgagcttcatttattttatcttatgtaacaattaccaattatatttatatgtttgtatgtgtatgtgttttattattgatacaaattctatagtaatttaaactcttcatagagttaatactatataaacactaagaaataattttctatgtttgtgaataattgttaattctaaaacaattattaagaatttgtttaataaaaagatactttgatctgataggggtggagaaaaagtcaagaataatatgcagttcaacgatcttttatatctattgaactctggattatattcgaaactccacataatctctataacacttagagaactatgatctctatatcccttaggggtggatcataatctctatatacttaggggtggactatataccacattattttttgtgacacaaaattttaaacatggaagtaatataatgaatta

SEQ ID NO: 335241 - DNA, 429 bp, Cannabis indica
atttgaagcttctcaaacatattatttttctcaccccttcctttcttaaaattagggtttggaggctttatcctagaatattaattaaaggtagttttctattctcacctctgacccggggagcttgtcccacctccgatcggcaaaacccaatagtctagcgtccatcacgcaccacctcggggccccacgcaccaccactttctgtcgcgaccctctccacgcgtcaacgcgtgtacgcatgtggcagtctccagcagcatttttccacatcatctctgtcaggtttcttcatctcaggctcttctccaactctagcgacattttttccggtgtcctctatctctattcgtctcctctagggttctaattgttggatatattttaccaggatctagatttactgacaagtatgtttcattaacatcc

SEQ ID NO: 335242 - DNA, 496 bp, Cannabis indica
cacatcacattaaattaataattttgtaggtaaaaaataacttttttattataaaaaaatgacatgtggtcattctctaaattgagcaacacttaacataaaatttgtgataagaccactttaatgagtaaccctcttggagatgctctaagatactcatggtgatgaaatgtcaccctataattgcttagggttttctataatatatattaaagtgaaataagtgagatctaatattaaattgtactaatagcaatattacatgtgctaaacactatgagtggccttttaacatttctctttactttaataaagattatagaaaatcccttactaattataaaatattacctcataataatgttagagattttaggtggcgtttggttggaggtaatgaaatggaatggaatagaaaggaaataattttcattccattcttttgtttggttgcattttaaagtattggaattgcattccaatggaatgctctttc

SEQ ID NO: 335243 - DNA, 1315 bp, Cannabis indica
aaaagcaaacatataggctcacacagatcaaattgatttggatgggccctatcatatttctagctttacacagataaaagaaatattaaatttacctgttacaaattatttataagatctattgacaattgtattatgattaaaaatcagatcattggatctgtcaacaaattaatcatagcaatttagatcaaataaataatagctttgttaaaaaaaaattgaataaacaatttaaatataacaaacaatgttcgtgtaataaattgtgaagtaagatatttatataattaaattattattttaactaaccaactactttgaaaatttaaggttattaaaactatatcttttcaaaaatttaaaattcaacaatgaaagtaatttaaaatatctaggtttttttgaattattttattaaattaaattaaatatctaataagataaatgatttgaaaataaccaagtagatattttcaatatcgttttctaatcttatattttaataaaattaaaataacagcataaaccaatttaaaatatatatggttaggaaaatgttatacccgaaatttggcttccatctaagtggaggacacgtgttaagataaggggaatatggatcgattcaatcactttttatggaataactcattaagtacgtaagtattaaagcatatttgtaacctgctgattgtaaggtcttatgcaaggaatcaatatacaaactagtgtttagtatattagcgagaaactgtatgtcgctgaatacgaatagcgaggcatcaaggacattacacttaggaagacgaaaagtgacacatattaactacgaaagcccttagtgtataatgtacaaactaagtgtaacagtcgggtcggctcgagaccaagtaagcatggtgcatgggaaggctttttgtaacttcatccagttaacatcagtgaggcttaaaactgtgacgagtcagaagctaacattcaaacgagcttcgaagaactctttgtaaataagaaccgcgattgtcacaagacatgcatcgtcgacctcagaaggaaaaattgtcccagctcgctattgaaatcactggaaccaatcttctgtcgagacatccccaaatacaaaaattaaggacgagtttaatacacgatcattttgagccagtaaaagcgagaaaatcacagctacatgattttcaaatcataaccgcgtttacacttatatgtaatcaaacccctgttgggttttatgccctaaataaaactcatttcaatataatcaaatttacttagatcagaaataacatttaatgtt

SEQ ID NO: 335244 - DNA, 567 bp, Cannabis indica
agggggagtcatgaaggggacgctgaggtccaacagatccaggagcaagacgatgtacgtcctggcagttcctccgaggcggaggaagaggcagaggttgaacccccaaactacggggagtacaacgaggctggggagccagtcgatgctgatggagacatcctggttgaaggcgtggattacgtcaagtgaggaacttgctactgcggttcctcatagaaggcaaggtgccttgggcaccaggtgggtaacccctccgtccaggattactgaggcgcgccttcagactctcgaccaggaccgatacctgggggaactagattgctacattcccgctcacaataatcgtgccacaaatcctgaaaagggaatgtgcgcctggtcgggtgcccatggtcagaaaggggcattgatgccttggcatcaatacttcaagaatgtggcggacttcttcggcctctacccggccaagttcactcctaagggcatcaaatatctatctgccctcttcgtcctctacgcttcccaaaaagggggtatgccttctcctcacgaagttgcctggtt

SEQ ID NO: 335245 - DNA, 1033 bp, Cannabis indica
acatcatttataaacaatgtgggacatttagttccatgtgtttttgtagttgttttctaaataaaatagaaaaaattcacaaaattttaaaaatagaataaaaaaaatctaagatgctacataaacttattttgtgctttcctttatattatatatagatatacataaaattatttaactttttaattttttaccttttcttctttataaaagaactgtatgttttattttcttttaatttttttatttaatttatatttttatattttaataattactaataaaatgaataggccaagtagtcaagtgagagactcaaccttaatttatataatgctaatcttttatgtacaaataaataaaaatatactatagtgaactaaataaattgattatgacaaatacattatcccatcataattttatgagatatgataaatatgtctcaaaaataataaaaatataaacacatatatatacacatcaaaacacacaattcattttattatggttaaagattaattagaacaaatatcatgataaaaaatacatactataaagtatatagagatcatcaagaaaatacagaacataaacataatacgatgtccaaaaatattctaagaaaatgaaagcttaactggaaaataattatatagagattggcaaaatgataattttcactcttatacatggcagattgaaggttgtgaagaaaagtataacaaaatgaaattaaatctaaatacatatgtattatgatgatatttttagtgaagatctttcaaagcaaaagaaacattacccaatagttttgttgcaaaatattttcattggagaagaacttatcaattgccattgtcatctgtaaatttcatatcaagaattagaagaaatataataaaactttaaaaataaataattattgccaaataatataaacatagaacatcaagaattagagaacaaaaaaaagagcataacataaacttgaaatttatgagtggacacaaaattaaattgaatctaaata

SEQ ID NO: 335246 - DNA, 605 bp, Cannabis indica
aatgttttgatgcttaaaaaggaaaatgtttgtaacgtgtatgatgatttctgcactacagtgtcttttcgaaatagagagcgtatcacctttgatcatttagtttctatgaagaaacccaatgaaacaactctaattagagttctgagaagtggtgaagaacaagaatttagtatcatccttcgacctgtaagtttttatattggatatgtaaccaaccttgtttttggctaaacaacgaagttattggatttgggttgggtaatgaatgcaattatgtatcactttgtgagatattatttgaaaataatgtatttaaaaattaattaagaatattctgttatataatagaatattaaataaataaaaaatttcaaaaagtgtagtttgttagagagatatgtaagttaatcgtaaatattatttaattttttggtttaattattgggtttattttttgaaatttgaatttagccgtgtaaaaaaatttcaaaaaagattgttagagagatatgtgggtaagatatttttttaatttaaaaaaagatggtttaatttttgggtttaattattgggtttatttatttgttaacgtttaacgttaa

SEQ ID NO: 335247 - DNA, 745 bp, Cannabis indica
cttaatttaactatttaaaataaaaaaaatataaaaaatatactcttttttacactatatatttatataaaaaatatttaagtcaacctaaatatttttatctttcttttggtcaaaaatttaatttttttaatttcttttttagcagattaaacaatgtcaacccatataatgtaaaaaagaaagatttttctaattcgaaaacttaagcataaaaactcaaatttttcaaaatacattcatgggtaatacacattaaaagtgcacccgaatatatatatatatatatatatttatattacaaggtacgtttatagtacacctccctaaagaattatttcaatagattttctacctgtttcggtattcaatagagctttttaatcatttttttttcatgatcatgtacgttgcagctatataggataccagtaatttatgaacatcattgttcaaaatgagcatctctaatgggggttgcttatagagtaatctttgccacatgtgcatttggtcaatatttgaaaccaactttatgaacatcattgtccaaaatgagtgttaattccatttttggtatatttaattgacaaaaatattttattattaattgtattttggctggtatactttaatatggttaccctatttgtgtatatctaaacttggaaggaaagttgtctagctttcctatttatggaaattgaggtaaatatggtaagttttgattacacattgattcttt

SEQ ID NO: 335248 - DNA, 1407 bp, Cannabis indica
ctcagatcttgattatactctggacataatttgtcactacagaaaataatggttcttacacatacaatgatctttgtaatttaattgagcacgtttcttgatagcttgaattatatgcatcaggcatcttaaatccttcagggatcttcatgtaaatatcactatgtagttgttatacccgaaattcgactggaggacacgtgtcaagataaagggaatgtgaatcagtgtcgtatctttttatgaaataactcattaattgtgtaagtactatagtatatttgcaacccactaactgtaaagtctttagcgaggaatcaatgtacgaactggtacttagagtattaacgagaaaccatatgtcgctaaaggataatagcgaggcaccagagaagagtaacacataccttagcctacaataagtaaactaagtatataagtcaaaccgactcagagtacaagaatgcgagacgaccatctcgctacgaggaaacttcctatagctttatccaactaacagaagcgagactcacaaccctggcaagtcagcagatttccttatatccgcaatcgacgtaaaacatatcttgtcgatctcggatagaagaatggttccagctcgccattgggatcactacaatcaaatttatgtcgagacatctccagaatcaacaattaaagacttttttaatacacgatatttttgacccagtaaaagcggaaaaatcacagctgtatgactttcaaaatcatacatcgtgtttacattttgtaacgtgtaatcagatcccacgatttaagggataatgactgtaattacattttggtcagccttgtaattaacagccactatgcaattataaatagtggcaaacaatctcaaaaaaagggacgaaaaaacttttatacaagaggccctaaaaagaatactcaaaaatctgaataagattgactcgtagactatgcagaattttaactgtaaaaccacgtaaagacccggtgttcatattttatttttctatagtttttattaattctgtgtgaatcataattgtgaggctcaaatttggtgaacgaaaatttgcgttaacagtttggtgctctcattgagagtctctgtgataaaactcaaaaaaaagccttcccttctattaaagaaaaaccttctcctttatggttgaaaatccatagaatattaacatcccatatgaggaaactaaccgtcgttctagaaaagagcctataagctctagaagatcaactaatccgccgtccagaaggaccacccgttctaggagggcccaacctgaggatggtcctagtgctcggaccacatgtccctaaagaactcaacccgatgttggtcctagtatgcggacacacgctcgaggagaactcagtgtggga

SEQ ID NO: 335249 - DNA, 519 bp, Cannabis indica
aaatttaatttttgatttgattatttaaattggatggaaatatatattagttgaaaactaactgtttgaaaattgaaacatagtctaaaaaattaatgaaaaaagaatatgagatttggaaagaaataacatttttttaaagaaataatatagtaatggaattgaaagttgtgggaattgggatgggtgagcaaggacaattttgattatccaataatttttatattggttttaaatagaaaaacctcaaaagcattaaagaatatgggccctttatttttttggcattgtgcaataagtcaggttgcattattatggggtttattagaaaatatctcttttatttatcaattaactaaatttacctctaattttacatttaattaaaacatacctctttttatatgtactgtacctaaaataacctgacataagggagtcacatgaaaagtatattgaggtgacaggaataaaattgataaagtattttttttaaaaaaaaggtaaaaatgatagact

SEQ ID NO: 335250 - DNA, 1104 bp, Cannabis indica
aaatatataatatttttgaaaattattaaaaaaatatatgtataattttaaatagaattattttttaaatactaaacacagacctaactcgctttaacctaagaccaatcatccaccccatagcaatactcttatgtatatttacgagcaaacaatcacactattgattattttattttgaaggtaaaatatcaataatatatcaatccatgcattatttgaaggaaaaaaaagtgcatatatatcaagaatacatcaatgatatactttttacaatttatatggctttatatatgtgactataatataatatgctataatatgttattaataggtaaaaatttaatttttaaacttaaaataattatatatttaaaataaattaattttttttattaaaatattttttgcaactaatatttataaatatttttttattttatttataaaaaaaataagtaaaatcatgttagtatcaaattacatgtaatttattaattatttttatttaatttttaaaataataataatgattcaacaattaaaataaatgtaaccatcgtgattatatatttaatataactattgaaacctagtcataaaaaatgtaaaagattatttaatggatccaataatccattatcttagttgcaaataagtattggttaaaaaataagtattattagatcttatatatttaagggtaaatactatttcagactttgtattttctaaaaaatagtaccctgagttaatttgttgtcaaaataaaaattaataataatctgatttagagatattacgataagactgattgtattttctacatatgttcatactagaaattatctttaaattggttatattaaaaaaaaatatctaaaaatgagtttatagtactttttgtaccattttaaaaagaggagtattaccgttcgcatcctgttataacctcttagtcaacgtttactttaaattttttcatgagggtgttcgttatgcttacaacaccatccttgtacattttgtaaaattttcgaatagtttccagtgttgaaaatacgtttgaagttttttaaacacgcgtggtaaactggaatatca

SEQ ID NO: 335251 - DNA, 533 bp, Cannabis indica
ggacgagcaggtgaccccactgaagagtaagaagaaactcccggccacgcccaggcctgttgaacatgctattcgcataagggagcccatttcacccatttgaccatcttccccctttgcgggaaaagggaaagctgtcatgtctgagataagatcgatgtcaggtgatgatggacttctgaatctttgtgtggacggtcagcttgcattttactttctcttgttcttgagcttcttgattttaatgtcttgtgtttctgatggctgttttctgaccatactgtttttgttctgtgcagacatgtctcggcagatgatcgatgctttgaggaagagaatgggcggaagctctagcgcctctcctccagccaagaagtccaagggcgatgaggggtcctcttcaaaggaaaagagaccttatggagaggtcattgatcttttcgaggagctgactactgcaaacccctctaccctcaagtctgccaagtccaaggagtctggaccaccaacagttgggtctgaactggtcaaga

SEQ ID NO: 335252 - DNA, 999 bp, Cannabis indica
aaaatagatcccgaactaagacacagaatccgagtgtgggtcagtgtttcagtccgggtccgagaccctatatagttttgggtttgggtccaagtccttgtcttggtcctgttcttgggtcccgatctgcttctggtttcagttctagtttcaactcatggggtacgggtcgagtccaagcatctagtcccggatcccaagtcttgaggtgggtcttaggttcaggtttgggtctaggtcgggtcccaaatctcgatccaagttctggtcccaatttgggggctcaattcctgggtctgggtcccccatctatgttcgggtcctaggtcccgatctaggtctttgtttatgttccagttcaagttcaggtctcaggtcccgattcgagtccaggtctcggtttgggttcaggttcgagttcaggtcccagtactagtctgagttgtgtcccaggtctgagtttggttcttcggtcctgggtctaatctcgatttttgggtctaggtttgggtccgggtcccggtcttggtctaggtcgcagtctttgtttatgtcccacgtcataggtcccggtccaggtccaggtccaagtcctagtattggttttggtttgagtttgggtcctgttacagtcccaggtctgcgttcctgtcccagtgctagttagattctgtgtccggaatcaggtctggatcctggttttggtccgggtctgcgtacggacttgggtacgggtcctggattcgaacactgactacaggtatggtcgaagcttcaagtttagattaggatctcggtcttggatccctatcttgttccagtttgggtccatggtcccgggccgagttctaagtttgggtttgggttcgggtttggggctggctcccagtagttaggtcctaggttctgggtccaagggcaggttctgtgtcatgagtctggtgtaaagtttcgggtctcggtcccggttttggggcctagtttcgggtccaagtcccc

SEQ ID NO: 335253 - DNA, 1129 bp, Cannabis indica
cgcagattttcgttaaccaataaaaagcctttacgtacttaatataacatagaaatattaagaaataaataaagtataattaacaccaaatatttttacgtagttttgcagttaaatcagcatactctacgagtctatcttattaaagatattttttgaagataagatacaatatacaattgattatgtctattttttccctagaattctccattcctttttttgtggtatctgcccctgtttatacggatataggttggcagttatttacatttaaattcaaattataactgtttaatgaagcatgggaattgatcacgtttcatttaaattgtatgttggataatattaaataaccgcttaactgcatgttattcttatctttaaagatggtcaatgctgatttggacaatagcatctcgcttaactcgtcgatgattaatgttgatttagacaatcatatcttgcatatttccatgttgttatctttagctattataatgtagaaaatacgctaagtgttaacaaatgaatcgcctcgtcaagtttcttatgaatagcgagggggatgtctcgctatatgtaacccgaggtcaccttgggtaacttcatttattccattgaataaatgaattatttctttgggcctgtgtgctccgagcctggtatatgtttaatcgatataggttttaatagttttctatccttgtctcgcttaagtctacatagtcatcgagttgtaaatattttctattaatcctttatataacgaattattctttttcttcgcattaaatgatataacttaattataccaggtggtttgtatttcactatctaacgcgtgtcatcctctgaagtgtagctgaatttcgagtataacagacatattaatcaatactttaaatattattattttgtaaatacaggtcggtttgacctatttatacaccgagggctcgtttggtttgccgtattgtattgtattgtaatgtattgggttgtattgtattagattggattgtataattttaatacaatactatgtttggcattgaattaaattagtgtgttgtgttaaattatacaatgtttggctcacattgcattgtattgtattaattaaaaa

SEQ ID NO: 335254 - DNA, 490 bp, Cannabis indica
tcaatacaacactgattaacactaattcctaaggtcaagaagccaactcacattacgcaatatcggccaatcagtctctgcaatgtcctatacaagcttgtctcaaaagccgttgtaatgcgtctcaagcctttccttccacaagtgatttctgaatatcagagtgctttcatttctcagaggctcatcacagacaatatacttgtggcctttgagttattgcactctctaaagggaagaaaacgaggttctaaagggtatgctgcgatcaaacttgatatgagtaaagcatttgatcgagtggagtgggattttgttgctcaagtcatgcttaagatggggtttggaacaactatgttgatctcattcttcgatgcttgactacagtatcatatctttttagcttgaatggttcgattcaaggtctagtactccatatagaggaattcaggcaaggtgatccactgtcaccctattgttcctcatctgt

SEQ ID NO: 335255 - DNA, 1159 bp, Cannabis indica
actaggcgtctttcggttttcaactaataaatgctctaacacaattaatatttttgaaatccgactttctctcaccacgtttgacagttacacttgattgcttttgatttcccatatttgctcttgggggaatcgaggcgtctgaagtcaacaaaatgatgttccgggcatcactctacagctgagtgagcttttgagctctatcactgagagaaagcgtgaggggtggatggttatatacaggaatctgctggaaccgagtataggtggtgcccatgccttctaccatatagtattcgtcagcaaaatgcccaattttgctagcacccttgtccgcggtgctcgtcaagcacttgaagtctggctgagaaaaatagaaatatcttgacctgccttgtttgggagtagacttcaagtcgaagaaccagcttacctactaacttcaactttatggagtactggctttacccaaaggatttcattccacggcctgtgaaggggaagaagaggaaatacagtgctggacgggctgagggaggtcatcaggaggatgagcttattcaatttaagcgtgaaactaagttgaagggaggtgcaagggccaaacagtatgctcatgagcctttggatcctgaagatgaggctgaggaagagcaggtgacttcgctcaaaagtagaaagaaacctttggccaagcccagcctgttgaacatgaaattcaaatcagggagcccagtttacctgctcgaccatcctttcatgtgctaggaaaagggaaggtcgtcctggcggagataagggacttgtcaggtgatgatgaaccttcgaatcttgcttgggcgaatactttccatgaagcagaagatactccaccttgtttttatgcttcttgattattatgcttttatacttctgatgccttttctattctaaccacattgcttttattccgtgcagacatgtctcagaagatgctcgacgctctaagaagagagtttgggaagctcaagctcatctcctctggacaagaaatctagggtcggtgaggcgaccccatccagggaaaagcaccaatcaaagaggttattgatctttatgaggagctaactgtcgtggacccttctgctccgaaagctgctaagtccaaagattctcgagg

SEQ ID NO: 335256 - DNA, 574 bp, Cannabis indica
ttttaatatttttaataattattgagtaccttgtaattaattaaaaaatatatatgttatgagaatataaagacttagtaatttgtggatcaaatttaaacctaaaatacgtatcattttacatcaattttcaaatttcaaagtagccaataattattataaagaatatataacataattaaaattgtatttcattaaaacatgacctttgagtacaaaattaaaatatattcccatgaataataggtggtccactaattaaaatagccaatattagctagggttgcccaaagttgatcatgtggtcctaattttatatgaactgcatgaattcatgatcaactaataatattacactacaaaaaaaattactttgtaaccaaaatatatagtatttagatacagattgccactaatttagttttagtcacaacaaacaatattattactaaaaacatatttagtcgcaacaaattatgatttttgtgactaatacttatggtcacgaaccttttaatcacgacataaaaatgatgatttataattagtcatattttttttttatttttagtca

SEQ ID NO: 335257 - DNA, 648 bp, Cannabis indica
ttttagctccttcatctccacggccaagttagccctggactgcaagtccgcctggtgcaactcctctaaggacctcaccttggcggccatctcgtctatggcctccttagcctcccgaagctcgcgcttggccttggcactggcctcgccctccgccctccgcccttaccgcctcccggtgcctcacctccagcctgtccctccgcaggacctcctctcggagcatcgcctccgcttgggcttccctctgtttggcctcctcctcgagcttcgccttagcgagggcctcctttcgctcagactcctcttggatcgcccgcctctcagcagacaggtcccgcagaatcctcacgacctcgtatatgcccccgaatttggataggacgaagccatcattgaagatggtcctggagaggcggctggtctccgcagaaatctgaaaaaggagaaaagagtgagaccaaatgccttagacaaaatattgaggaaagaaatgaatcaagtgcttaccgcggccatggcgttgctgatgtcttgaacttggtagacggagttcaaggatgcacaagcagcgtaccgtttgggcgggaatatgagtcatgtgggagacatactcgctggtcatctccgcggcaaaaggagccaagg

SEQ ID NO: 335258 - DNA, 827 bp, Cannabis indica
gtaaagggttttatttagggcacaaaacccaacaagtttcacaacaacgactttggtgattactgcacaaatcaagaatatcactgtggcaagatgcatggtggacaatggagcctcttccaacatttttttcaaatcaacatacgaaaatatgggtctccaacttactgatttagcaccctgctatcaagtgatgtacggcttctttggtcagggcagtgcacccgtagggtacatcagattatccctcattgttggagaaaatccaaccgccagaactctgatggcatagtttgtcgcaatcgacgttccctgagctttcaacataaatataattttcctatttaattaaatgtcttaagaaaaatatcaaatatttaagtgtcttgaaaaaattaactaaaatattaattttctatttaattaaatatatatagaaaaataccaaaagtctacttaaaaaataactatctagaaatttcataatataattattaattttctaattatgatatattttagtttatttattttaacaaatttatttttctacttaattaaatattagaaaatatataaattttttattagaaattactatctagaatttatttcattaaactaagtgtgcttttctaaagtaattttaaaataatctaatgaaaaaattcatttttatttattctaaaattaattacgttgctaattaattttaattaggttaaactaatataataattagcttaaaaccattatttaaataaggtaaatgggcattcacagttggggtagttcatgtgagggaggactgagttcagtatgtcgta

SEQ ID NO: 335259 - DNA, 1501 bp, Cannabis indica
tttttggtacaattaattaatttttagtaaaattttatgcatattttattttgttcgaagaaaacattttacacaaattattaaataatattaggtaaatagcataataacaaaattaataaattgcctcaaaaaataaaattgattaacaaatatttacaatttttactagctagggcatataaatatagtatcacacaatagttaattttttattatttatttatagattatttttttaaataaggtttttcactaaaaaaaccaaaatctaaaacaaatatttttctaaactcgaactccaacgaaactagtaataaatttttctaatacaggctatagtctacaccattcgctaaatgcaaagtggcataacaaataccaccaccaacatgagctataaaatttaaaaatgataaaatctcatcaacaacaaaacttaaagacaatattactttggtaaaaattaacccaattacacaaagagtcaatttcaacaacattagaaagcttaaaacccaaataaatagcccaaagtaaccccacatggactagtacttattgtcttcaacatataaataagttaaatttattttgttttttagataattacataatgcattattataaatcttttacaattttgggttcaaagaattttttaattatatttttatgggggttctataaaaaaaattagaaaataacataaaactaaaaaaaataacattcaaacaattatttttataatttttttttattgtttttgtgtatttgtgaaataatcgttttctttttattggaaactaacttaaataaatttgggaaaaaaaattctttcgaaaccaaataaaataaatattaggctaatttggattttgactttcctcaattttgacatgtaccaaattatgtcccttgaccttttttttcattaaaattctccctgaactttgacatgtacaaaattaagtcccttgaactttcatttatgttagactttccttactaaaattgaaaaaaaaaaaagtcgttaaattaaaccatttcaatagttcagaaaaaaattttaaggaccttaaaattttaagatatataattttagtacatgttaaaatttaaagggtaaaaataattagtttatttttttttaggtataaatacttattattatactagcaaaaactacgtgcgaggcacgtatactaaattttatgctagtttttttctatgttatttgaaagtgatacaataaaaaattaaaaaaaatattattagttattaggtgagattatttgaataaagaacaataaataatcacgttaaaataaaaataattatttgaataaagaattcaatatacacatttatatatatgaatctcattaatcaaaaagaattattaaatatatgaacaataatttgtcacgctatatgtttcccaataagaaatccacctcctcatgtcaaaaaataacaatacatgtaatacagatcttgt

SEQ ID NO: 335260 - DNA, 521 bp, Cannabis indica
acggctttggttggacatcggttgagcaagtagactgcagtgcttactgcctctgcccaaaatcgttttgggagacctttctctagcaacatggctcttgctgcctccataacagtcctgtttttcctttcagatacgccattttgttctggtgcgtatccaacagtgagttggtgctccatcccttcatcttcacagaactttttgaagtcattagaagtgtattctttgcctctatcacttctaattgtcttgatgtagtgactgctttgtttttcgacacgggatttgaattttttgaaaatatcgaagacgtgcgattgttgttgcataaaataaacccatgtcattctagtaaagtcatcaatgaagagaatgaagtacgtgttttggtcatttgatggagtacgtattgccccacaaacatctgtatggaccaactccagtggctttttggctctccaagttttgccagatgggaaagtttgtcgatgttgtttcccgagcatgcatccttcgca

SEQ ID NO: 335261 - DNA, 1178 bp, Cannabis indica
tttataaaaattaatatttcatataattatcctattaataaatgctatgtaaaacaattgaatagtagcttttagtacttaccttcctattctgatagctcacttctaatgccctctatttattatagacctaattaatcgagttttgagtcatatatatatatatatatatatatatatattttcttgcagcatatctaagaaataatgatgctttaacgtacacattaattttaatgtgtattatgtatccaaattgggatgaacacacaaaaatgcattgcattgaagaagtagaatatcaataaatgaatgttttctaaattagctaattttaaattttatacaaaaagaaaaggtatatctcaaacgctaaatcaaaatttttacataattttttttccaaattattgagattgttaaattcatacatctgtctaattccgttatactttactaaagtgctgattgttcatgtactaattaaattgtgtttctcaaacattaatatctacggccaattcatctccgaattttgaaatctattgaattgtgtctctgaactttatttaacatgtatcaattcaactccgaactttgaatctaccaatttcaatagttcagaaaaaaattttaatgacataaaaagttcaaaagaaataatttaatatatgtcaaaatttgaaaagtaaaaatatatctcaaaattaaataaattaatttgaacataatttgaataaaaatcaccacaaatgatcagagtgtgagagattcatgttgatcatgttattatgttgggcgcatgcaatgttttgaaaaatcaattaattaatcaaaaatatgcatgcacaattttttttcatggtatatatatcttcacaagctctatcttatttaagagaagtacatatatcacaagaaaaagagcaacaatttgtatatatatacacacatatatatatataaatatatattccctaaaacatcatgagagatgtgttatacttttactcatctttgttttatgtatttgaagaaattatagtttatgatgatttatattgtattttagttattgtataggtatttcaatttttgaaaaatttataaataatatatgaaagtaaagttctaaatatataatatattcatactacagttaaaaaaaaaaaactaac

SEQ ID NO: 335262 - DNA, 886 bp, Cannabis indica
agttcgtatccacagggactttttactaaataatgcaaaatcaactaagagcaattccaagaatttcaaataaaaataaaataaagtaacaaattaattcaagagaaaatttataaccttaattctaaacttgagaaacaattttttaaactaaataaactaaaattaagaagctaaaaagtgattaaagtggtgataattttaaatttggaaaatagacttgggtgattaatttccacttgtatgtcccagttgatacagcaatgacccaacaatgagtcagcaatcttggcagagttaacagatttcagaaaatcagcaagctttttctaaaacttgcaataaaccattcataatctcaacaatttattcctacatcaaattagattacaaatagtccaataaagcatcaaatccttagttatgcatggtagcaaaatattcctagctatttcactactaattaatacctaaaagaaaaggtaaaaatcatgcatcaattagagtggttcaactaggtcttacttttccaagtaagatctagcttgctaaatgctaaagctagccaaaaattaacattcaatcaacatttcatcacaactaattgaacaaagacaagattacttagtcattgcaaaatcaaaacactagtccatacaagggttcataaccacccaaatctctaagattttagttcataactgaaatattcatggaatttaagagaaaactagagagtagaaaatgatacaaaatgaagaggagagcaagagaaatgagttggaagctcaaatcttctcttcgtaggttgccttcttctccttcttcttagtcttcttcttctcttctttctctttttttctgtacttagattttttcctctgta

SEQ ID NO: 335263 - DNA, 506 bp, Cannabis indica
agagtcgcctcgaagagtggatgggtgctgaaccatcacttcacagctgggtaaggcggtctggaatcgacgctggagagtaatgatgatctttggtttagagaggtagagaagcaggatgacggttggtttagaaatataaaaacgattcgaaaatcgaagagggaaaatgttgggcagggatattaaatgctgattagaaggagccgccagaattaaatgcaaatgagagagagagatggcattgaacagtgaggacgctcgagaaattaggggaaaatgcataatgattagggtgacgtattaaggaaaacaaatccaagaaattaatgagggtgatcagaaccaaatcaaaatcggagaaagagaggagcgagggaaaccaggagaaacaacagggaggaagtagaaagaataataaatgcaaatcagagagaaaaccaagaaaggatgacaagaaaaactgagaaaacacaaaccttgaaatgaaggaatcggacaccaca

SEQ ID NO: 335264 - DNA, 468 bp, Cannabis indica
tttcgaaaattaaatttgaaaaatttaattaaagtttgaaataattttcaattaattttagatcaagtttaatttataattttcattattaaaatataattaaaataaatgatttaataaaaatacactttttttaataatgagttttaatcaagagacgttcgatctccattggttgttctacatagttcttgttttagtgagtaatcctccctaatggaggaacgttcattagcaatttaacgctgtagaatctcaaaagataagtattatttgtaagtgttttatttttagtatggatcaccctaatggtggcgactattagtaagacttataaaagtctgaaacaatggtggaggctcatgaaataggaatgaccttgactcacgccctaacgggacaatgttggattctctttttgatcgaataaaaggttgctagaatgtttatcattttagatgagttgac

SEQ ID NO: 335265 - DNA, 1624 bp, Cannabis indica
tacccggaccaaaacccgaacccagatgcaaacttgcaccaggacctacgacccagaatttggaacataggacccgtgactcatgatctggacctagaaccacacttataccaaaactttgactcgaaccaaagtaggactggactggattaccgggacccaaacccggactacaaccgagagctgaacctagactaagaacagaacccatattagaaccgggaccgggagtgggaccttggacccgatactcggacctaggacctgagaatggaaccgtgaccaaggccgagacaaggccaacacccgagacaaggaccagtaccaaacatggaccgggacccacactaggactgggacccttatccagacaaggacctaagaccttaacctgaattggggacccggacccatgacccaggacccaagacctaaacctagacctaaaccttgatttgagacccgaactgtgacccaagacatgagctagatcttgaccaggatctggatttggacctgggacccaggacccaagaccagaggcttggacccgaccccatagtcggtgtttaaatttgggaattggaccttgacccaaacccagacccagaccaaaactcgtacccgtactggaactcgaactagactcgacatgtggtggtgtttggatttgggaacaagactcagacctgaacccgaatacggacctagacccagacaaggactcaaacccagacccacacctgaaccttaaatcgtaccctgtgacccgaaattggaattggaactggaagcgaacccttaaaccctaaaccctaaaccttaaaccttaactcctaaactctttacacttacccctaaaccctaagccctaaatccataaatactaaaccccaatccctaaaccctaacctagacacgggcctagactcatacccataccgagatcagaacctagaagccagacccagacccgaattgagacccgaacctagacccaaactcaggacctgaacccggacccaaacccaaaccagaacctggtcttggacctagaccttaactaggacccggatcgggaccccgactcgaacccgaataaggacctggactccgaccaacacccggacccagactcaaacccgaactcgtactaggactagactcgcaccaaaactcgagatccaaacccgaatctgaatttggacctagaccgagaccaagggtccgaacctagatgggggacctgggccccagacctgaacctggacccagacttgtactaaggatccagagccagatgagggacttggacccaaaactgagccccgaaactggggccgagacctaaaactcaaccacagtctcgagacacgagacccgaccctatacctagaacccaggacctgactactgggacacaatcccaaactcggacctaaatacaaacttaggacgcagcccaagacccgagacccgaactggacccagacccagaccgagacctggacccagaccgggacccgaactgaaacccaaaccctgaccaaaaaactaggcccggccccacgacataagaaccagactcagacctgggacccgaaactcaggcccacactgggac

SEQ ID NO: 335266 - DNA, 686 bp, Cannabis indica
tgactgtcacatcacccctctttgggggtccatgtccttgtcgaccacatttctggatgggtcaagactctaatatcatttgtaacatcctcgcttcaagcctccattgagcccttacacccacaagatgatgatttttatacacaagtacatcactctagctgcttcttggaatgatgactgaccttacaaaccaatacgagtgttttcagcgtgctttgtcctcactcacacacttcctagggaaacttcctaggaggtcacccaccctgaagttatcctaggtcaagcatgcttaaccgtggaatttttcgtgatgggctacaaaaacagatgcaccttgttgatataggtagtatcaagcaatccatttaagccatcttcaactatgtagtcccataactacacaatctcagaatcatcacacgtgaccttccccaggtgatgtgggattgtatagctcctggtctttccatttttttgcacataacataacatctattctataggctcgtacctatatttccttgagttctaaggagacaagaaaccaaacctagtggatgaatcatggccatctgatcagagcgtgattaacggctagatcatcttcagattattatggttgtagaggatcgttctcagctagtcctctagctggggtggtcggtcggttgtctgacagg

SEQ ID NO: 335267 - DNA, 689 bp, Cannabis indica
tggattcacttagaatttctagaaaacacggcaatttgaagaagaaaacaaagaaccctagctggttctatagggttcgaatgagagagaggatggagagacaaaatgtgtttttccttcttctttgatactttgtgaaatgaaataataaaaggttcttttatttaataaacattagcttaaattaacttaaaaaaattagattatttaacatagcataaacccacaaaagacaaaacatcatttggtaaaatgcacattttgtccctcctacactaaaagggcataaaaagcactaaggggtattttggaaaattctaaaatcccgaccatccccgacattcccaatgtctaacttattgtcctgctatactaaaaatattaggatgtgattctaatagccaaacaccgcattccaatgttgctgggcataaacatgccaaattatgaaatttctatgtcatataaaatgcattccaaattcaaataaatcatcataaataaataattcaaaattaataaataattttcataactaagccctaattatctgctaatttctaaattaaagctaagcggtctttacaaagttagacataacatatttgattataattgaatccttgaagtggttctatataggtacttataaatgataaacatatttaaaaatatgtaatttaaagaga

SEQ ID NO: 335268 - DNA, 823 bp, Cannabis indica
aataattaagttaaaaataaaataaaccttactacatatattaataaatagtatttttaaagtaaaaaacaaaatagaaatttaagttaagaaagaatagattatgtaaagttaaaataaataaaataattataatataaaaataatataaatgtatatatatatatattaatgatttgctttaaaaaatattaaaaatcgctaaacataagttaataaaatgaaaatgtggctttatttaataaaaacttaaaaatatggacatatttttccatacaactaacttaaattgtaaaaaagccataaattaagtaaatctctaatttttccatatttatgaaatttaaggaaaaaatgccatatcctacgtaatttcctcttgtttgttttgctctattataacatatgggcgaattagaggccagccatgtttgatggtaggggtgtttttcaaaccacccataatgcacaaattgtttgtaccgcactacactacataaaatataaggtttgaaatcttttgcgattgtggtttgcagttttgtcaaatcatacgttgcggtgcgatttgcggctcgtaccgcatcacactacataaaaagtgtagtttgaaatcttttgcggtacgattgtagtttgtatttttgtcaaaccatgtagtgcagtgcgatttgtaattttaaatttaataattgtggcattatatattacaaagttactaatttttacaatatagtttttattctttttttcgtataagaacaaatacatataatacatgtgtatattactttattttttagagacaattcaatataataac

SEQ ID NO: 335269 - DNA, 847 bp, Cannabis indica
aaagcaaaaaggaaagtgctattgcaacgaaaaaggccactggaaaccctagtgtcctaagtttttggcaaaaaaacaaggtatttctatctatgctataaactcatgtgttttagagaattattatcctctttggttaataattctagatctaataaccatgtttattttcttcttatttcagctccagatgcttaaacatggattgttatcctagcaaacaattagtataagaacaaattagcaaattattaaaacttattcttgatcttgtttttgttccaattaacgtgttactgtagtaatagaaattgataccaataaagttcttggacatagtatcacagtaccttatttgagtgggataattttaaaattccaagcccatctttatttggatgacactagtgatagattactatgttatgatcatgatatgaacttttaaataaaactgagaaagtatatctaaccattcatgtggatagaaataacatcagaattatgaggataaaatagaaacttttgttaagtctattcgaatgacttaggcaaaatacctaatcctcataaaaagttttatggtatctctaatgattacttaatcttaagcaagtattttacattactgttaatactagaatgctatgttgatgacttagtctagaagaaacttgtagtttcagactaagataatgtgtcatgacaagatgttcctgagaaccaatagtaagaggttaaatgtactcctttgtacaaacttaaccagactcctactgttgagtgggagccatctaagatgtaatcaaacaaggaacaataggagacaaccaaggaagaatctctg

SEQ ID NO: 335270 - DNA, 771 bp, Cannabis indica
cttgatgctaagaaagggttaagggcctcctcggtgtggagggctttacgttgggggtagagagatcattctgaaggggtctagatggagagttgggtcgggggaaaatattaatattgtcaaggataggtggctacctaggcccttaagattcaaaccacttattaatctggatatatatcaaggtggttgacttgcgactcgagaatggagaatgggatgtggagtttattagtagagtcttttgtgaggatgatgcagactaaatcttgggcattcaaagtggatctctggagatggaagacgaagtgatatggcatttttcaaagaatggggagtacaatgttcgtagtggctatactactgctatgaaggaaagaatttttgacgagaaatctgactcaaaatgcaccaattgatggtggaaacacctatggaattcgagagtaccaccaaaagtcaaatagtttttgtggaaagtgagtcacaagtggctcccagctgacaacgttttgttttgcagaggtatggaagttgacaaaaattgttggtgttgtgggggaatgcaaaaggaagaaacaattaaccatgctctctggaggtgttcggctatcaaagaagtgtgggaaaagtgcggtttgtacaaggctataaagaaatgggagaacctagatttgcaaaatttcctttcggctatgaaggaaaatatctcgagtagagttttttatctctttgtgatggtgtctaggcagtttgtgttgggttttgtgc

SEQ ID NO: 335271 - DNA, 541 bp, Cannabis indica
gaatgttgtttttgattttttttaatttgtacatcaatacaggttgaatgctttctttttccctttttgtgtttggatttttcaggatctgagtgatttttccttgagatctacatcttttttagattagattttcctggttttggcaggaaattggttgagattgggttgttggggttcgtcggctgggtcacgaaggaggaggctctccaccgtttttttttgccggtatttttgtaaatagaaacttttggtttctatttatgtttattttcccattttaggtcataaatgtaaatttgtttcatttttagtttattatagaaaaaattccataatattatatatatatataattttttgaaaaaaatagttgaaaagtcaatatataaaaagaaaaatttgtatgtagttgtataactgaattaattattttatttgttgggattaatttcatttaatctctgaaagtaaattagtaggtccacttgttaattcatcagatgaatctgaaaaaaactgttgttagttataacagtta

SEQ ID NO: 335272 - DNA, 552 bp, Cannabis indica
gatggttgtggttatggtattttttgggtcaaaacatgcttacgataagttattgatagtttatcgatgatttatgtttgtgtaacacaattttgtcaaattaaaatttatcgatagcttattgatggcatttattgataagttatcgatagtatatcgataggttatcgataatttctgtttgcacacaaaaatagcagtgcacagacaaaaccatcaataaagtaccgataacccatcgataattatattttggccaaaaaaccatacaaattcaaatataaattcaaaagaagaagagagagcgaggaatagcttttggtggtctgtctcggtctcgatttgtggggtaatgacgaatggcgatggtggttgagagaagctgagaaggatgaagagagaaagatttgggtaggtaagatttggaggttgttgggttgagttttgagtagatgaggaggtttggtggtggaggagaggaggttcgatagtagtggttggtggtcttggtgcctgagtctggatgtctcggtggagagagagagagagaga

SEQ ID NO: 335273 - DNA, 507 bp, Cannabis indica
ggaagatttattacgagcttgtgttatggattttgagggctcctggagtaagtatctaccattgatagagttctcttataataacagttatcaaagtaagatagggatggctccctatgaactgttatatggaagaaaatgtagatctcccattcattgggatgagacaggggaaaagaaatacctaggtccggaattagtgcatcgaactaatgaggcaattgagaaaattaaagctagaatgcttgcctctcagagtaggcaaaagagttatgcaaatcgaaacgtcgagagatgttgggttccaaagtaggggatcacgtgtttttacgagtatctctaatgaaggagatcaaacgtgtcgggaaaagaggcaagttatgccctaggtttacatgaccttttgagattctcgagaaggttggacaagtggcatatcggttagctttgcctccaactctttcagcagttcacaacgtattccatgtctctatgttgagaaaataa

SEQ ID NO: 335274 - DNA, 513 bp, Cannabis indica
tctaaaacaaatgattcaaaaagtaaagcattggaatcactgcttaaatgtatttggattgttcttattgctggttcaatctgttgtgaaagataatctgaggaagtggaattactttccctattcttctcaactgagcctgaagtagtaggattgttggaggaattattctcaatatcttcagcttttgttttgacccttatctgcattactggagaaggatctccatgcaactgacaatgtctgttcataagcacgcaattcagcgtccaacttgtctatgtcagacaagttccaattataaatcacaaattggttaaactcaggtgatatgtttttgaaaataaaatgaactctttgctctccaaataaaaaaactcccaagcatagcagcttttggaattttatcttcatcatgagcaaagtgtgaaagtgatactctgaccaggagtcgatcttcacactttgaagttcattcctaaaaggcatactctagatgaggatcgggggtgt

SEQ ID NO: 335275 - DNA, 1168 bp, Cannabis indica
atgaaaaacaattggactaaaaaatttatcccagatgtcgaaacagataggggtgcaccggtgcactccatttaggaggaattcaaactttgtataacataacttgtattttataatcttagatactttactaatacatttcattcttcaggggtgaaataagagtaggattgtatattggaccacatctaatatttttaagactatacagatctgatctataacgctctaatctataaggacgccacgtgtgtgattttataaactatgttatctcaatttttgcactccgatgtagcatcacacgatggtgacacgtggaatcaactttatgtacctgctcgcaggagatatgccgaacatagaagcatatatattcgcttagacgaagcccttttaaccgggcagtgagcaatctgcacaacacgccaacacttagcaattccagctttaacatcgtgagtctccgaagaaatcccaataattttgggatcagatcacagagatatggcaagctgtccgaatcccttgatttgtgtactctgtattttatatgaaatcttattgtaatcagaagggaaattcttcactccaaagcttatagccctataaatagtgattcatactcactgggcaacgggtcaaaaaacttgtctaagaattcatattcagagatactattgtaagagctctaagaaaatggattattttccttgttcttgcgtcaatacaaaccaagaggattaggctattactcaactgctttgggctgaacctctataaaattctcgtgtcttgatttatttcattatattacatatacatcatactacttgtcgcttacaatctagactcactgtcgtttgccaaaagcgaggtcagttttgctttcattgagagttgaacttaatatcgttctcaaatcgaatcgcaaatacaatggttgtacaaactcgtagatgcggggttgatttggcgaatccatagacagtggatcctgcactgcagaacccaaggaacagaagggttcaaccaaccacgattctcggacaaccatcaaatgtaggtcacaatgtgaggactcctgtgagtgaaatcgcgcctggtgtgcaagagacttggaataccagttcagcagctaatcagggcattgttgggttttatgccc

SEQ ID NO: 335276 - DNA, 725 bp, Cannabis indica
taatgtttcacctcagaaaagaacttcttcaattgttgacgcgaaagctcgggaggggttatttttgcagccaagaaattaacatagtcagcgtaccatggtaccatcaggttttccctcacactaaagagttgttcatcaggaaattgctcatttatttgtacctcctttgtattctgactttcttccagttctaatcttgacaagtggtctgctaccagattttcggtgcccttcttatcttttatttctaagtcaaactcttgaagtagaagtacccaccgaatcagtctcggttttgcatccttcttggtcataaggtacttgatcgctgaatgatctgtgtagacaattaccttatttccaatcaggtagggtcggaatttgtcacaagcaaacactattgccagcatttctttttctgtagtggcgtaatttaattgagcatcattcagagttctactagcatagtagattgtgtggaatactctgtcaactctttgtcccaagaccgctccaatggcatagtcacttgcgtcgcacatcaactcaaacgacaactcccaatttggtgaagttactatcggtgctgaaatcaatctctcctttagaaccttgaaagcttttaaacaatcttctccaaactcaaatggaacaccattgacaagtaagctagacaaaggttttgagatcttggagaagtccttgataaatctgcggtagaa

SEQ ID NO: 335277 - DNA, 710 bp, Cannabis indica
tttgatgacaatagcttcagaattacaattagagtgtgagacacaacttgatatatcattgaattagctttacaatgcaaattgaatcacattaataggatcaatattgagtgatttatggttgttttactgaaggaagatcatgacccagtgcccaagttgacatccagcgccgaggtttgacatccctgttgccaagttgacatatgacgtcaacctcgacgctgggtaagtgtaaaaacatccaagggatgtactttaagatgcctaagagatattttgacatcacttagtcaatttttgtgctaggcaaagttggtcaccagttcttagagatgtttttgttctgcagaaatgagagatcgaaactcttcattttcgagtgagttggaaataagaaatgcaaagttatgaatttgacttctctgacttcatagatctttgttattgtgaaaactagatgaactttccaaacgccatcagaattggataagcagaacccagcacaccaggccttttgccaacctgggtgttgggtacttactcccaagctctcgggatcttgtttttgatactcttaagtaggggtgttcacaaagtatccgatccaatccaatccgcacggtccaatctaatccaatccgcaaaatgcggatatccgcacttgtgcggattggattggattgaaaaatctaaaatccgcacttgtg

SEQ ID NO: 335278 - DNA, 1163 bp, Cannabis indica
taaataaatatatttataccgagctcggagagagagaaagagagagagggagacagacgggaggtggtggtggtccgacatatgagacgaagatgagagagacaccgactggaggtggtggtggtccaacgtatgcgacggagagtagagggagaccgacgcgaggaggggtgggtggagatcgatggacgagaagaaatgaagatcgagagagggaggaagacggcgagagaggggggcgatggtgcggaggcgtgcgtggggttttggagagttaagatttttattttagggtgtaagaaatggaaaagaaatagctgagaagaaataggtgggcatgtgggaaatagaaaaaaagtaggtgggcatgtgggaaatgtggcgagaagtaggtgacgattttttaatggacccttataggcgacggttttcgcctataaggatctattaaaaaatcacattttattaaaaaacgtcgcttattttgtttactacgattttaaaccgccggaaatactaaatttttcctgacgattttaaatagttatttaatttttttaacgacagttcccgaaaaaaattatttttaaaatcgtcgcgaattctgatatttgtagtagtgatgttaggcaccactaatgttcaataacaatatatttttttttgtatgcaagaagaattttattgtcaagtgccaacaacaactttttacaactttagaaataagtacaataatcaagttatccaaccaattgaaattgtttatactggctttctctcttttaaaatgaaaaaatttaaaataaaattttgagtttatactattttaaattctgtattttgcaaaaattattaattagaccctctgttttattaaatgacaaaatagactttgtatattttctaaaattgtacaaataggatcctaaactgatttgttatcaaaataaaacttaatattaatttgatttaaaaatgttatgataaaattagttgcattttcttatctattcgtattaaaaattatcttaaagttagttatattaaaaaataaaattattaaaaattaaacttagagttctatttttactaatttagaaaatataaagtctatttttatcatttaacaaaacaaaaagtgtaattaataactttaaaaaaaa

SEQ ID NO: 335279 - DNA, 999 bp, Cannabis indica
ttttttttataccgtaaacaccgaaaataaaaacgagggtccatcttctacacccacacacagaagcaccacaataacaccagaacaaccgaaaaacaaccattaaatccgatgagatgaagcagaaacattaaaaccattaatattagggctgtcatggtttttctaatgttgtttttgggttgttccactattatttcgtatgtttaataaatattggttttaaattacacatgttaaaaatgtgatgtattattatatcttagcacacttaagaaaaattaatgctctaagtctttaataattttctccaaagtgtgttaatttagcacatgaaaattgtgttaaatttgacacaaataacattgtgtcaaatttaacccacccacaataaatactacatttttatttactacaatactactaattattatgattcattgattttttctaaactttatattatttatttaccatattaccaatatttaaagagaaatgctaaagggcaccagtggtacctagcaccctcctatgtgtcaatatcgctattggtccaattaagtatcaggtctcatataatttaatataatagtttttagggagtaccgctagtcaatcgcaacgtgacatgtcgggaaggtgctaggcatcattggtgccttataacaatgctcatatgtaaacaataagagaataaaaaataatatttttttatattctcaataaaatattaaatgactattaatataattaataattttttttattatcttacatcttgtgccttggagcataattgtaaacagtgaaccaaatataacacaaacttatttttatgtcaaatttagcacaaattttagatatttcattggagatggttttagctttattttacattttaattttgtgatatatttgacacaaaaaaagttttgtgatatattatatatttgcattaatttttaacattgtgctctaatacacaattgtaaaact

SEQ ID NO: 335280 - DNA, 683 bp, Cannabis indica
tcaggacattagttttatacaaactaagctggatttccgattaaattttagtttcatagtaatttttctacacttttttcatgaatttgaaacaacccctgttttaattgattctggttgttttctcaggtgaagtcgttggaattaatgatggttctctttctggttgaattttcgtttcgattgcgttgggttgctgcgtggttgtgagatgattgcgcgatagttacccatgaagcatagatcctgggttgaaggtgtgtgtaagtggtatttgtgtaaattttttatttggaatgtatatttgtttatttggcctgctggaagtatttttgtaatattattattttttttggttaaaatttaaaaatgccctttttgtaacctcttatcatttttccatatgttattgggaacaatggatatcacatttatcttacacatttacaaaaattataagaggagccctatttgtattccacgataagtacaccacaatatctaaaaaaaattaatggtgtgtttagtaacattttcttaattagttttttatttttaaaagtagaaaagtgaaaatatttttcaaaatcatgttctataaaattgtttttacttttaaatttgttaattgagaattaaaatttgaaaaattttgaaaacaaaaaaattctctttcaaaattt

SEQ ID NO: 335281 - DNA, 625 bp, Cannabis indica
atcagattgtaatgggttttatttagggcataaaacccaacaatacaaaccccagtagggggcatgtatcaaccctttctaaaaagagaaggccagtgcgtgaagaggcaagttccagttctggacgtacaagaactcgtagtcgatctacgcaaggaggagatagaacttgtcgcaatactgatcaagaaaatacgggcactagtagaacagaaagttactcaaggacaaggtctgtaagtaactacgatccacaacagccagatttgcataatcaattgaaccaaaaaaacctgaccttcgtcaacaactcaatcaaaagcaagaggatcctatccaattgcgaattattgatttggaagataaattcaagaggtattaagatggggaatatggaaaatttcctggttacaactcagacaaggagcctgagcctttccatccaaatattatgagtgctgaattcccccaggatttaagaacccacacgtctcgtcatactatgggactacagatccggtcgcgcacttgaataattttaacactatcatgcgagccagcaatgttaggaagcaacttatgttcttggtattcagattatcagaaaccagaagaacagatctct

SEQ ID NO: 335282 - DNA, 1154 bp, Cannabis indica
attactaaaaactttccatattaaacattacctactaaaaaatattattttcccatgtaattactaattattttgacaaacaaaatattaggaactcatatgtaattaccacctcatatacaaacacaccttgcattttaaaatatagtgtaattactaaattgtgtaattactactctagtaattaccctacctaataattacacagttacttccaaacacaccctaaataaacaaattttatcattgaacagatcaaaatttgaatacatttttgatatttaactggaatttggaaaaccattgaggagggttttaaagacatggtgtgcatttgatcattattgtttcaagtgagatcaaattgtaattgaagcatagcttcttgagagtgtgtgcaacttctgagtacttgtaatctccattatttgtcgactcaataacgatctctagtctttgtgaatattttgctcgaaatgtaaacaaggtgaaaatatataactcttgatcgaatctcgtaacatttatgtttgatttcttatttccagcttctttctcatttgttcatttagtacttaatcaaatttaaatgtagcgcacaatttctatataaacaaaaatgttaataaagaaaattctcttcattttaattgtggctaattaagaattttgttaactgaatttagacatgtatcaaatcacgtttctttgaatattttagaccgttaaaattcttcacacactattaagattatcagattcaaggatttttatccaatttcattaaatttagctaacatggcaattgttcatgtatcaaatcgtgtcattcgaattttaatatgtatcaaatcatgtctctcaaactttaatatacaccaaatcatatctcttaatctttcattatagggttatttgcggcaaaacctcttaaagtgggcaggtttttgcaactaacctcctaatctaaaattttggtggtaaaactacctaaaccaccactccgttagcaggtagccctttccatccatttttaggtgttaactgccatggtggaatgtccacgtgtacacagtgtacacgtggcacaattttattagtccacgtaataaatatttaaaattaaaataaaaaattatttattttaaaaataa

SEQ ID NO: 335283 - DNA, 1224 bp, Cannabis indica
tagtgcccacacacagcagtgatacctcaatcatagtgaggaagatcgtgaagaaagacattcaaaaagaaggagtttcagcacgaaagaaggagagaaagagatcaaaataatttccaacacattgttcatatcctttaaacaaatgaaaggcataagcaatgactcgatcggcttacaatagtacacaccccagaccctgtctggatacatcacagtagactacgaaattttccttattagaaggtagggctaatactggagctgtgattaatctatgttttagctcttgaaagcttgccacacttatctgtccacaaaaatcactgattccttttagtgagctcattggtgttaaaattttagaaaatccctttacaaactggtggtaataaccttgtcagacccaggaaacatctaatttctgtaactattttttgtcttggccaatccctaacagattcaatcttccctagatccaccttgattccatctttactgacaatttgcccaagaaatgacacctgagattgccaaaacttacactttttaaatttggcatacaatttatgttcttgtagtcgttgcagaaccattcgaagatgttgctcgtgctcatcttctaattgagagtacacaaggatatcgtccataaatacaataacacggatattgaggaaatccttgaataccctattcatcaaatccataaaagctgcaggagcgttggttagtccaaaatacatagccaaaaattcatagtgcccatacctagtgcggaaagcagtctttagaatttcctctcagattctcaactaatgatagcccgatcggagattaatctttgagaagaccgtctacccctgaagctgatcgaaaagatcatcgatcctaggtaaaggatacttgttcttgagagacagtttatttaattctcggtagtcaatacacatatgtaaagatctgtctttcttcttaacaaataatacgggagctccctaaggtgacacactaggtcgtgtaaaccctaggccaagcaatcccttacgttgaattttcaattctttaagttctgctggggccattttatatggttctttagaaatcagttttgctctaggtgctaaatcgataatgaaatcgatttccctctgcggtggtaaacccagaagttcatcaggaaaaacatctaaaaattcttgaaccatcctgatgtcctctggc

SEQ ID NO: 335284 - DNA, 524 bp, Cannabis indica
atgaacaagtaaaagaaattgttatgtattttatttaattttatattgatctgtatgtgaagagttttgttaatttaaattagtatttctctgttctatgtttctgtgtgtgtatgcatgtggataaaagaaattgttatatattttatttaattttatattgatcaaaatacccctacgtattcctagaccctttagggaataatacaagtcgtatccataccttctgaaactttctcataaagagaaacagatatcggacttagaagagaaaatagcaacgataacatctataaatggttgtatatcaaatgaaaatataagtacctcgtccactcaattaacaattccaacccagaagagtttttcaatttaaattagtattcattctctgttctgtgtttctgtgtgtgtatggaggtggatgaaaaaagtttggggttatttagggctaggctcgtgttcaatctagactattcatgtttagaaaatgagcaatttttttttcagaaatgtattttgta

SEQ ID NO: 335285 - DNA, 671 bp, Cannabis indica
ggaaagtatgctatcttattgtcgcaatcgtgaggaggcagaagccagggagaaggcgcaggcagcttgcattcaggccgattcatacctcaactttggggttgaggcaacagatgactgtccccttaatgacttacttgatggttcctattgatgtatttctacttttacagattttatgcccactagtactcttcagagattcatgactgtccgggcagtctttaatcccgtaactttacttttgagacatttatgtctttaatctttttacttggccatagggcctttatctttatatatggttttggctttaaatgttgacttttgtttggcgtgagccacatagcgtgggtatttatctatagtcaaccattcaccacacacaagttgctcaaaacattgagtattgcaccgacactttaaaaattttaatatctacttaagcgagggtgcatttttgcttactagtccatatatgggtgtggttgccccccaagtgactatgcaggtttacctcttggtcacttatcttatgaccggggtgttacctttaagtcttggttgctcactattacccatatatctgtgaccattgtgaggcttgcaatttgattcaataacaatcatacaagctgcgtcattatatgaaaataacttgcaattttatt

SEQ ID NO: 335286 - DNA, 1084 bp, Cannabis indica
tttcagtttcctagaatacattggacaatacagtatggttttaacaagtttctaatatccattttgtaatatcctggaaaataaataatattaaaatagacatattttactaaatatgtaattattttggtaacgaagtaagattatgatcttgcttagggtaattattgagaatttactgaatgaaataaatagcgtaatttattaattacggagattttattgggatatgtgagtaccaaggatatcaatttagaaataaaatatttttcgggctcgtcaattgtagaaatttagcgatgtggttagtaatgtcacgacattaatggaagaattatttgagaatattccgaattaggttagaattttattagaatgtcgggttgatggattagtgaaattaccaaaatgccttaggttattttagagattatttagctttgagggtaatttaattattctttaaataattaatcttttattctttattttattttattttatgttatttaggggctgtgaaaataattagaaaagaaagaaaaagaagagaaattttgttatttaagttacttggaggctaagtaacttctccatcttcaacttctctccttctctctctcgtgcaagcttgagccagccattaggggacttcttttcttcagcaaacctaccatttcagagctgaactcaacccccaagccaacctagaaccttgaggtaagttcctcctcatgttttggtgaattcctaggtttctaaagctaggtttttgttagtttttgtaagttttcagggctgtaggcttagatgagttctgagcatgatttcttagttgaattaggtttgtttgtgcatgttttatttgatttcatggctgttgagattgtgttgtgtttgaagaagctaaaggaattgattttctttcacttgagcatatgaatttgagttagagattgaattattgtaatttgaagcttgggatatgttatatttatgttattatactgttctggaaagtttggttaggtttggtggaggtttgattggtttttggggtgaaaaaccagaaatcaccatggct

SEQ ID NO: 335287 - DNA, 1535 bp, Cannabis indica
gatgttaatgaaacatacatggtagtaaatctagatcctgctaaaatatttccaacagtaagttgtgtactatcatccaaatttctaactcttgcagcaacagtgctaaaacgacttaagtatgccttaagtgtctcgccgaggtgtttctttatattggtagcgaggctgccttgtgtcatataaccctggcagcctggaactatttttcgaaatccctagacagccattctcaggaagttctggaatggtgagtaaacttgttgaaccagctgcttgctgctccaactagcaaggtgggaaacaaaatacaacgtaaattgtttgtcacattactagcttgcattattgtgttgaagttgttcaaatacaagaccagattagtggttccatcatacgatgagacatgtgggtttttaaatcccaggggaaaaagagtattcatgatatctaggtggtacagcttgagttcctcgtctgagttatatccagattgtctccctaattcctcccccacttgatatctcatgaacttgtcctgtaactcgtctatttgcaatttgataggatcctcttgctttggactgagttattggcgaagatcaggtttcttccgattcaagtgctctcacagatccgactgggagtaattactggcagtcatactcacagactgcgtcatactcacagactgcgtcatactcacggacctagtcttgctcatagacctcatccttgagtgactcgcagatttattggttcccatactttcttgatcattagatcgtcaagtactttgtcctctttgagttgatcgactgtgggtccttgaacgccatgaagtcacactttcttcttcacgctctgttcttttcccctgagtgtggtttgtcgtatttcccccattagggtctgtacgagccctctttctatgggttcggggagaaacctggtgatttctcgtaggtgacctacattctctaggttaagtcccaagatcttcctcattttcaagtggaatttcttgttcatcagtttctggttgcctcccattctcatctctatgagagggttctagctgatccttctgattgtcaaggggaatctcatttttcctaggttgttcttcctggatgttttcctgtctcctggttcgtgagccacgaggcctgcctcgtggtcttctcactccagatttaggttgattttgagtgttagtcttctatgctgccttagctacggctgcatcacgctctagttcagcgtttcgccaccgtgccttctccaggtggcgtctaaggcagcagttttccatttcataattgtcctctcccataggctgagtatctccacgattgggaccctcattcaaggattctagccattttcacgctgagttcacctcgaacgttgataactttacgatatagagttattttttatgcttttaaactaaaactattctgagaagagtagtgaaaatgtgtttgttttcttaattttagttagttttagtgttattttctatttagtaa

SEQ ID NO: 335288 - DNA, 912 bp, Cannabis indica
aatttagcatcaagagtagagattaaggcatacctgcgagaaagggcgtcgtcaaccacattctccttaccttgtttataccgaatgacatatggaaatgtttcaatgtactcaacccatcgtgcatgtctcgtgttgagcttctattgccccttcaaatgtttaagggattcatgatctgtgtgaatcacaaattctttgggccacaaatagtgttgccatgtttctaaagctcgcactagggcatacaactctttatcataggtggggtaattaagtgcagccccacctagcttttcactaaagtatgcaaggggtctcccttcctgcataagaacagcgccaatacctatactagaagcatcacattcaatttcaaatgtgttagaaaaattaggtaaagcgagtactggggcgtgagtaagcttgtgtttaagcagttgaaatgcctcctcttgtgcttcaccccattcaaaagcaacattctttttgataacttctgtaagcggtgctgcgatggtgctaaaatccttcacaaacctcctgtcaaaactagcaaggccatgaaaactttgaacatgacctatagttgagggggttggccactcttggatggctttgatcttttcttcatcaacctcaatacctatagcactcacaacaaatcctaggaaaacaatcttatcggtgcaaaaagtgcatttactaaggttagcatatagtttatgttttcgaagcacatccaaaactgattgcaaatgtgaagcatgatcatgcaaactcttactataaattagaatatcatcaaaatacacaacaacatattttccaatgaaagcacgcaaaacatgattcattaatcgcatgaaagttaggtgcattagttatccaaaaggcatgactaaccattca

SEQ ID NO: 335289 - DNA, 595 bp, Cannabis indica
tttgaaatggaataactcgttaagtgcgaaattgacagggtatatttacaactcaattgactgaaaaatctcaagcgagataaagatatgcaaactgttgcctcgtgcattagtgagaaaccatactatttcagatgtacaaggcgaggcgtcaatctccctacacattagaagacgagacatggtggctggaaaggcacttagtgtataatacacactaaatataatatccggacgaacccaaacaattactagcgaggcgtccatctcgccacaggaaggcacactcctggtaccttcattaattagcttcagacatcttttaataaggttcatagtctcgtcagaaactgacattcaaatgatgttagctgctgaagttcaccttgtcgccgagaattacaattgtcagatggagcgttatgacttcactagcataaatggcgaggctcatactgtcaacctcgattaaacataggaagatctctagctcgctattaaagtcattgttgctatgttcgcaacaagatgatcccaagacaatacacgttacaacgtatttaatacacgtttatattgacccattaaaagtgga

SEQ ID NO: 335290 - DNA, 639 bp, Cannabis indica
aaaaaaaaaacaaaaagcaaaatgattgccgaacagaccctatgtaaatttcccaattttatgtgcttaattaggcccaatccattaattctctcaaaagatgcttattttcctatttaagtgaaaaatatggtgtttttgaaaagttgggctttggaacaaactcattttctagaagtccatcaaccgtaatatccattttgaaaaaccatttccagatttttttaaaaaatatgacttttatactaatagtttacaaaaatttgggagtttaaaagcttgtttggctgtgttttcagtttttaaaagtgagaatagaaaacagttttttgtcattttaaaaatttaatagtgtttggcataaatttttaaaaactatttttagctttttttcttaggaaaaaaaatcaatattttaacaccataccatgacattaacccatctgggtccaagtttgtgtatggtttcgggtctaggatttgagtatgtgagcaaaatacaaaatataatatgttagacaaaaaaaaattatttttgaaaattgaaaacaatattttgatgttttctgttttttagaaattttgccaaacgacccctattagtttttaaaaactgttttcaattttaaaaaaacagaa

SEQ ID NO: 335291 - DNA, 503 bp, Cannabis indica
cagacttactattagcctgagtgcccgcgctgtaagaaacatcatcctgggacttgtaaccggagagcttgctttcagtgtggatcagtggggcaccccaaaaaagattgtccccagttgaagaaagaggaacctaaactgaagttaagcctgctccagcacatgtattgctatcactcaggctgatgctgctgccagccattcagtagtcacaagtcaggttcttatcaacaacctttctcttattgttttatttgattcaggtgctacacgatcatatgtagcatcaagagttcttaataagctaggtaggcctagtgatgtttttgaaatgggatttggaaccctattggctaatggggaattgattatttcaagaaagtgggttagatcagtgttaattagagttgaagacagagaattgagcgctgatcttgtggagttaccattggccgagtttgatatcatacttggaatggattttttgtccaagtactctgcta

SEQ ID NO: 335292 - DNA, 580 bp, Cannabis indica
aactataaaataggactaaaaaaacatgaacaagaaaaaaaaaaagaaataggaaatataatcaacttgaaaaaacccctaaaacaacacaatatcaatagaaaaaaaccttatcagatttgggagactttggaactttggctcaaactcaaaattagagtcggagttctccaacacagattgagggtattttgatttagtgttctttgaagtaccagaacctatatttggaagaacagattttagaaaattaaaataaaaaagtcactcttttatttccccccaaaagagtgactaaaaattagaaaaactaaaaaaatgaggagaagatgaagaagaataactgaacaagaaataaaataaaaactttatatgttaatggagagagtaagagaacttaaggaggaagatagtgagaaaaaagataataagtgtatggattttgaaaaaaacaaaaacaaaagaaagagacccatgaagaagaagaagaagagaaaagaagtaattagtattacatggtgaggtgtcgttggtttctcaagaaagctaacccttcacacttgtttgtttataaatgaag

SEQ ID NO: 335293 - DNA, 679 bp, Cannabis indica
ttaaaattcttggggagctctgcctccaatatgtgccggacacatggctctcggtcctcactgtcagaatctgagtcatccccatttttcctccgggagacccgagcaatgtctttgcgcagtgttgccaactctgctagaattctttcatttagtgtccccgcggagtccgttggtacatttttcttcttgtccaggtgatcttgtagatcaccgtgtttttcgttgattttttatcttaactcaacgggagggtacctccgatttctccttcctctctcacgggctcttggtgcaaggatacgctctttcggtcctctcgatcttgagggccaagactcggttttgggagcttgcccctctgcggacctttccctttcgagaaatctgagcggacctttcgcggatcctacacctttttctttctcccagggatggaagtggggtttttcccttgattttctttggaagggtaccgtataggacttggttccctggtcttaggtttttaagtgcttggagaggactcttccggcgtttcctcgagtcctgctgggatggccttagggtgtatatgaatccctactatctccatggctttttttcatggcgaccatcacctcttgcatttttctattttgctctttctgggccgggatctcggcttcatgatcagcag

SEQ ID NO: 335294 - DNA, 668 bp, Cannabis indica
aaaatgcttaacactaaacattattcagcataataaaaggcagctgtcaagttaagaatgagccacctaatcccatagccaaatgactaaaatacccttggtgcttaagttttaagctatttcaagcctaggggtaaaatggttaaaaaccataaccccactcaaactcggtattctatttttctccaatgtacatcccactaagaaataaggctgtagacctacccatgtgattaaactagccatctatcgcattttctgttgtcgccgagcaaaaattgtaaaaattgtataatttaaatataatacaaataatacacctagggtttaataacatctccgaaattgaaaaattataacactaatgcccatttctaacaatgggacccacacataattaaatccacaaatagtttaaaaatacgaataattaatgctataattgcctttactaatccatataatcaaacgcgatcattacactctagctagatttttgtcactttatttcaaccaattattcttcttttcaataataccatattttccaattcaaccctataaatgccaaaactatttatttaataattaattatcaaataaaattctcattttatgtaatttattaatcagaccatacaaagtctcttaattaacaaattgacccc

SEQ ID NO: 335295 - DNA, 566 bp, Cannabis indica
ctattccagcacgaaattgcaaaagggtagaggacaaggacatggagaatagactcttctgcagtattgcaaacagggcatgaattattgacataaacatgcttagtttggagttgtgtacgtgttggaaggcttcctgaaatagctctccaaccaaaatgtaaaacttttggtggaacttttatctaccagtaattcttccaaaaatctcaagccagaagagtgtcatggtcagattgatgcaagtgtctatatgcactcttaactgaatagtaacctgagctttcaaagttccaactccatcgatcattcaagtttgtatcgggaaggggaattccgaggataagtgcatgatccctgtcatcagggacggagggacttatgcctatacgtaggcttaagccctcactcaaatatatacattaaatttttcacatgtagatatgtacatatattaattcacttcactcaatttattaaaacccaatccacaaaagccctcactcaatatcttaatcataattcataaacctaccctcattctaatcaagcccattttaaaagta

SEQ ID NO: 335296 - DNA, 370 bp, Cannabis indica
ggagtgggggtcccctaaccgctggaaagaggccccctccggacacgtgtcacatgggaaaccctagaaagattccctgaacaagtgtcgggtgcagtaaaatcgcagaaagtggttttacacagtaagagaaacagaaggaaaaagcccccattctatgccctaagcaaccgttgaacgaagaacatatggttttcttcaacaaaaatgcacgataataacagaggcatgataatggcgatcctacaactaaagcaataaacacaaaacagaacacctgaagaacctaaacacttgcatgcccagaaatctcaaaatgcgaacccagaaaaaacaaacaaaacaagtaaaagcatgtcattaccaaagg

SEQ ID NO: 335297 - DNA, 576 bp, Cannabis indica
cctctgcatttttctattttgctctttctgggccgggatctcggcttcatgatcagcagccttttgcctcaagagcagcaactctgtatatctgcctttgtcgtaggcgtcatactcatcaaaatttccctcgtactcgtcgtcgttggcctcatctcgttcctcagagtccacgttcactcttgaggccacttcctcgttctctggattttaagcatcctgaggaggacagggctgacgtgtattgttgcgagtttccaccattgttgattcaacttctcagattgttgtttgtttaaagacgcttccttcagctctcaatgaaagcactaaaatgttgatcgaggttttcggcaaccaattaaataatgtataggaagagttgtagaaagtttaatgcatgagatttttacgtggttggggcattaatgagccttagtccacgagtcttttttattaatgacagtatttattacagagaatgttcttggtggatttctctcctattttctctctttgattccttaaaaccaaattattcgacccattttcaatctgtttatggggtatttatag

SEQ ID NO: 335298 - DNA, 689 bp, Cannabis indica
tcttttcaaaaagaggatcatgatgaaaatacccattgtaatcattaaaaagctcattttatataaaaaaaaaaagaaccttttaaggggcaattgttatacctaaaattccgcgagcacattagaagaagacacgtctctagctgggaagaatgaagaactcaaacacacaactgtgagtacacttgacgtgaaataactcgttaaaagcacaattggcagagtatgtttataactcgactggttggacagtcttatgcgagataacaatgtactaattgttgacttgtgtctcgacgacaaaccatgtaaatgcaagtgtgcatgacaaggcattaaccacttcgcgtggaggagatataataacaataaaaatacttagcgtatataacacgatatacaaactaagtataagcagaggggtgggtcaaggtcacagagagcgaggcgtctatgtcgctgtaagatggcacgcacggaagaaagatctattaactcaaacttttagatctccttatttgatgattaacaaatatttgattataatttgctactaatgatttgttgattttctagcaaaattaaaagagaaaataaatctttcatgataaattggtatttttaccaaacttttgaaagcaacccaaaatggattcaagaagaatatcaagagcaaaagattcatcaag

SEQ ID NO: 335299 - DNA, 1621 bp, Cannabis indica
aatgtcgaagtactaaacattatacagttatatgtccaaaactaaaatgctaaaacctaaattacagacattttaatccccaagttccaaccaaacaagtttttgttctgggcagaaaaagttaatagaagacatgtatattattgagggagctagtcagagtggcttagtagtttacctgcagctttaagaagcagaaccgaagctggtggagtctttagtataaaagtaaagctcttatcctaaatagaaaaaggtaaagattaagaaagcaacaaaataagaagaagaataataaaaaagagggttaaacagaaccaagataaactcacatcatagactgtaatttcaacaggaataatataaccagccttgtcagctgtcttggcattgtaatccttacagaaggccataatattgacccccttagcaccaagcgccggccccactggtggtgccggagtggcttttccggcctcaagggcaagctttatcaacccaacaactgcgaaaaaacagtacaaaactcataattgagtacagcgcttaatgggtgacaaagtgtttgtgaaaatgtcaaaaccgggatagatgtactacctttcttggctttgcctccaggtttggcctttggaggagccatagcaacgatactgagacgccttgagggagaatttttaagctgagtctgctgggattggaggaatctgagagaaaattcggagcttgaagagaggctggtaatggaagaaggagatcccaaaagagaagaggagaggtgcttgttgacatttccatggagggaattgttcattgtctttgtggaagtgtagtggggaattatattggtgtggtaagtgcagagtgaagacgccattgatgaaagttgttggaagctttttgcctggaagatagaccctgaaagatttggataaaaaccccggaacaggatactatcactagctagcatcctcttccatctttgctccctcaaatgatgagtacgttttccttcgatacgttgcgttttgttattgggccgctactgttttgggccataaaaacattttttcttggaccaggcccaaactttctcaaatgttttttttctttttttgaaagggattttctcaaatgtttaggtgctgtttggtaacacttttgtttcctaattttttaatcacaaaatgaaagtaaaatttttgtttttaaaaattttgcttttaaaaaataaaaatgtgttctgtaactacttttgttttaaaattttaaaaacagaaaacaaaagtgtgttctgtaaaattcatttttattttcattttttgattttatttacgtcgggtttaggtccgaggtcggatttggattacagtcagaggtcgggttcagcgccaggaccgtggggggatttagattcgagtctgatcgaagtccaaaatattgattaaaaaaaaactatttaaaaaaatattgaaagaatatttttttatttttaaaatttttgtattctcgattaaaaaattgaaaagtaaaaacagttttaaagaacatattttaaaaaataattttcactttttcaattttaaaaactagaaaactaattaaaaaagtagttactaaa

SEQ ID NO: 335300 - DNA, 682 bp, Cannabis indica
ttgctaatagacttaagagtgttatgccgtctatcatatctgatactcaaagtgcatttttgcaaggccggttgattttggataacatcatgattgcttacgagattatgcatcacttaaagaggaaacgaagagggagaaatggtataatggcactcaagttagatgttagcaaagcctatgataagcttgagtggggttatctccgggcgatgatggtaaggatgggctttgatggtcgctggattaatttagttatgcgatgtgtatgttctgtttcctataccatttcacatggcggaaaggagttggggcccattgttgctcaaagagggttgcgccaaggggatcctatatcaccatatttgtttattctttgcgttgaaggtttctctaatttgttgtggagttatgaaaaaagtggcttactcatggggtgtaaaattgctcaaggtgcgccggtaatctctcatatgctctttgctgatgacaactacatttactataagacaactgaggaagaagcgtacaatgtgaaggagtttctgcatacttacgaggtggcttcggggcaaagaatgaatttctccaagtcttccgtgttttttagaaataatactggaattgaggtgcgggattccatttgtgctatgctagaaatttatgaggccgatgaaaatgg

SEQ ID NO: 335301 - DNA, 570 bp, Cannabis indica
aataacaaaatttaaaaattagcataatatcctatatctattcaaaatatcatgattataaaaatcttattttaaatttaaataaggtcaattaatttaaaaaaaaatagaataatttaaaaaatattaatatctgaccttaaatttaaaaataagataactaattaagaaaaaaaatagattttacctattttcaagttcaaattacactaatatcttaaattaattttaaaaatccaattaatttaattctaataattagatttgaaatatcatactcatccgcgcatagtgctcactgagtggatagtccagaatactcggtgccaggggctgctggcaggatttccgcgcgcgcaggaggggatttcagacatccctgcgcatgttcctttggacaaagcctgtccgaacacactgctgactgagtgcacctaggttccgcgcgtgtgaggaagagtgatcactctatcttttttcaaaacttccaaaaatcataactaattcaaataaaatcgaaattaagttctgtaaataagtgaattgcttaattttttccaaactatccaa

SEQ ID NO: 335302 - DNA, 816 bp, Cannabis indica
aaacagagttttatttagggcataaaacccaacagttgtatgcttttctcttctctgattagcatggcactcacatcatgctccatgacagctaagtatattccaagctcttctccgtctagaggttttgagagtatgggaggcttcgcaagttgtgcttttagctcttgaaaatctttttcacattcctccgtccactcgaattgcttgtttcctcgcaggatattgaagaatgggacacacttatctgttgattttgaaacgaatctgttgagtgcggcgatctaaccagtgaaactttgcacttccttggttttagttggcaacttcatatccaggagggcttgaatcttctttggatttgcttcaattccccaggcattgacaatgaagcccggaaactttcccgagctaactctaaaggagcactttaagggatttagtttcatgttgtactttctgagcactttaagtcatctatgtgcccccaggcttcttggatttgacgagcatgtcatccacatatacttccatattttgcccgatctggtctttaaacattttgtttaccaatctttggtatgttgctctagcgttttttagaccaaacgacattactttgtagcaatatagactcatatctgtccggaaacttgtatgttcttggtctggtggatgcattttaatttgattgtagcctgaataagcgtccatgaagcttaatatttcatgccctgctattgcatctacgagttgatcaatccttggaagtggaaaacagtctttggggcatgctttgttgaggtctgtgaaatc

SEQ ID NO: 335303 - DNA, 593 bp, Cannabis indica
attatgaaatctggcaaatggatgtatatgtgatatatatgcatgcttgttatggttagtacactaccaacacttgtacaggagtggtacagagggcattggtatagtgtacaatgtttaaagagtacgttacggtgttattagcataagtacagaaaagtacatggtgtgtgtggtacaacacttattggtactcagagtacgaaagaaaacctaccaacactcatacagtgtcggtacatagtgtatgtggtacactggctgtaccctagtaaagaacattcttactcttttgttaagctttgtaaataggtctatgggcgcctagatacaagtcgatattatatgattttttatatgctttcttactgagtctgtcgactcgcagttgctactttcatgagaaggctgaaaaggagtgagcttagagctaggatggtgttggtacatgtcatggcgatgcggcctggaatgttcggtctcgggacatctggggtttaattttgtagtcgttgtgcgaccagactaatatattttgataatgttgtaaaagtttaaatacggaatcccaacttttgtaaataaatgtataa

SEQ ID NO: 335304 - DNA, 785 bp, Cannabis indica
ctctttctctctctttaaaatacaaaaaaataaaacccataaacctccataaccaccaccactccagcgaccaacctccggccaccgcccgacacaacgcgccggtcagaacggaactccagctgccggcgacctcacccaccaagcggcgccgctcctttcgccaccgttgactcgggatcgcaggtcaaagtttggcatttcaaactttgaacggattttttagtcacctccggcgtccatttgacgaatcgtcttcaccactaaactcagctcgtcgaggagaacaacctactctaaaccatttttcccggttcacaactttttcaggtgacatttttgtagctctgcccccttccggtgacttttcggtgacatcgtgtactgttttcacaaacggttggcatgggtgtgatctactcgttgaggtggtcgttttgatatatactactcctattttcggcgacatttccggtacaccaatttttaccgccaccgattgttaaggtgtaccgcttcggtgaggcttcggaaccccaaattttaaatatagtcgtattatatgtcgttggactcggttttgaatgtagaatgcgataatgataattatttaaccatttggtggtataggtgagagtaatatgtaagtttggactaaacaattggagctcgggacttgagagcttaagatcgtcttttggaaaaaatttaacgaatcgggagaggtagggactcaacttgattattggacttgatttttatatgcgttgtataacattagacat

SEQ ID NO: 335305 - DNA, 509 bp, Cannabis indica
tcaaccgtctccttgattttggaggcggttggaatctgatttttaggataatatcccgctattttcgtgggttgacaactgtctttgagccttttacgagatttgaacatttgaagagccactgatgacgagggtcccttatgggtatgacatggtcgtaaaccacctttgaggattaagcccatacttgggggtaacacccccgggaccctcgttgggggggatgacaaccatcatagttaggtgaccccccaagacccaacttgagaggggggtgacaaccaccatcgttaggtgaccccccaagacccaaggttgggggggggggggcaaacccaagttttggggggaagaacaaccacccaaattgagggggcatctcaacagtcatgactttacaccctcttcattaatttagtcccgatatttttgtaccacgttttgctactcttgacacgtcatcgtcgttaaaatttgggtaaacaggaccactattacgtaccacactc

SEQ ID NO: 335306 - DNA, 749 bp, Cannabis indica
gttttcatggagattatggccacgacataaatgagtgcaacaacttaaagcgagaaattgaatttcggataaggaaaaataacccgcacgtgcaaaaatacgtcaaggccgattagaatcaatgggccgcccaagcaggcaataatcaagatctattaaagcctccactagtggatgcgcatttacaagtcattattacaagtcattattgggggcccacacattgctggagactcacgcaaagctcgggagaggtatgcccgaactctacagcacgaacaaaaagaagtagttttggccgtagaagaaagaaaaccaaaaatgccacgggtatgggaacccactataaccttcactgaagaggatgttatccatgttcgcttcccacacaatgatcccttggttgtggaggtacaaatagcaaaaaaatagtggctcgaactatgataaacaatggagcttcaacaaatattctgttcaaaaaaccatatgaaagatgggactccatttcaaatatcaaatcccctgtacccaaccgatgtatggtttctccggccaaagtgttgcacctttatggaaaattcgcctacccctcactgttggacaggctccgaggagcataactgtgatggcacaattttttataattgatgttccatcaacttttaatgttgtgttaggtcaaccagccttatatgacctaaaggctgtcacatcaattttctattcgtgcatcaagttcccaacaa

SEQ ID NO: 335307 - DNA, 566 bp, Cannabis indica
atgaaattttttgccctaactcgagaacatttcaaacttctcaagttttgacttttcttcgaacattcttgttttttaatctgttgagtactcctggtcggcatatttgcttgtttgtcgttcgatattctagccaaacactcatcttgtgtgttgtcttttgtagatgaacccaactgagttttgggagagcgaacattggatcgaccagggcctacttcaccttttgcacgaggatcatcctcgtcttcgttctagcctaccttcttctagtgaaggacattctccaattcttatacccagccatacaatgatggtttgtacaaagaaaataatgtgtctggttgacgcatctggtcctcaagtggctcggtacgccactctactcagcgccgaataggatccagccgtccaggtggaggtggataaggaaggggacgctgaagtccagcagatcgaggagcaggacgatgttcatgttagcagttcctctgaggtggaggaagaggcagaggttaaacccccaaactactgggagtacaatgaggctggggagccagtcgatg

SEQ ID NO: 335308 - DNA, 1706 bp, Cannabis indica
ttatgattactaaatattcaaatctttattaaaaataaagaacaacaattacaaagattaattttgatattacaagataagttactgtaatatggccgtaaatatttgctcttccaatggttttttattagtgagccattaagccagactaatttgtaatctccgattccaactacaactttgataatgtaagggccttcccagttcaagttaaacactctagctgctggatctcgtgtatttacaaatacgtgacttaacaccaaatctcctactttaaagagttttttcgaactcttttattaaagtatttagaaatacaatgttgatacgcatcattagatattgtgaccatgcgtttttcttcaagaagatccaaggacatacttagaagttcttgggtttgttcttgattgtagaattcatgcttctaggtcgcaatgtttacttctataggtaacatagcttccgagccaaattccaatgaaaatggagtgtgtcctattgatattttctccatggttctatgggcccagagcacttgtggtagctcatcaatccatcttcctttcgcggcatctaacttcttctttatattatgcttcaaggttttattaacagcttctacttgtctctttgcttaaggccttgacaatgacgagaagcttttaattattttattcctttcacagaactcagtgaataaatctccatcaaattgagtaccgttgttagatactatcttaattagaataccaaacctacaaataatgttcttgataacaaaatcaagaaccttcttgaatgtaatggatactaatggttcaacttctatccattttgtgaagaagtcatatgccataatagcatattttgtgccacctcgacctgtgggtagggatccaatcaggtcaatctcccatatttcaaatggatatggcgaggtcatcattcttaattcgatgggtggtactcgaggtagatgtgagaactgttggcacttatcgcatctcttaacaaactcgtgtgtgtctctattgatagttggctagtaatatccttgacggattatcttttttgataggctttgccaacctatgtgatttccacagaaaccttcatgaatttctttaattatttcattagtctctgttggtaacacacatcatagaagaggcatggaatatcctcctatataattttccttcgaccattgtgtagcgaggaatcaaatataagagttttcgtgccttagttttatctatgggaagttctccatttaatagatacttgatgattggtgtcatccatgtaggcctcgcatctatcatgtcaacatcttccttctcacatatacttggctcgtctagtacctccactagaaccaagttaaatttatcgagatcaaactgagatgccagttttgctaaggcatctacattagagttttattctcttggattttttttattttgaaataatcaaacttctctaaattttttcgaactttctctaagtatttggccctttttaggccctttgcttggtaatctcccaagacttgatttactatattaattgcgaatcactgaagcacctgatgttcttgatttttagtgtctcggttattctatatcctactaacaaggcttaatactctcattattcaaagtttcaaactaaaacctaagtgcataatggaattt

SEQ ID NO: 335309 - DNA, 546 bp, Cannabis indica
aataaaataaaaaaaatataaaatgattttatcaatataccatctaaaaatacttggtctatatttcaatgttagtatgaaccctacatcaacataaaaatacttacctcaacattccattaatcacaacattgataagtgttgattcttgagtactgtcataacaaaaaaaacaaaaattaaaatttgtgataatcaaacttaaaggaaaaaacgaatttaaaattagaaataagatattggtaaagaaaaaaaagaaaggtatgatgataatgaaaagtgaaaaagatctatttatatagagcacataaattacaaaaaatgaataggatctcataggcatagcaaatgtcacataattaaattagaagagaaatgaaaagtctctatagttagtcaattaattattaaaaattgaataaaaccataacaaaggtcacatatcaaattggaagagaaaagaaaagtctacatagttaatcaattaattattattgttattaattattttttcaaagaaaaataataaactaatttaattagaga

SEQ ID NO: 335310 - DNA, 594 bp, Cannabis indica
tcgcttggacacacaccaaactatctgtttccaacatgactctatcccacgaatgagttgtaatccaactcaatacttctttaatacctattatctcagcaattttgggttgaacacatccaatatttcctttcttgaatgcttctactatagcaccatgatgattcggagctacacaacccatgccaaaagacaagactcgaaccaaaaaaaactaaaaggaaacgactgaaaaacaatgtcaaaagacaagactaaagaaccatgtcaatagacaagactaatgggaaaactaaattagtttcaactcatatacacgaaacattaaaattaattaaggaaactccttataattctaacctcataaaaatattaattggaattaaactaataatagtaaattaataaatgaaaataaatatatgaaacagaagacagctcttgaaccccacagaagaagacgttgatgtgggaatgagaaaaactttggcatcaatcaagaagatcaatacaatagtcttctccttcaaacaccatagttattcaaatactaacaacttgttaattaattgttgagaatgatgaagttaaaga

SEQ ID NO: 335311 - DNA, 559 bp, Cannabis indica
ttttttttttatgaatcaagaattgtattagcacaagaacatttgattgcacccaaatagcacccaaagagggtctataataaagaacaactatacattgacaatatatttacaaattttgaaaccattgtgtgtctaactttgaaactttttttggccaaaacatatcaattcttagtttcaagttagtttttaactcattgagaagggctgggagagattgctcttctttggtccatagaaccttgttcctcatctgccaaatgctgtagaccagaccggcaacagcaattgtaaaaaccagcaacttaaacttcgtctcctttgattttcctagccatttcatgatgttggggagacttgtatgcattgttctccaccctagccacctcttgacttcctgcaagcaatctataactttcgagcaatcaaagaacaaatgctctaaagtttcagcactatcacagcaaagtatacaagttgtatctgtagtgattttcattttgcacaaccgatctcttgttttgagacgttgatgcattgcaagccagagaatgaa

SEQ ID NO: 335312 - DNA, 802 bp, Cannabis indica
ttcatggaatccatttctgaatccatgccagctgaccatcgtttccgttccagactagccattgcctgtttataggttaatggatcgtcatcaataccgtcaccaaagaccatattgatttcaccatccaagccataacgagatggtttagtagaaaccctcccactacgacgaggattcgtgatcttcaaaacaagaacatttgtggtagatttttagttgtaacatcttgtgtcagttcaactgagggagtgggattatcctctacttgagtagaagaggatggaacatcataaggagttatacctgaaagcatttcttctaacactagtttacttttcgacttgtagtctttaatatagttctcttcaaggaaagtagcatttgtagaaacaaacactttgttatccttgtgactataaaatagtccacccctagtctctttagaaatttcgacaaaaagggcaaacttcagttcgcaattctagtttgccttctttctttcttaagacatgagcagggcacccccaaatcctataatggcgtaaacttggtgtacgaccattccatagttcgacaggtgtcttagcaactactttagatggaacaacatttaaaatatcgttagccatctgtatagcatatccccagaaggacgtagacagagttgaataactcagcatagacctaaccatttccaaaagagtgcgatttcttctttctgcaactccattttgctgtggagtgctaggggcagtatactgtgattcaattccaagttcaattaaatgatctttgaact

SEQ ID NO: 335313 - DNA, 1484 bp, Cannabis indica
caccttgcataatgtaccagtcgatgaggagtctaaatacttaagtaggacaaagagataacaaactggccaaccaaggggtctcacgaaccacccctggctagccctattgccaacataggcgaactaacctccaacaaagggaaggccgaccagcctctcttctagcatgcactttttgcgcctctacaactttttagcctggacaacacctctagctacaaaattgggcttcaataacccacaaaaattagagattaacttcagttttgtacctattcttgggaactaattaacatgttatttagttattaatttaatgtgtaataaataggtgatatctcctcattttaagggatatcaacctactatctcttgtataatctctcctatataaagagcactaaactaaacctaaaagttctaagggctaagttatatgctctaagctcgtgggctcttaagttctaaaccctagctcaccctctcttctacacgccattagtagtctagaagagattaagtctccctcatctcatctctcttccttgagaattgtctcttattctcactattgtaatcttaagagagccactatagaattcacactacttgtgatccgattggtgtaacgtaacgggggccgaacctctataaaattactgtattcatttttgttttcttattctaatcgtgtacacgtggtgattttcaatcataaatatgactctgctgtcggttggctaaatttgaggtcaacactttgttgtagtagtttagatttaatctatatatattatgttgagatccttgggcttattgctcatattagataaaaactatttctatcaaattctgcttctacttttataactctgatatggactataaaaactaataaataaccctaacatacataaaccctaacatttgcttttgcagatgataaacttgtagcggcaggcaatgaattcgcagtagtacgaaaattcgctggaacactagatttcacgaatttagttattccagagtttttagcaccatttgaacctagactagtcaaccctctttgacctgcattctgaacttcctcaaaaatagatgaattagggttaaacatctagatatttctcttaagattatcaagaagaagttagacgcgaccaaaggcagatgggttgacgagctacctcaggcactctgggcccacagaactaccgagaagacagcgacgggacacactcctttctcgctagcatttggctcggaagcaatgctgcctgttaaggtgaacatatcaactcacagaagagagttttataatcaagaagaaaaccaagaacttctcaaattgtccttggatctacttgaggataaacaaacttagtcgcaaatcaccaacgcagcataccaacaccgagttacaagatacttcaacaaaaaagtcaagaaaagctaattcaatgttggagacttggtgctaa

SEQ ID NO: 335314 - DNA, 553 bp, Cannabis indica
aaatattaaattaaaatttatatttagaattttattctaaattggtaattttaattaaataaatatatattaaaataaatagataaaataagtacaaagaaaatacaactctttaaaataatgagctttagttataaggatattcgatctccattgttggtcctacatggttaatatgttttcaatataagttttcgtccccctaatggatggttattcattgaaacatttaacaccgtaacgatctcttatgatatgtattttgtaagttttcgtctctattagactctcccctattgtgactacttagagataaatttacaaaatttgaaacagtggtggaagctctttaaataagaataaccttgactctcgcctaccgggaaaacgttggattcttattttgatcgaataaaaggttgctagaatggtatccattttagttgagctgacaactctattcaatgaaagatactttgactctcgtctaccaggacactgtatcagtttgttggatacttagtaaattatttaagatgtgcctgttttgtat

SEQ ID NO: 335315 - DNA, 793 bp, Cannabis indica
tctctctctctctctctctcatttgtaatagtatgtagtttgcttttgtcatatgtgtgtggtatttgtcgaaactggtattttttggtcttaaaggatagatttggtaaatttggttttctgtcggaatttgggttttctagagattatcgacagtttgtcaatagaatatcgatgcaatgtcgataatatgcgaaggaaggttagggatggccattatcgacatgatatcgacaaaatgtctatatcatgtcgataaataaagtaatttaaataaattcatatatttggcaatatatcgacaatttgttgatattatgtcgacattttgtcgacaatacacctaattaatttaaattattgtggatatttaggaatatttactggtatttattgttgtcgacaatttgtcgatagaatgtcatatattattgactttaagacaaaaaatattgtaaacttttaaacattagacgcgaaacaagtgaaattttttagacataagtaaagactaaacaaacattaaaactaactactaaacaatcataacataaaaatttaaaagtctttactctgtcggtgagactcgtaatatgggcataaagatctaggcttgaccggttcgccattaaaataacctaatctgcaacgacgacactcttcggggaaccctggtggtggatatgaatatttcatctactcatcatttatttgactctgtaggaacctccattcattcgccagcctttcattttcaaaatgtttaaatcaatctatatattcttgcattttt

SEQ ID NO: 335316 - DNA, 1000 bp, Cannabis indica
gtagcctcgccctccgccttcagttccttgcttggcctcctcccgatactttgcctttgcaagggcctccctttgttgagcctcctcctggaacgccctcctttcggcagacaagtcccgaaggatcctcacggcctcgtctataccccaaaattcggacatgacgaacccatgatcgatcagggtcttggaaaggcaatcggtctcggcagtaatctgaaaaaaagaaacaagaatgaaatcagatgccttagacaaaatatcaaaggagggaataaattacaaatactcaccgcggccaaagcagagctgatgtcttggacctggtaaacggagttcaaggaggcacaagccgcatatctcttggctgggaactgagtcaggtgggagacaaactggctcgtcatctccgaggcgaagggagctagggtaggcccgacaaagcggttgaaccaatccgtcaaagggtccatgttcaggtcccaaggatttcggaaggcgtcctcgtgcaaagtgttctgctgctcctcccgcaaaatcttctttaaggcctccacctcagcgtgcccccgactgtactcgtccagggcgtagttgtgcttggcaactcggagaatttgcctctcctcatccgcgggaaccggggtcagcacaatgccgtgcggcacagtatactcctccgcttcaggaggaatcccggagtcagtactgacggccggagtgtcccccctctgggtccgcttaggaggctcggtctcaaccatcttgcccttccgcttgcgctcaagggcggccgcaaccgcaacctcgacctcatcctcctcgacttccccctcctcgtttatcaaaacaatcatgcccgaaggggcactggacgaggacctcccgggggtcaccaactgggatggagctggaggcagagagtgttggaaattattttgggcggctagggtttagagagagaaggctcaggtttttctctgaatgaaaagtgtaattt

SEQ ID NO: 335317 - DNA, 560 bp, Cannabis indica
actccactaaactcataaatattcaaaatgataaattattcccatcgacaaacaaaataaactaaaagtataaaaaaaaaattaattaaccaagaaagcggatattacaattatcccctcctaaaagaaatttcgtcccgaaattctactcgacttttttttttctagaaagcgaagactcaatgtcttatacctcagcacttgtcatcactctgtcctgcttcttttatagcgaagaccctcgctggaacatatttatcgtcttcctttgaatcttccttgttctcagtttgtccccacaatggacaattacgtttaatatgaccttcttttccgcatttgtaacatgcatttgccctacactctccgagatgatgtttagtacatttaggacattctggaacattgcgtccattgtttccattggatcggtggtcgttatcagttttgtacctcttgtcttgacttgattgtccgggctgatcttgtccccttttcttgtggttattagaattggttgcacctttcttagattccctcctagtagcattttccttcca

SEQ ID NO: 335318 - DNA, 605 bp, Cannabis indica
cttagttccaacatcactttattattcaacattttttcctttcctctttttttctatttttttaatcatcatttttttcagaacgtaaataacattagtgatgttgaaaaatacttttacaattcacacattgtcccaatcacccactttaaataataatttcatccacacacaattcatctcccccaaacttatttctaagcttatggtataatgcaagggacaaggatagagaattacaagtggattcaaagttagtctcataaagtggctaaaaacaattgaacaggctaagctcaaataggcaaactagggataataaagataaaggtaagcttgaaaggcccaaacgatccaaaaaaaaaaattgcctcatcattttccaaacaagcattgtcaaggatttcgcctaaaaaaaattcatgcaagttctatcctattcaatcaatcttaccacaaaccaaagtaaaataattatgatacaatccaactattgacaatttacatcaatacaaaattttcacaagcatccaaattaattcaaagagtaaaaaaaatcaagcacacggtttaaaatttcaatctattccacaaataacaacagc

SEQ ID NO: 335319 - DNA, 505 bp, Cannabis indica
aaaattcaaaatctccttagaagactgatttggattctcgcaaaaagccaatcagcccacaaaatcgcaggtgtgcgaatagaagaatctctcaaaaaacgcctgggtgtatcccagtaacccaaggggcatgcgttttcgagcatgaccctgaagtgactgggaaacacccaccgtttcgaggaatttaaccaaccacaacctgcgagtctggcacgcatatcggactagcaatgtacctcaaaaaacggctaggtgtatcctagtgacccaaggggcatgcgttttgtagcatgaccctaaagttactgggaaatacccaccgtttcgagcaaatctactagtcgaagaatacgcttatattggaacaggaaacactggcgtatgtcgcaaatggctgggcgtatcggagtatacctcaaggaacgtacgatcgcacgtatgagcattggactacggcgacacacccaccatttgaaagcttaaccaatgttcccacaacaaa

SEQ ID NO: 335320 - DNA, 1337 bp, Cannabis indica
tgctaccttgtgtaggtaaaggaaaagcaaagctggaggaacagtgagatggagctcggcagtgattgtacatatcgcggcagtgcaacctggagggtttcggtctttcaatattttgagttatattttagttgcctgttgtttgtaaagaaaaaatattactagtagactttgtattagtaaagtacttttatccgtgttttgaaattcgggatcccgacccatataattataaagttataaaattataaatttatcttttgagtttagtaaatttcaaatacgggcgttacagtttggtatcagagccaccaggttgttcactaaagaccgtcaagatatgtacaatcaaggccagtgtcgagctcaactcacgataccgtaagctttactttttgcaaactattttaacatttattgcatatatgattaacttgatgttttgaaaccctaaatgcggtcttgaagatattttgaccattgtctaacctacatgccttgtgggtttgcaggctaagtcctaagtaatggacgcccagtgaaacgtcagaaggcagggtgaaatggttgagaccgtaggtggtcggggttgtagaaatcccaaaaaccccgtggacacggtagtggccgcggtcgtgccccgagaggtggccaaaaggatccacctgaggctccgattgattgggagcaaaggtttgctgagatgcaagccagaattgagcaacaagaagatgagattcgaagactcaggcagtggaatgctcctgttgagcttcccccgcaatcgcctgttgcggttcctgcagctcctgcggtgccagcagagcagcatgttgctggtaactgtatggagcctttatatgagagattcaggaagcaagcacctccaatgtttctgggaggccctgatgtgcttaagggagaacagtggctgactgtcattgaaagaatattgaatttcatgggagtaattgggaatgacagggtggcatgtgccacgtttcaatttcaggaggatgtcttggtgtggtaggagatggtattcctcacaaagaatgttgctagaatgacctgggaagaattctaggatttgtttaaagctaagtattacaatgaggcggtccgtagtgcaaagcagaaagagtttgttgagttggtacaaagcgagggtatgtcagtgactgaacacacaaccaagtttgatctcttggctaaattagcctattagattgtaccaacggatttgagtaaaaaggagaagtacttggcaagattaaatcccaagattaagaacgatctggttatcactacaaatgacactacaacctatgctgaaa

SEQ ID NO: 335321 - DNA, 1031 bp, Cannabis indica
gaggaatctcctatatctcaaggggcatgcctctctcgcgtaaaccttgggctaacggaaacacctcactgttttgagcaaacctactagtcgaaatacacggttatatgggaacagggaacactggcgaatgtcgcaaatggctaggtgtatcgcagtacctcaaggaacatgcgatcgcacgcatgagcattggaatacggcgacacacccaccatttgaaagactgaaccaatattcccacaacaaaatatacagagaatataaaaaccctaagttctaaacaaccggtaaaaatgataaagtctctagaaaatccgaaaggaagcagatatgcgagtattcgagatgttcatccaaatacccgcgagtattctagagatgagtaatcaaaaagatgcgaatattcaaagtattcttctttaattgacggttatgcaaattacaggtccgttggttcctcgggattatccaattttaacaaaggagtaaaactctatgtgtattccctacaactaaacgtgcattttcaaacttctcaaagtgtcaaaaaccgagaaatgcaattttctttctcaaaatcagaaaccaaatacgcgagtagtttcgaaactaacctttagttttgacgattctctctgtggttggtttcgatcacttgtgaaacttaagagatttaagaagaagaggcagatttctgaatgaaggatgtgaaaatttagagaaaaaagaaaaagaaggaagttggaaatgagaaaatcatttcgtatcagggggcttaaataccaatacccctcataaattgggattgtgacacgtggcaacaggaatgcctaaggtcattccatccaacggtcagccatgggcatgcctacacaaaaaccgaagagtttcgtgacatggcaccataaataggataaaatgaaataattgcagccgtcattttttgaaaccctcgatgggacaaccaaaagtcaccacctcgtgacaacctttcacctatctctggcgtatagtttccctcatgaccg

SEQ ID NO: 335322 - DNA, 857 bp, Cannabis indica
taaatgttgttccatctaaatgagtcccttaaacacctttagaaatttggaatggtcgtataccagtttacaccattatagaattcggggggtgccctcttcatgtcttaagaaagaaagatggcaaactagaaaagcgaactgaagttttcatgttagttggtaactctaaggagactaggggtggactattttatagtcgcaaggatgataaagtgtttgtttctacaaatgccaatttccttaaagatgactatattaaaaatttcaagccgcaaagcaaagtagtattggaagaaatactttcaaatataactccaaataatgctccatcgtcttctactcaagtagacgattgttatacccaaaatttggctgccatctcaatagaggacacatgtcaagataaagggaatgtaaatcgatgaaattgcttttatggaataactcattaattacgtaagtatcagagtatatttataacctgctgactgtaaggtcttaggcaatgaatcaatgtacaaactgccacttagtatattagcgagaagccatatgcgaatagtgagacattaaggacagtacacattgaaagacaaaagtgacatatatcaattgcgaaagtccttagagtacaaactaagtgcaattgtcgtttcggctcaaaaccaagtaagcgaggtgcccatctcgctatgggaaggcttcctatagcttcatccagttagcgttagcaagccttacaaccctcacgagccaaaagataacattcaaatgaacctcgaagacgtgcatcgacgacctcagaagaaaaaatagccccagctcgctattgagatcactggaaccaagtttct

SEQ ID NO: 335323 - DNA, 635 bp, Cannabis indica
aagagacttaccaagagttaagatcactagaaccttgtaaaaatcagcttgaaaacacacaaagaatcccccaaccttagctgctctaggccgaagagagaatgaaagagagaaaaaagagattttgcttttctttgataattttccaatttttgtaaaatgagtgacaaaagtaattttaattacttatttcagccaaataaacatatcataaatcacatagtcacataatactaagtccactaaaggacaaaggcttatagggcaaaaagaccattttgcccctccaatactaaaagggttaaaaagaacttaagggtatttttgggaaactctaaattcccgaccaatcccgacattcccaatgtctaaataaaccgtcccactatgataaaatattagattgtgattctactgagccatacaccgcgttccatgttgtcaggcaccgaaaatgcaaaattatcctttctatcaaggatctacactggttgttcttcatatgtcatgtctggatgtagctcaaggttctcataactaagtaactgctgataaagctggaggcaatgctaaccgatatgccacttgacctatcttctcgagaatctcaaaaggtcctgtaaatctagggcata

SEQ ID NO: 335324 - DNA, 785 bp, Cannabis indica
taatattcatctaattaccaaaaactctttgaaaataaatgataatataaaatttgtaaattttaaattgtaatttagtgatgatatcactaggggtgggcatcatccaatccaatccaattgaaccgaaccgatccaatccaacccaattacaaaaagttggatatccaattacaattggattggattggatgctaaaagttggattctaattggattggatcggttattggatgtcaatctcaaaatccaattaaaaaccgatccaatccaattacatttatatatcttaaaaaattatttatataataaaaaatataataaatatttattagatttttattagattttttttgtatgttgaatttgtaacacttgattgtttagtgtatttattttatttcatgatgttttgttctatgttattacttagaaatattgttgttttagttatttaaacttttagttacaataaacttgtaagaatagtatgcttatgaagtattaaacttaaataaaaagtacttactaaaaaaacttaaacaaaaagttaaacttagttttttaggtatttttctttatatttttaagataatattgaaatttaggtgtgcaattggatatccaattaaaaaaccgatccaatccaattagtaattggattagattggattggattttgaggtccaattgaattagatcgaatgatgattttccaaatccaattactaattgggttggatcggatgaggaaaaaaaaaggttggattggatcggatgtccac

SEQ ID NO: 335325 - DNA, 731 bp, Cannabis indica
cctcttgaaaaacttgctttatgcctcatccaggtgtctcataagttacggccttacttccaggcacatccaataaaagtgttaactgatcaacccaggagacaagttttatcaaaacaggacgcttctggaagattgataaaatggtcaattgaactggggcagtttgacataacatatcacgctcgaacatccatcaagggccaagctttggcaaactgattaatagaaggaataactctagaggaaaatcagactgttcatcgagacactgacacttggaagttattcgtggatggtgcatccaatgagcaaggctcgggtgcaggggtaatattaatttcactagaaggctttaagtttcattatgctttgagatttcaatttgacgcatcaaaaaatgaggccgaatatgaagccttgatcgctggcttgaagatagtcgaggccttgaaggtcgagaatctcatatgtcatagtgattcgcaactgattgtaaatcaggttctcggggaataccaagctaagggcctaaaaattgctaagtacttagagaaggttcagaagaacttggaaaagtttgattactttaaaatcgagcaaatcccaagagaacaaaactctaacactgatgccttagcaaaactagcctcgcagagcaatttggatgaattaaacttggttccggttgaagtgctaaatgagccaagtatatgtgaaaaagaagatgt

SEQ ID NO: 335326 - DNA, 806 bp, Cannabis indica
gggaacacgtagtgaaaactcaccaggaagagaatgctagtcactataggcgtttcttgcaagaaatctccgaaggcaaatgtcgattcttgtgagatgcagcctggccagaacctcccagcgtgtccgttattcctttaacaaagcctttgtttttacccaacgtcacgaattacttttgaaccagctgacttggattttgaaataatgcctcccaagccacgtatatcaaagactccccaggaccccagcgtcacctttgaaattaagttggtagaatcgaaggtgcgatctatctcaggccacacgagcgatatgttgaagacctgcggggttgaacttaggcaatcatgccaagttagatctgtacaagagggtgagttcagttgtttcccctgcatgcttttcaaggagtgtcccagggacaagtggcgagactagtaccagtggctcgactcgtatgggtgctggagcttggagcacatcagtgcaggaaccagacttcctcttcgagactacttcaaggactacataaatcaccttggagtttccccattctagctgactcccatctcctacaggattctcgctagtttgaaagtcttgtacaaaattctaaactgggggtgtcccacaccagtagagattgagtatctttactcagttaaggctgttccgttgaggaagaacatcgcagtgggcttatactacctcgatactcattctagcgagcctaaaatcattgtggacttgccaaatgaagtatccttcaaggacaactttttttggacatctggtctttcccc

SEQ ID NO: 335327 - DNA, 530 bp, Cannabis indica
ttatatgttttgtgttgatttggatggtttcatgttggtttatgtgtttatgtgatgaaaatttgtgttgtacgaattttttccatgataaatatttttagtatttttgaaaatattttatttgaattccttgtgaaaaattaagcaattttcgtgtttacggaactcgattccgttaaaaattgagaaagttatgaaacaatggtgtcgagggtggtgctcatgcgcactagaccctcggtcaccacccacccttgcgcgcccgtgacacatcccacccttcctgggctgcacgtgcagcctctcctggcagcctaccaaaaaattgcgatttttggggttttttccccaaaaatctaattttttatgggattgtttccaaaaattcttttttctaattttaaatatttccaatttgaaatatttctaattttaaaatattttaaatttggaatttttccaatttaaaatatttcctattatggtaagatttaaaaatttgttaacttctttaatatttatatattatt

SEQ ID NO: 335328 - DNA, 694 bp, Cannabis indica
agtatatgtgaaaaagaagatgttaagatgatagatgtctcacctacttggatgacccctataatcaactatctactcgacggccaacttccaactgacaagaatgaggcacggaaactcctatatacagtacctcgctacacaatagtcaagggaaaattgtagagaagaggttattccatgcctctacttcggtgtgttctacctacaaaagcaaacgaaatcgtcagagaaattcatgagggcttttgtggggatcatccatgttggtagagtctgtttaaaaagatcataagacaagaatattactggccaacaatcaataaggacacccacgagtttgtcaaaaaatgcgacaagtgttagagattttcacatataccttgcgtaccaccaatacaactaaggatgatgacctcgccttacccatttgctatatgggggattgatctaattggggcactccccacagggcaaggggagccaagtatgcagtggtagcagttgatttcttcactaaatggatcgaggccaagcctcttgtctccataacctacaagaaatgtcctagactttgttgtcaaaaatatagcctacaggtttggaattcccataaagttagtatctaataacagaactcagttcgatggtgacttgttcactgtgttctgcgagaggaacaaaataattaaga

SEQ ID NO: 335329 - DNA, 1191 bp, Cannabis indica
tgaaatatcatttataggaagctaagtattttaaggataaaatacattaaggggtaggacgataaattttttcctactcgatgtaaatcatctatatagaatctttgattatttggattgaaacaatagataatatatagcgtatttattcttggtgaatagagtgttctatctaatcaggagtacaattcagaatctatagtggagtcaggaggaattaataagatagagaatttacttggtaaattctagaactacttatttggagctagattatataggcccatggtcccaacactagttgagatcatatttgtcttatagactcaattaattagttttaatttatcaattagaattctaaataagactatgtcttgtttctgaattttactaagaaatgatttatttgagaataaaaagaagatttagggtttgtttattaattaagagatttttttaaggtcaagttaataaataagttaaattacaattttatttgataattaattgtaattattaaatagacagacttgacgtttatagagttagaattaaaatatgacatttgtgaaaggaaaatataaatttaaaaaaaaatggcaaacttaaaactctgtagggcccactagggttcgaccataaaggttcaattaaagcaattcttttatcttttttaattctatttttattctaaacttaacccttgaagctattttataaatagaataagatgctcttattttctacccttataacttagcctattagtctctcttattagacaaaatagaaaatagaaacgggcctctttaatttcaaaatcaccttcttctctccttgaaattttgaaatgatgatttcctttgagcttggcttaatagacataaatggaagaactcttatttcagtaattatattagtttactgaaatatcatttataggaagctaagtattttaaggataaaatacattaaggggtagaacgataaatttttttactactcgatgtaaatcatctatagagaatctttgattatttggattgaaacaatagataatttatagcgtatttattcttggtgaatatagtgttctatctaatcatgagtacaattttgaatctatagtggagtcaggaagaattaataagatagagaatttgcatggtaaattctaaaactacttat

SEQ ID NO: 335330 - DNA, 744 bp, Cannabis indica
gggggagtcaggacgagtttgtctacttcacaaatcttttatatgatttgaaacaaaattctcgtgcttggtttggtaaatttattcagctatttagaaattttgcatgttgtaaagtaagtcaaaccattttgtgttcaataaaatatcaactgttgttggtatcattttgttagttgtgtatgtggatgacattgttattactagaaatgatactagaggcatctcatcccttaaatctttcagtcatacccagtttcacacgaagaatttagaggcactcaagtattttttgagagttgaagtctttcggagtaaacagtgtatttttctatctcgaaggaagtatgtacttgatttgttaattgagacaagaaaattgggaacaaaaccttgtagtactccaatgaatctagttgtgcaccctacaagagatggggaaccatttgaagatcttgagaaatattgcaaattggtgattaagttgaattatctaactgtgactcgcccagacattgcgttctcagttagtgttgttaatcattttatgtcatctccaacaattcatcattaaacagcattacaacaaattttgtgttatttgaaaggagcacaggatgaggtattatttacaaggatcatgggcacccccagattgagtgtttctcaaatgcagattaggaaagttacaaggaaacaaaagatccacttcgggttattttctctttttgggggcaatctgat

SEQ ID NO: 335331 - DNA, 782 bp, Cannabis indica
aggggtaatctgatataccccactggtgcgatgccctggccaatgaagccatatatcacttgactgcagggtgctaaatcgtcaagtagagccccatctttttgcatgttgatttaaatagagtattagaggaggctccattgcccaccacgtatcttgccacaatcatattcctgatttgtgcagtgatgacccctcactattggagtacctttctttgactaccaggatgtcacttagtgtccaagcatagtgctccctaacgttgctggtctcgcctgcaatatgaggcctactaataatgacccctaagtgacctaccactagcggtggcattggatctctattttgggcaacttgtgcctgaattctgtcgttctgtgcatgacaatgtaggtggggattgttcttccttatgaggaattcaatatccctcttaaaattctgacactcgttagtgtcatggtcgaagtcattgtgaaactgatagaactttgccatgtcctcttactcaactccctttttatgggaaagggctttctgtatgtgactgtatcttgagtggccatgaagatggcctcaagtttctccataaggagggtgaagcatgtatacttctccaccttctccttctggttttgtggcatgggagaagtgttaaactgttggggtttatgccctaaataaaactccatttcaatgtaatccgtattattcaatatcaataaagaaacagaagtatttttcatccatttgtgtatgttttggttcaccttatcaat

SEQ ID NO: 335332 - DNA, 682 bp, Cannabis indica
ggactcgatcccgacccaaatcagcccctacctaaattgggatttggacctggacatggacacgaactcaaacccggaccctgacgcatatccagacccaaacttgggacccgacctaatacccgaacctagatccgaactaagacttggacccagatagggatccaaaaaacccgtacctggacaaggactcagactcggacccggaccccaacttggacttgggacctaaaatcaaaactggaactgtgactaggactcggacctgagaccagaaccgaatccaaaacataacccaaacttagacaaaaacctagaccgagaccttgactaggactgggacctgagacctgggacaggaacctagaccgacacccgtactaggacctggacttgaccttgtcctagaccctccccgggacctgagacccgcgacccagaccaggatccacaccctgataaggacccaaacttgaacccagaccaaggctaggaccgagacctggacccgaacccggactaggacctggactaaaaccaagactcgaaaaccgaacacgaacctagacctagaccagggacctaggccccagaacccagacccagatctagactaggactcaaacccgaactaggacctgacctagacccgggaatctgaagtcggacctagacctagacc

SEQ ID NO: 335333 - DNA, 854 bp, Cannabis indica
gttccattccagttgattctgcagagctataggctcgtggctagggatgcacatggggatggggcagtgcaaaaattgcatttcccgcccccgtccctgccccctattctttttctcgtccccgcatactccccgacgaggaacggggcagggattccccattggtaattgacaccttaacggggacccatttatcaaaaaaattgctaaaactaataattttaatatatattcaaaattaatataataattttaatatatttaaaactaatatttgtaaacactaaattaaaacaacatataattaaattcattccataattaatagtcatttagataaattgtaaaataaaaaacccttcaatgttaaaattaaaattcataaacataagcttgaaaaccataagcataaacttaaaattcaaacaaacacacaaaacttaataaaattataataatgtctttatcttcaactttgaaaactagtagtagtcaagaccaccattgaagagtttttattcttcaagaatcaaaatccacaaaacttggaccctaaaataaaaatttcaactataagtaaacaaatattttaaataaaagaaattgtaaacaaacaaataaataaatgctaaacttagcgcattatcattttcgacatcatcaaagtatgtactatatgaagccttaatttgtgatgtatctaagaaataaacaatattggaattagttaattttttaatatgaaataaaaataaataataagagcaagttagaataaaaatacttaggtagtgtttgctttgatgtaatgtaatgtaatgagaatggtgttggaatttattttaccaggatct

SEQ ID NO: 335334 - DNA, 785 bp, Cannabis indica
atctaagagaactatcataccacttgcttgttttacattaagcaaaaaaaaaaaaaaatctacctctgtcaatttctaaagacaattaatgttctagatggatatgctgcccatatttcaagctgtgttgatgtaaagtaatgaaaaattcatggagtcaaaagtcatgattttcatattattatgacttaattattaccactagcattgagggaaatgtcaagtctgcatgttcgtcaacatataactactttaagcaactattttcgagtgatgtattcaaaagttgatcgaccacaagattttgagcaacttgaacaaaaaatatcaattactctttgcaatcttaaaaattatttcccccatcattttttgatataatggttcatttggtgatacacttagcatatgaggcgagaattgttagaccatcaatttatcgttgcatgtaccctgaaaggtaatatatatatatatatattgattttttattttatttaattgtaaaaagttttaatattgtttttatgttctgttacgaaaatatgaacaatacgcaagtgtacgtaatcaagtagtaaactcacacaggtgaggtcgaaccacagggaattgaactgaataccactaaactagatttatgattctatttggcagataaaaaaaattttaataaagtttgaaataaagataatcaagaaaattaaagaaagcagtaaagtgtttaattaaggatgagaaattagggaaaagaatcattttgatttaattacccaattgttaat

SEQ ID NO: 335335 - DNA, 606 bp, Cannabis indica
aaaaaaaaaaagtagaaatctcatatttgtaaaacaacaataagttttgccggaaaattcatcggcactgaaaaagtcgacgacactgaaaaagtcgtcggaaaaatcaatgtcgccggaaaagtcaccggaaagtcatcatcaccggaaaagtcaacaaaaaagccaacgtccacgaaaaattcaacgtcgacgaaaaagttaacgtcatcggaaaagtccatggaaaagtcaccagaagtaaatgtctcagatataactaaaaatataaccggttatgtgaataaaaactaataactcaaaccggttataattgaaatataaccggttctgtaacataataaataaatataaataacataaaataactcaaacaagttataattaaaatagaaccgtttctatagcagtgttataatgaataaaaacaaataacacgaaagaactcaaactggttataactaaattagaaccggttatataacataatgaatacaaacaagtaacacggaataactcaaaccgattacaattaaaaacaaagaagaaatcaaatcctaaaacactgaaatataaattaaaaacaaaactaatttcacaataaaa

SEQ ID NO: 335336 - DNA, 938 bp, Cannabis indica
taaaataatttccaacaaaaggtacctctaatcccatagattaccttgaaaaatttaatactataatggaagtggatcaggtaccacagctcgcaaaatgccgcattcttgcagcaacgcttgaggaaaacgcccacgattggtttacccaattgcctgaggcctcgatatcgacatgggaaacctttgtcgacttattcctcacgcactttcaggccatgatcacctataggcctccttataccactctggcgaacatcaaacaagaacccggtgagtctttgcaagactattttcaacggtttaatgcggaagtaacaaaagtcgagaaggctcccgagtcttcgcttgtttgcatgttgataacaggtgttttgccgagaaccgatttctggaaggagttacaagctcgaaggccagaatcactagtcgaattcttcgctatggccgaaccccataagagaattgagaattctctagccgagttggaaaagggaaaagataagcataaatcgccaataccgcgatcaagatctcgcagtccccgagggaagaattccagaggtcgaagcccgagaagacgcagcccacagagacagcgaagtccaaagttggccaaatctcctccaaagaaggagtcctcgccgaagaggaagggtggaccgcgttttgttaactataccgaactcgcggtgccacgagaccacatctacgcaattgaggaaagaaatggagtcttcaagaagccgccccccatcaggggaaaccgcgacaaaagagaccccaaaaagttctgtaagtaccataaagatattggtcatactactttagaatgttgggtcttgcaggatgaaatcgaggagctgattcgaagaggaaaatttggcaaatacaaaaagaacgaggaaggtcattctcgagcggatgacaaagaagaa

SEQ ID NO: 335337 - DNA, 696 bp, Cannabis indica
tttctcttcaattctaggctcagtctcttctatgtattcatctaatggtgcctctgctatattcaaacaactctcataactttcgttatttgagttattataaactctctgaatcatgcgcctttaaattatcacatagagcttttaccatgtccgccaagcgattaatctcttctggaagtgatagtatattctcttcttcttcaattggttggggtgagtttggacaataaagagggtattggtgactccaaccctgaagtgatggatcccaatgccaatcgtaatcaaaatcttccatatcattcaacagatttattgcttcatggcctcttcttaacaaaggctctccagttacttctgctccatattccacccaactttttgtttcatcattaagtccattatagaagaatagagtaaaatacccacttgagaaattaggatagcatctctacccgagctccttaaatctccaccaagcagaatagaatggctcatcgagttgttggagaaaattcacaaggtataacattgagatttaccttccaggtcaaacacattcagtaaaacatcagtaaacttaaataaaaagaaaccaaattagaatagaattcaactatattgatattaactaaaacagtccccgacaacggcgacaaaaacttgttgggataaatccaacacgcaagtata

SEQ ID NO: 335338 - DNA, 529 bp, Cannabis indica
ctccaatgtactaggagtaaaataaacattattttaatagaaaatcgtcaaaaagttaccaaaaagattaaatatttactgaaagtatctaaaaactatatttaatatataaataaaattataaaaaaattatgaattacatgataaaaagagtaaataaaaaaatgatacttattgtagtgtaaaattttgctcatattatattatctgtcaagttttagcatgtgtcaaatttagatcacattatacactactattggagctaaattttatgaatatatatagactaaaaaatacatatacactatatttatagcacttcaatagagatactctgagtatggtattatttatttcaggtctaacctacacgaatttgtttttaggaattttctcaaatggtctcatactaatagaagaggtagatacagggtccgtaggctaggtcacgtctaggacgcactcagcctagggacccaaatgaaaaagaaaaaaaaggttcttttaaaatatacacatttcttcaata

SEQ ID NO: 335339 - DNA, 680 bp, Cannabis indica
accgtatcataagctttactgatatcaattttaattgtgcatctgggggaacaatttttccttctgtagttcttcaaaatgtcctgaagaataagaatgttgtaagcaatggatcggcccttgacaaaagctccctagttctaactcactaaagtagggagcacattagcaagccgagaacaaatcagtttagacacacacttgtatagagtaatgcagcaggcaataggacggtaatcaacagctttagaaggactatcaatctttgggataagagagagagtcgttcgatggagctcttccgggaattgattagtgtcaaaaaatgagttatagccctatgaatatccttccccacctcaggccacactgacttaaaaaatcccgaaccaaatccatcaggaccaggtgatttagtattaggaatactaaacatcgcagctctgacttctttgagagtaaaaggttttaagagatgaacctactgatcgagagtaagtttggggccatggctatgcaatcagattgaatctccatggttgtaggcttagcctttcccattatgcctttaaaatggccaagaaagtgttgcacaacgtctggaaagtgatcatttaggaccccttgctcggtagtaaaagaaacaatcctgttatcttccttccgtttcttcaacatag

SEQ ID NO: 335340 - DNA, 867 bp, Cannabis indica
tttcccaggtccctatcctgattcttggtctgggtctggagtcagttatcggtctaagtccgtggttctgatcctggtctgggttcgagttttggcccgggtgcggctctagctttgggtctgattctaggtgtgggtgtttgagttcgagtccgagtctgtgtttgggtttatgtctaggtatggatcccgatctgggtctaggttcggttccaggtccagatttagttacagcatttccatcctagtctgggtcttggtccgcgtcgagcttcgtatttggatccctatcaaggtctgggtctgagttccggtctgggtacacgactatgtctgggcccgagttccagtctcagtttgggtatgaggataggcctgtgttcggttctaggtctggctccgggttctggttagggtcctagtcctgttctagggtcctggtttggcgattcttgttcaggttctaattttgagtccgaggtctaggtctgtgttcgagtttggttcttcgtctgagttctggtcctattctgagtcccaaatctagacaccgactactggtctgttccaggcccagctacccgaatcctgagtcaagatctggatcactgtcaccggtctcggtctggttctggttcaggtcccaggtcccatttctgaatttgggttcgggatcgagactggggtgcggttctaggtcacgaccctggttttgtgtccctagtctggttccttgtttgcgtctgagttcaggttcgggtttggttttcgagtccttgtttgggttgggatccgggtccaactccccattcgtgtctagactgatttgtagtccgggtcctggtccggttacggtttctgatctag

SEQ ID NO: 335341 - DNA, 743 bp, Cannabis indica
tttttgatttcatcttatgaacaatgtgtgatggtttgattcttattgtatatgaatgacaatattcaaataataaactatatgattgttattattactttccttgctgagtccttgtgactcatcggtgctatgtggtgcaggtaaaggcaaagaaaagctagatcaaccatgaggtggcagtcttctcctgctatgtacatattgacctcatcggcgtgcgtgccgagttgctaggagttgttttgtgctggctgtatctgctgtgtattttgattttgtgtttaaattattgtcgtatatattaagttttgagatataacattggagaacgaacgacgagcgaaacccttttctttctccttcaataaatttttctcttgttctatccattttctttgattttcaacctcaaacctagcgatctaagatctggtagtagcgggataccaaatccttaaagcaggaaagcttagggtatggtttaattatattttaagctaaaaacgattagtttcatatagggaattcgtgaattagaatagttatggaggttctgacttcgtggaattgttctttgatacatatgggattggtatcgatgtttacttgttgaatttgaagtgattttgagttagaaatcgagtttggaattttttaaagcttagtccgaacgttaatggtatttttcatttaagggctcgattttaatttctgtttcacaaggatggtaatatttatgg

SEQ ID NO: 335342 - DNA, 1317 bp, Cannabis indica
atgctcaggctcccaagactcacctaggttcatctacaaaagacaacacgcaagatgagtgttggacggagtatcaagcgaaaaaacaagcaaatatgccgaccaggagtacttagcagattaaagaacaaccatgttagaagaaaagtctaaactcaagaagttagaaagtttttcttgagttagggcaaaaagttcatgaagcttgaagaaagcagaatggaaaacagatgcaatgtagttcaaaaacaagccttacggctgaaagctaacgcaaggacttggagaagaagagtcgcagaagtttcaaaccctagggtttcctacaatgttctttctacagcaaagttacattcaaagcacaagcatgcaaaggaaaaacataaagggaatcagaaacttactcaaagattcaagtgtccggattcaagcaagcctgaaatcgtgtgtaaactcttcagcaactttgaagcctgaaaactctctctttttgctctgaagtttgcttaacaacgaagggtgatgaaatgaggtaatgtgccagtactccaagtatttataggcaaaagggtaactgtacgtaaaggaaccttagacgcctcgacttcccgccttgaaagcaaatatgggaaatcaaaataatcgagtgcaaccgtcagccgtggagagagaaatttggattttcaaaatattaattgtcagagcattaattagccgaaaaccgaagggacgcccagtcagcttcacatcgagtctcgaacggtcatgctcgacacgtgtcccctttcaaaggcagagccagctcggaataagtctatacgcaacctcggaggtcccgcacagacttggggggcaaatgttatcccaaaattggcactctgacgtggcatcacaagaatggtgacacgtggcatctacttagagcacctggtcggatcaacatgccgagcaggatgcctcgctggcatgtccataatggaatactcaacgagccgtgcagaatgagcaacacttagcgaattcaaccaagcacttcgtgagtcaccagctcaatccctataactcagggatcaacttgcgtggatgtggcatacacacgatcccactatcagtgtattcagcctcaatcccacgatcctagcattcagcattgatcacacgatctttctgtttatgcgctttgtaacgagagaggaaactcttcctcctcaagtttcctgccctataaatagtgaggaatgttcactgggtagggcatcgatcgaaaaactgtaaacagagatcatacgccgaaacgctataagctaaggctatcta

SEQ ID NO: 335343 - DNA, 590 bp, Cannabis indica
ccatctctcactacacctttctttcctttcctttctctctctctctcttcaaaaacggcaaaccctaatttttgttctctaaccatttttccccaaatcgattcccaatctttgacgatccatcgcccaaattcgtcacgattttttccttattcttatatatatgatttgtgtatatatataaccatgactgattgtttgaaagcttcgctcgattaagataatggtcgaagcgtcgaggtttccgtcgtcgtttcccaattattttatgggtttgaacaatgccggagcttcgcagggcagttcgccgaggtcgcgctagggtaacccataagcgatcgaactcgcctcctttgcgaaattacgtaaagactcgtgcagctgttgctagagaagccgccaaggccttggtgaggccaaagactggattggcggctaggaacaaggtgaaggaggagaatcaggttattgttatatcggaggaagaagaagaagaagagaaggagagcgattcggagcctgtaggagaggaggacaaagttgttgttgaagaaaaagaagaagaagaagaggaggagagaagaagaaga

SEQ ID NO: 335344 - DNA, 629 bp, Cannabis indica
aaactagaaactaaaagtttccctatcgataagaagcatgacgataccctaaacaatacaaaaatgggaagaactagggtttccaatttttccccaaccggtagagaggttctacaaccgcaattccagttctgggaggaacccaaaacaccaaccggaattccggttcctacaggctatactgaaccggaattccgattcagtgcaggaaaccataaaaatttcatatctcatgcaattcaaccccaaaacttacaaaactctccagacctgctatatacatcccaaagaacatatccaaagcaataaaaccaagctttaatcacagaaacaagattcaccattgaaggttcaagattgagttcaaaactcaaaacctgactaacccttcaaacaaccactaattcatgcataaatcaacatgtttcaacataatttaaccacagagaacataattaaacaataacaacaactacagcaacaaaagctcaattcaccattaaagcaccaagctttgagttcaaaaactcaaacttggttaaatctaactaacatgcatcaaacctgctttaatccattcaatttgaacatataaaaactacagacaacatcccataaacccagcagca

SEQ ID NO: 335345 - DNA, 675 bp, Cannabis indica
agctacaaatatattcaagtcaacgacatcttccaagaaaaaaaaactgaagggtacaaggtcgaccaacgaccaagtattgtcttaggtgcaattaccaagacatacagtaagtcctaagttgctcaattaactataatggactcattatctagccttatgcagagtttccaatagaaaccatgcataaggtcatagttgtatatgcctcaaaggccgccttacgactctaactacggtccaaagagggagaaagagccttggccttggctggccagggttccaagtcctagaggccagccagaccccaagacctagcttagaggccagctagaaaccctagttctaggcatagatcggtcatcctagggacacagtccccatggccgaccagacctgatgaaagccactcatgtccggctaggcatcaaacaaagcctccttggccggccagcatgtgaatggatcaaaacacgtgatttgtcaagaactcaaacatgttcttcattttcttcatgttcttcataactcaatgagccaagaatcataacaaatgtcagatttagttctttttcatctataaatcacacattgttcatcctaaggctatcatgtggagcaaaatactgaatgaattacaatctaacgtaaggatcaaagtgttgggttttgtgc

SEQ ID NO: 335346 - DNA, 524 bp, Cannabis indica
taaaataatttccaacaagggttccatctagttcattgctacaaccaccggttcggcttgcatagcaggggcaggagctacaggtatctctggtgcaggaactacaggagcaccctgctatcttaattgccaaatcacttcctcttgttcatcgattttagtttgcacttttgcaaacctgttttcccaattctaggcatcctgagcagcttgggcagcttgggcagcttgggcaacctgtggcgggttagcatcacctcgaccacgtgacctacccctgagacctctaccacggccacggatatttgggggaatctgagcactctgaccttcatttgatccaaacgagtttccctggctcctggtgtttcacctggcatgcatactaatctgaacagcctgcgtaaccaagagctagtctggtcagatcatgatcaaggaaaaacttactaatgccacttatttaaaaattaaaaacatgcgcctattctactatcagactactaacatgcttcctaacaggc

SEQ ID NO: 335347 - DNA, 787 bp, Cannabis indica
ctcgcgcgggtaaggaggtgttgatcaaaacggtggtgcaatcgttgcctacttacgccatgagcgtatttttactaccggttggggtgtgtaaggagatagagagtttgatggcaagattttggtggaaatcttcttggaaccaaaacaaaggaattagttggatgagttggtcccgtttagcgaagcataagtttgaaggagggatgggatttaggagtcttcgtgattttaatattgctatgcttggtaagcaaggttggcgattacttattaatcctaattccttggtgagccgagtattcaaggctagatattatgctcatggagattttttgaatgctgagttaggctccaatccaagtttcatatggaggagtttagtggaggctcaaggtgtactgaaggccggacttagaatgcgagttggggatggtcattctattcgttttgcattggacccgtggctgcctagggaggagtttcccactcctacgtctgatctctctatgttcaatgatcatagagttcatagtcttatttaagattggatgccgagaatgggatgaagaaatagttcaggatgtgtttaatgaagatgatgcagctgttatcctgggcattcctcttgctgctggagaggctcgtgactcttggtactggtttaaagaaagggatggaatttactcggtcaagtctgcatatcagctgcttatgaatcaagtgactaacgcagaggtgagtgacacggattcgaagttttggaagaatctttggagtctaaaag

SEQ ID NO: 335348 - DNA, 676 bp, Cannabis indica
tgtatttttgttctcttaagttattaactaatttgtttgttgctttgattttgttgttaggatatgccaaattttgacatattgggttcgttattaggacaaaatgagactgttgcaatggtagagaatgaagctttgggttctaatggtggtaatgtaggtggagttgagggaattactgagaaggttagtgcgggtactgatgatggtttttcagaatctgtgatggctgttataaatcagaagggggatgatgtttttcatgcatatgaagtgaagaagattataatatgacttgatgttttgatgtttttttttatgattattgttgttaaatttaaatgttactgtttggtttcttttttaggacaagattaaggtttgtgaatctcctaaatcaaagagggctcataagcctagtgtggttttacagagtccttacagaaatgattttgggtcttctggtagtaatgaaaagaagaagaaaaagaatgttaaaggtctatatccgtttaattctgggttgtttgatcctccgcatgaacttcaacaaaaggcatttgatgagtggttctgtgttgggtttaaggatgagaataagtatgttttcttgtttttattatgttatttgggttgttttttttaaatttttgcatatttgatattaagtatattg

SEQ ID NO: 335349 - DNA, 656 bp, Cannabis indica
taaatttaattctaagtagtcactatagggttgagtctaatagaaaaaaaaattataaaatgcttatcttttgagatatttatagtgttaaatgttcaatggatgaccatccataaggggacgaagtctagcatcttgaggtcacattgaaatattaaccatgtaagacaactaatggagatcgaatatcttaaagttaaagctcattattttagaagaaattgtatttttattctgatatctattttaatctatttattttactataaatatatttatttaattaaaattactaatttcgaaaatactaaatataaatttttatttaatatttataaaattatatatatttaggtagatctgaaaataaataaaatttattttccatccttactattaatttttaataaatattatgaaaaatatttaatataagtgggtccaaaattaattaaaattaattttcaattcaaatttaattttctataaatatatattaaaattcaaaatttaatgtatttaataataaatacatttttgaatttattaaaataaaataaaataaatcctaaaaaattattctagtttatgatgatctaaaattaataaataaattaattttcaacataaatataatttatttatttaattaaaat

SEQ ID NO: 335350 - DNA, 773 bp, Cannabis indica
gtttggagatgtgtcgatcattttgatttcttccgtgccagtgatcctacgctcttcaaggaactggatagggaccaggtttgccttgtaacttatattactgctcgccaatcgagctaacacatctgtcgttgtattttcttatcttggaatttgtctgagaccgtagcttttgaattgtgcgagcagatcatgtattttgctcatatatgctatcattttttctccccgagcctcgtattcactagatatatgatttaccaccagctgtgaatcgttgcagatctcaatgtgttcggtcttcattgccttcactagtttaagtctagtgattagggcttcgtatttggcttcgttgttagaggctttgaatccaaatttgaccgcaacgtgcaggtgttgcccccaggtgtgacaagggcaattcttgcaccagatagttgatctgttgccgacccatccacatgtagcttccaggtcagtttgtcttcaatattacttggctatggtattggctcgagatttctttttggcatgctttctattttgcctgtgcattccacctcaaatttggccaaggcttggcccttgatagcagttcggggttggaaattgattttgtactgacccaattctactgcccacttgagtaaccgtccagaggcatctggcttctgtagtatttgtcatagtgcttggtcggtatcacccaaacaggatgagcttgaaagtaaggcctcagcttccttcttgctagaatgaggcagtaggcg

SEQ ID NO: 335351 - DNA, 639 bp, Cannabis indica
ccttgttaaacacaaagctgcacgagtccatgaaagaggaagacgaggcacttaatgtgccaatcccgaccctattccagcaagttttgatcactggacaagtgactaaacaatgggttatggactcatcagcaacacgacatacagggcagagagaacttacatcaaccatttaattttacatatttggaaaaatctttcgcccttcctattgttgtggtggtctcttaatgactcttaaagatatcaaactgtctccactcatggcgatgaggtcaggcttggatcttcgtcaggagaaaacaaagcaggggtgaagtagcattaaaggtttttccacaagtttgattgcaatcctactaaatctttccttaacctcttctcatttttaggaccagtttagtataattgtgctgtgagaaaaagcaattgtagatgtgtgtgagaaaaaacagttgcagcagaactgtagaaaaaaattgaactaagtatttgataaattataaatttcaaagtactgtgagtcgttaagacatattataatgataagggtaaatagtggcataagtacccaaagttttaagtttgtaagcgacataaacccaatgattttttttagtggcataagtacccaatgtt

SEQ ID NO: 335352 - DNA, 1084 bp, Cannabis indica
aaatacttgaaaaatatctaatatttacgtatcttgaacaaatcaacttaaatattaattttctatttaattaaatatatatacaatatacaataacacacattgtgggttagcaatattaaacttttaaagtcatataatgcgggtcactaaaaattctctaaaatttttagtgacacgcatcttttgtgcgggtcactatagagtgtcactaaaaatcaattttgtagcagtgactagatcacttctaaacaaaattattctgttctccaaatcaatttgatggatgcctcccttagctactcatgtcctatattccacttgataataccagcaaattaaactcatattgtcatttctttaatctgtttgtcctgtcaaatgagctaccactgagttggttgaaggaccgatacctgagtctacttgagtcataactgacacttgggcaaaaaccatacattcttctcctttaatatcaatctttcttaatagcggacagattctttttaggtgacccactactccaaaataaaaacaagatctggatctacattgacctaaatggcgtcttttacatcttggacacttaggatatggtcgtcatttcttgttctcaccttgactgccatcttagtcaccttggaaccttttgttctatcccataatcggtagtttatttagtttttgatttctgatatgcacgtaagtcggttccatgtgtttcaccacatctactggcacaacaggaaatgttggtggtacatgaatagacacaagacgagcctattattttcttaggtctcagatatgttcccttttttgtctaatcgtatcctacatagcagcaatgacttgttcccagtgttgaggtgatagaagattctcttccttgccattagccctgagcccaaatagctcgctagtcggattgttcgattgctctgctgcataatttatcacacctatagttcacatcttctaaccatttgaaactcagacatatatcaatatcaatatgcatatattatacacatattcttattataatcatcactatgctagttttctcaatatctttaat

SEQ ID NO: 335353 - DNA, 1271 bp, Cannabis indica
ataaggtacttgattgctgagtggtttgtgtaaactatcgccttatttccaattagatagggccagaacttatcacatccaaacgctattgcaaacatctctttctccgtcgtgggataatttagttgagaatcattcagggttccactagcatagtagattgtatagaacaccctatcaacccgttgacccaagaccactccgattgcgtagtcacttgcatcacacatcaactcgaagggaaactcccaatttggtgaagtgactattggtgatgaaattaatttctccttaagaattcggaatgccttcatacattcttccccaaactcaaaaggaaccccattaacaagtagattggacaacgattttgagatctttgagaagtccttaataaatcttcggtagaactagcatgacccaggaaacttcttactcctttcacagacactggaggcggtaaattctctattgttgacaccttggctttatccacctcaatacctgcctttgagatcttgtgtcccaaaactatcccttctgttaccataaagtggcacttctcccagtttaggaccaagtttgactcttcacatctgattaacaccttctccaaattctctaggcaatgatcgaatgaacaaccaaagactgagaaatcatccataaagatcctccaatcagtaaccgttattgtgggaatcaattcgttctttttggacctaatagaatcttgcatagagatctttatggatgatttctcagtcttattgtgcaatagccttattgtgcgctcgaagtactctaagcaacctatcagactccacaccagaaagtgaagctgacactatcactggaagcttcttatcttctcccaagacctcatatcatagatgattaggaagcaccttcaactatagctccggaggtttctctgtagatggcacaagctccctcggcacaacccccaactctttataatacttcttattcagtggtccataagaatcgagccatttatcatactcccttacctccagcccttcttgctcagtcaaatcatcctcaattaagctcagttctaaaggatcatctatcaactttttcttttccacaatggtatcgatcaaatcaataaagaaacagttatcacttgcctttgggaaagtcatcgcctttagcacattgaacaccacttcttccccttgcactcgcagcttcaattcacccttctaaacatcaatcaacgcttggccagttgccaagaatgg

SEQ ID NO: 335354 - DNA, 504 bp, Cannabis indica
ttcaacctttactcattttaacaacaggaaggcatcaggccaccattagatcactatcagaccaccatcgaacctgacaaaaaattagttttttgcccaaaactcagatctggccattgtcgaccctatctaacatctacttacaaataacaaatatttatcataaattttattcctttgataacactgccgatggtgaagccgtggttgatgaaataatcgttgggtctgcggtggtcattgggtctgtgggtccttgggtcaatggttgtggtggtcgtggagagaaggaaccaatgttgtgggtggtaagttgtgggtttgagtccttggagtgagttcagagagcaagagagataagggaggaagagagagggttaagtatttgaaatgggaagggtagaattgagctttataaaatgttagcctactttactaatataagttaacttaaatttaggaaaataattttaatctaataaatgcatataaatttaaattttc

SEQ ID NO: 335355 - DNA, 1037 bp, Cannabis indica
acagcttcacaaaagttttactccagaatatgtcaataagtagtatttaaaaaaataactaacaaacttttctagcaagatgcaaatcttgaatcaaatcaagtacactatattgagaaaatgtctttataataagattatgtatttcaatatatgtttgagataatcttaaagttagcatgaagaaaataatgtgagagtgatggttcaactatattgtgtttagaagagattttgtctagacatatgatgtgagaaagaaaaatatactcaataatttttaaataaataaataaattcaaagtaatatcatttcaaagtactttggtaaattatggtcaagtaaaaatttgataaatctttcaaactgtaaaaaatttagtaagaataacatctagctagggagactatttacttatcgagaataattgtagagtatgttatgttttaatgtttagagttattcactcacatcaaaacacgtatttttcttcaaaaataaaaatagaaattactttaaggaggttttattttttgagaattttaaggaattgttctcatgcaattacaatgttttaaattattatttttattgtattaataattttttttctattatattttaaagagtaactgcgcgaagagcaagtatatgttacctagtaagaataatatattggaaaaattactggtatgtactcccttacaaaattttattatgttgagtggttaataaaaacggcatgatgttaagttttagaaaatattgagtattgatttcttgtattgctttatatagaatctcaaaacaagcataagatgcagcctcaatttaccacagactacagtgagatgacatgggaaccgccacctatgagaactctcaagctaaatgttgatggtgcagtttctagccgctggaataaaacagggaggtgggctctagttcgtgactcgactggaagagtaattgcagcgagggccttcaatcgtacgggatagatgcaacccacactacaacattaaggaccaatagc

SEQ ID NO: 335356 - DNA, 918 bp, Cannabis indica
catggatcagggatggagaggtagtactaccatttgtcaaaactaccactttagaggaaaagcagcatgaactctactgtcacttccatcgaacgattaattacccaaccatgggatgctacgctctgaggaaaaaacttcatgagcgattagcaaaaggggaaattatcttagatcaaaattaagtggaagaaatgtcgtttccccaacatcacaacggaggagctgctatgacatgcacaaaagagtttcccctcatttcaatagggatatcatggggcatacatatcgaggaaattatagaagaaccaccaaaaccagacggcatggtagatttattattaaaaactaaattgtttcgtaacttctttgattgcttagaatttgggaaagatgcaagaactgaggctacagaagtttcgcgtaaaatttcccaacaacacggcccttcttgttatatggtggggcgcccaatgcataatattgctaaaaaatctgaaggagcaattgttttcaccaatgctgacaaacaaacgcctcctttccttcacaatcgaccgttatatgtcgaggcaaagatcaatggcctgaaaattaaacatgttttggtagataatggagcttcaataaatctcatgccacttggaatatattctgctataaaagaagtaagagggggttcatcccgcaattaatcactcactggatttgctgctaagtctgaaaaaaccatggggcatgtaactgttgaactagaggttggaccaatcagaggacccactcggttccatgtgatagaagcagacacttcataccatctcttgttaagacgacagtggattcatacacatcattgtgtaccatcgacattgcaccaatgcgtcaaggcgcacattcagggaaaagatgttcatatca

SEQ ID NO: 335357 - DNA, 931 bp, Cannabis indica
gggcaaaatggtcatttgaccatgattgatttacattgaattaagtggattttgaagggaaatgaattgtattttctggttgcttctcctctcaaccgaaccctctccttctcttttaccccttttgattttcaaagcttaaatttgtgaagaattagtttgatttgaagcttgttggttgagagaaaggtgttggaggcttgaggcttaattgtgcaagtgattgaggtagtttttatggttttagattgtgtttcccttgctaaaataatatggtaaaagcatgctttaggttgtcgatcttgatttttttgcatgcttaatgaatttgatgcttaatcttgttaatttcttgatttgagttgaattgagcttagagaattattcttggatgcttgtgaagcttgaaattgattatttgtttactatttgtggttggttgctgctggaaaatatgtatgagtgttgggttttagctcaatgttcttgagcttgagtgtagcaagtttgaagcatgagtttgtgtgtcatgcaatctgaaatcttgggtttattgatggaaattgatgtttgaaacatgagttttatttctttgttaattgttagcatcaatatttggtaacttgaatgtttggttgagttttgggatggaaaatattggattttgttactgaaaaatcgtgtagagctgctggctttttgggttctgcacgcccgctcctttgagtggacctgggaattggtcccaggtgccgcggcatggtctgggcatgccgcggcccgccgtcgtgtttttgggcagttttgagttgatttttgatagtttgtaacttttgattctgaactccgattcgggagttgcttatatcgttggaaagctcgttccgaactctgtatgattatctgaattttaaatgccatgcttgaattt

SEQ ID NO: 335358 - DNA, 620 bp, Cannabis indica
tttaattgttgttgttgtgttgttgtcaggttgctgcacatgtgaaaatactgagtgattgtcactttctgtcattatcacattgttgcactccattgtttgggtagcttccaaaaaggattgtataaaacaacaaacttttgtcatccttaatttagagtggttggctaagaagcaactaggattttgaagtatggtaaataaaatatgttcatgtcaaaataatatttttgaaactgattccctcattggagcagataaaagttgtttcgctgttgttgtcaagttgttgtacatctgagtgcactaagtgattgtcacttactgtcattatcacattatggcacactattgtttgggtagttgccaaaaagaattgtgtttctgtgttgttgaatgtgttcacacacaatggatactgcatgaaatcagtttctttggttaatagctttatgtaaaacaacagacttttgttatccttgatttggagtggttggcagccttccttcagttggtatttcagttgtatttgagttatttcatggtttcattgtagtttctccatcattatatgcactagtttagcaaaagtgcaatctcttgatattaattcttcactt

SEQ ID NO: 335359 - DNA, 1435 bp, Cannabis indica
ttattaaaataaaacaaggcttgctcaagtgcctccggtcgactcctcggtttcctggcacgagctttgagcgcgtgagggtgtatttaatgatagcctttaatgcagcgattcactttttgcagaggtcgattcgtttcacgcccattgattgatacggcgcattaatggtgtcagacggatactcaaacgtttccaccgccttaattacgaatcaatccaaccgttgatctttgggaattcgaatcgtgcgtctccccaaccgttcgattggtaggtgatagtgcctgttcctcatgcatttttgcctataaaagccaccacctttccttcatttcggttacttcccatttcttgccaactttgctcgagtttcctagagagaaaaaatcctcagaccaagagaacaccttcgaacactttacaaatttcccagttaaccttcattcaccactgtcaatctacctttcctttgtttgatcgacaacagaacccccagtttcaacacttcactgtaagtttctcgcatcccttgctttactgttagtgtacacagcatgctttacttatctgtttgttgtttttctgggtttggtatctgaagtttctgggatgcattcttttggatttttcacgtaacaggtctagattcaccatttccggtgttagggttactcttgtcatgtatttgtcgttatttttacaaaggaccatacactctttgtgtactggtcttctagggcatagagaagactttgtttttctcgattttcggccctttcgttttcttttacgcgcgatgttgccttctgtgagttctttgcacccgacttttgtccaggaaatccttctagggttttctgattgacagatgtccggagggggctaactgctggaatcttaactctttttacgaaatcaaaatatgtttgcgtccggttgaaagtcgtccaagaagagtggtaagcgtctggctacccttgaagacgtctcactgggtcctgttgcccaggaggggtataagtctcgggttacacgatgggaggcggcagagcttcactccaccctaacctgcccccaccagttggagaacatcgtggaggtggctggaatcaaaccctcaacatccggaatgtaccaccggccgccccgatatgcggagacgcccaaccacaactatggcggcttaagggcttagagccagacgcacctgatggtcggggccatgcttcctcttcaagactactttattaattttttagttttgtcggccttgcgccataccaactgattccacaagcataccgcctgctctcaggcttaattattttttactccgcccggggatggggctctcccagtccggcggagattttgtatttttatgaacttgtttctgtccccaagaagggggacaaatttaaagacggttttt

SEQ ID NO: 335360 - DNA, 1031 bp, Cannabis indica
tgcctcaaatatgtctgtggtgtgtctagttgaggtctcaatgcaaattttgacccattttcactaagatggtcctaaaaaatgaaatccaagttgggaatgtcaacttgaacgctaggtgaaaccctaggtgtccaaggtttctttcgggtcgcaggttcatgtaattttagctcacggggcttgaatttgattgcgccatgtctccatggtacaaaatactaaaaaaaaggtgagttggattcaagttattgaagtccgaacttccatcatggagctcctgaagtcaacttgggttcagggctagggtcccctcccaagttgactgctatgactcgggtctactcaactccgtgacgtcatccttcttgccatgtgtcaaacattaatatccatgtcaccaagaaaaattttaaggttcataatattcttctctaaaataataaaagaaattatttatttttttttgctgaatttaaaaaacaaaattgtgaagatgaattatttttattattgttattttttttttctcaaaaagtttaattattgttgttaggttgttttcagtattatttttaggttagtttttagtgtgttttgaatttaattctacttttgcttggaacaatttgggaggaaataaatagcagaatacgaagtacgaatttcagagatcaactgcaatactagaggcattctttggagggttttcatcattcttttcttctctattttcttcttttttcttaagttaatatgtgtgattttgcttccataaacatggttagctaaacacttaattagggtttagatggaggttatttgacattgttttatggttttaatatgatttattttcccccaatttctatgtattctatttcattcgtacttaattacttttaattgcctggccatcaattaactgtttatgatttcgatgcgagatctgagaagtgagtgtcgattatggtatagtaaaatagaactgaatttcaatataggacgagagtacctatatggtttagata

SEQ ID NO: 335361 - DNA, 558 bp, Cannabis indica
cttcttcttctcctccggcttccgagcggtggagcacccggagcttctcacagagtgggtcaggattcctccctatgagcggaccgcgcctactcaggtctttctccagagggcccaggtctttgcaacttacgaccgggcggaacttgacgtcgggggcctagtcacgacggagaattgccggaaggccaagctcatcctgccgcaccaatcagtggaggactctaacctttctaaggttatttgtccgaatgtgagggtgcctgccgcggagaagaccttccgggacgaaatcatcgccaccgccgagaagaagtaccaggaatatctctaccggaaggcccaggagaaggcttattccaaggcccaggcagcttccgggaggccccttcgcgtggggagcccggtcgagaggagaagccaggcgatcgctgggaagccccttcgcattggggactcggctgagaggagggctcccaggccgaagccttcgattcaggagccgaacactggggctcctggcgccagcacttccggctcgggtaagtctcctttagc

SEQ ID NO: 335362 - DNA, 1000 bp, Cannabis indica
catgtcaataacatacagtcatgaggcactcagtagcgtcatgacccaccaggcgcataggtagacaaccgcaactctgccaaaacttctagtggtaaaagcactagaaacaagcatggcaccaatagctctgggaggaaaatggaaaaaagcggaagttaaacacttctcccatgccacaaaagaacaaggaggagaagtacacttgcctcaccctcctaacagagaagcatgagaccaacttcatggccactcagggaatggtcccataacgaaagccttttccaatcagaagggagatgggcaagagggacatgtcgaagctctgcagatatcacaatgacttcgggcacgacactaatgagtgtcaaaatgttaagagggagattgagtacctgataaggcattacaatccccacctgtgtcgttatgtgtaagatagccaaccccaagtgcacggaagccaaaatggagattcgatgccaccacacgtagctggacatctaggggtcataataggcgaaccccacattgctagcaaaattagcaaagttagggagtgctatgctcagacactgcgtcatgaacccaaaggcaaagtcttagctatcgaagaccagagctctaagcaagagaagcttatagatcccatgatctcctttatcgaggaaggtttagcactagtcagtttctcgcataatgatcccctagttattactataaaaatcaggaatatgaccgtggcaagatgtatggtggacaatggagcctcctctaatattctcttcaaatcaaaatttgaaaagatagagctctaactcaccgacctggcaccttgcaaccaagtgatgtatggattttttggcaaaggcatcgcacctgttgggtatattagataacccctcatagatggagaaagtctaacaacatgaacattggtggtgcagttcttcgtgatcgacgttcccttggatttcaatgcaatgattggctgaccggc

SEQ ID NO: 335363 - DNA, 1776 bp, Cannabis indica
cgtgtagcagtcccaacacgcttcctcccatgcgccatttaatgcgacttgattgctcaggagaaaactgacacctcgcggagatgccttaacgttactcgagcttccgggagcatatggagttccatatgccttctccgggagctacgtcctggacgctaccttatggcatagacttagcaaatattgtaaattgcttgatccacgtgtccttatctggttggtccacgtatattgggcaaaatcaggggcaacactagtcattataggcgtttcctacaagaaataactgagggtaaatgtcattacttgggagatggagcctggcctgaacctttgtcattatcttctattcctttggctaaacccttatttttacccagagtcacaattgcttttttcaccaggtgacctagattttgaaattatgtcttccaagcatcataagtcaaagactccccaggatcctaatgtcactttcgaggctgagctcattgagtcaagaataagagctataggggactatgttggtggtgttttaaggacttgtggcatcaaccaaaagcaagggttccgtgttagatctgttgcatctggtgaattcagttgttatccaccagaacgacttatccgtgaggatcgtagggagtccagtgatgaagccagtactagtagctcggttgggataggcgcttagagcatctagcatatcaaggcttgagcaaatctccccctgagagattattttaaagagttcatcaaccatcttagaattgctcatttccaattggttcctatttcctacagaatccttgcaagtctaaaggttttgtatcatattttaggatgggagtgtcccactccccaggaaattatttatctttattctgttaaggcagttcctgcgaggaagcattgtggaggggggcttttactatcttgggactcatacaaatgatcgtaggatcatcataggattaccaaacaagaccgcttttaaggaggatttcttctggacaatttgtctttccccaattaacatgactgcatttcacattatacgtatgtaaaccttatctcaaaaacttagttttgagttatttcatatttgtaacctttgcctcgctgacttatcttatttattatgttgatagcagtctcaaaaaggccatcccactcttgagatggccaagaggtgtaaagctttgctgggtctcccattcgaactgcgatcggctgagtttctgttgaatgaagccaatctgaagactgttggccttctcacttcggacgagcatacttgtaattacaaatttcttaagtatacattgtgggagaaggttgtagttccagctgacgaggagagtcaagattatgtggctcgggtgcattatctcaagaatgtaacccctcgggaagctaaagaagatgcatcctgaggtagtcaatgtggatggtctcccactgttcttagggcaagacgtactttgttagtaactttcaacaatggtcggtataacttttacatttggaactccttcctcattgattgtattacccatatgtttgatagttggtatccacaattccatgttcaacttagttgcactagttcttactatgggattgccgagcagaatgggactaaattggatagagcgagccatctagattcaaattgggaattagatccaattaacccctatgacatattcatgatcataggatctagggagtttagtgaatctatagtcctccttcttcatcatctgatga

SEQ ID NO: 335364 - DNA, 2254 bp, Cannabis indica
aattaattttctcttaaatttttgaaacaattacaaataataaataaatagaaaaagtaaaaaaaaataagtttctgcataaaaattaactattttcattaaaaatccaaaacagaaaaaattaaagtaaacataaaatatttataagaaatattattatactgaagtattgtcatacaggattccacataaattttactataaaaattacttatgattttgaaaaatttttaaatatataactgtctaactaattaattacttcatccatttcaacaatagggatatatttaattcaagtttagagaataattaaattatgaaatatacatatctcaaaaactttttatgtataaccaatacatgtaaaaattattaactaaataaattgataaaaaataaaatactaataaaaataatgatttataaataatatgaataagacaaaaataaaaagaacaaaaaaaaaaacttagagcaatctcaatggagatacaaattaataagtgatgaaaagaggcaatgggctcacggaggccactaaattcacgaacaacgcgttcaacatgatcaacacgttcaagaagaagccaacgtgatgatgatcaaaacctaaaaactgggaatgaggaacccaacacaaatgctagcagttccacgcttatgagttatggtgcctatgaccccactagatacgtaccgttgtcgaaagggaggtagccgcagccagggcgacacaagaaaacaacacaaagaactaacgttatcttggagtgagaaggccacgaggtagacctcggggctcgagaaccaggagggagcagacggcccaggaaaaccccaagaacatttaggaggagcaacctggggaaacttgggatgttcctgaagatgaacagccagatgaccaagcacatcgtcaagaggtgcctcgaagaccccagggattcacaaccgaggggaatgtaaacaatgatttaccagagtcttctcgtagaaacgagaacataagataacctaggactagggaacaggaaatccctcgtggtaacgagagaaatcctgggactcaacctaggacaagtgggttgccacggagacactgccaacgtccttctcgcactgatagggaggaggcgtatacataccccaacaggggacatgtatcaaacctttcccaaaggagaagaccagtacatggcgaggccagttctagctcaggacgtaccatatctcgagatcacagtcgatctacacgatgtagtcatgatcgagaaagcatgagtcatacaaggagtagccaatctgagagttactcaggcataacgtcaaaaagtaactatgatcgaagacggccagatcttcgtgagcaattgaattagaagaagcacgatttacacaaacaactcaattccatcaaatagcaggaagatctaatccaattgccaatcagcgagctggaaaacaaatttaaaaaataccaagatgggaactgcatgattatgactccgacgaggagctcgaacctttccatcctaatattatgagtgctaaatttccccagggatttaagaaccctcacgtctcgtcatacgatgggactacaaatctggtcgctcacctcaataactttaatacaataatgcaagccaacaatgtcatgaataacttatattgtattttattccccacctcgatgactggggcagtgagaagctggttcaataaattcacccatcattatattacctcttggaataattgtctaaagatttcaagaaacaattttaggcagtgagagataggcgacctgaagcgtcttccctcactaacgtaaagcagcaaccaggcaagtcacacaaggcatacttgagttgatttagtacagctgctgctagagttaaaaacttgaatgacattatacagcttattgctcttagagcaaggactatgactgatctctcgacagctgggggcgagttgtgggatgacttacaaggttgccctgtaaaaaaacattagtgagttcaatgaaagagcttaagtgttaatgcgaaaagaggaagtaagaaatgagatgaaattgataaagactggctctggaagtaaactcgacactgtctcggcaagtaccgtctcagcaaaggctggcaatctaggaggctctagcactaagagaaaaaacgactctaaggaatcagccaaggataagaaaaaacaaaagaagcacgataagtacatgccaatttacact

SEQ ID NO: 335365 - DNA, 1910 bp, Cannabis indica
ttaacacgataatgcgagcgagtaacatgaagaacaatttacattgtattttgtttcccgcctcgtttcgttggtagcagtgagtagtctagtttaacaagtttactcttattcaataacttcctaggagcagctgttcagggatttcaagaagcaatttcaggccgctagggataagcgacatgaagccaccttgctaaccaatataaagcagcagcctagcaaaacacttaaggcgtacttaagtctttttagcacggctgtcactagggttataaatttggatgacagcacgcaacttacagaccttcaagcgtggatctccactgatccattaatcgtcggggggcgaattgtgggattatatacaaggacgttcggtaagaagcatcacttagtttaatgagagggctcaggtgtttgtccgaaaggaagaagcccgaaacgaaatgaaccagttgaaaacaagctcgggaggtaaacccaacaatgtttcaacaggaactgcttccacgagaattgataactcgggggcttttggtccgaaaagaaaggacgaaattagggaactgtcaaaggatagaaagaaacaaaagaagcatgaaaaatacgtggcagtgtatactatttatattgagcttaatgaaactcaggaaaatatttacctcgcacatgagcagaaggtagctttcggcaaacccgagcctatgaggaattcgaggaggaaaagagatcctaacaaatattgtaaattcaacaaagatattgggaatacgaacgacgaatgttgccaattgaaagatgagatagagagtctcatcgctagaggctattttaaacagtatgtgaagagaccgggcaagggatacaacttgcccagtcagtctaataacagattcaaccaggggttacaacctattcctatggaagtagaggatatcctggttattttgggagggccacatatcttaggggaaagcaataacgcccagaaaagatatgtgaaggagataaagaatgagcagtcggtctttgccccagaaccttccaagaaggtgaaaaccgaggaacccccaatacattcacataagaagacgagaagaatgtgagataccctcacgtcaatccgctggtcataaccattcaacttgccaataagaggatcaagagagtgttaataaacaatgggagctcgttaaatatcatttataaggagactctaaagcaaatggggctcaaaaatgccaaattaaggccttgtacggtgaatctttgtggattcaccggagatagcatctctagccttggcataatcgagctcgcattaactttaggcgaggcacccctaactgctactgttatggaagacttcctggttgtcgacctaccctcggcttacaacatattgttgggtcgcccaccacttattggactaggggcagtcagttcgatcaagcacctatctttaaacttccaaacatcagatggcgtgggagtggtgcgtagcgaccagatgttggctcgcgattgctatcacatagagctgcaacatagaaaggccagtcatcagttaatgacgatcttggtaggagaaaacgagaagaaagatgaagatcttgatccgcgaatttaagatgatggaaacctgctaaaactaattgaagaattggaagaggttattctcgacccaagaaatcccaaaaaatgtgtgtatgttgggaagaacctggacgagcagctcaaaagcaattaaaaagctttttgaaggcgaaccaggatcaattcgcctggagtcatgggaatatgatagggatccaccctaagattatctgccatcacttaaatgttgatccaaattacccggcgaagagacaaaaaaggaggcccctggatttcgagaggcaaggggc

SEQ ID NO: 335366 - DNA, 2434 bp, Cannabis indica
ttacacacataaaattttaaacttttttactttttactgtaggacagaattttttataaaaaatactgtgtaagttttatactatgtacagtgttaagttttcacagttgttccacggttgttttttagttgttccaccattattttaattgttctgttttgttgttttacagttgttttataaaaaggcagtatttttgtaaaaaattctgccccacggtaaaattgtaaatttttgtccaatatccagtatttttgtaatcactcctaaaatttaccaagtaaattttctaacttattaatttctcctaacaccactaaagatttagaattgcactcttaattacatagaacgctctattaccaaaaatagatgcaatttgaattacccattgtttcaatccaattagtcaaagatcctctatagataatctacatacagtaaggacaaatttactattctacccttcaatgtattttatccttgaaacacttaactaattgtaaatgatatttcaataaactaatataaacactgaaatgagggctcaatcatttatcgcattaagcaaagctcaaagaaaatcatcgtgtcacttctaatagttatatatgttatagatttcagatctacagttagcgttccaacttaattatactactatgttgccaagatgtaagtattgagccgatccaattggtcagcttttactgaacaagtcaaagaacacaaataatacatttaagccaaaacctaaccatctcaggattaagatctattgacctaagatcaactaagtgatattgatccagaatgatataatggtaagtttatgatatcttatctaatgttaatatcggtccactctgatgtatactccatatatcgatactagcacactttgccaataccctagaaaggacataccaattatcccaggtgtaagaaaactttatcgctgattatcatgttagtgtaaatctagtgtactaacaagtcattggacttaaacattaaaagatataatcatgattattttccactgtgtatgcaacactataatcatgaataactatatgttttggatttaaaagaattcatatattaaagatataatcatgaaagaaatcatgtgaaccatgcaacataaaatgatatctaatcttttttataattagtaaatctgatgatattgaaatgaattttatatagggtgaaaaatcccaacaaacacccacttgcactaatataaaactaaaagtgtatttcaattaatctcaacaccttgatatctagatcaagtgtagtatgtagtataatctttgtaataggatcggacaggttgtatctatacaacttttaccaccattacatctccttagtcacaaaatccttgatattatgaaattcctttttatatgtttactcctcttaaggtactggattctttactgtttggcaactatgtatgtgttacctagtacccttctgggccactttatcattcaatctcactggtagagttagagactctagataggtttttacacttctccaaaaatcactactccatccctaaagtaatcaccatctcataattagactttctagcattaacacaaatctaaaaacctgatttggtgtagcctaagagtattaaaataccacccttattgattaacatatagttcctcttttgatattaagatttatttgattgtcttccaatgttcctttcatggattaaattaatacttactcataactcccacccaacagtaggtgtctggtctaatgcatacaagatcatacatgagacctctcattcttgatgcttaaggaattcttttgttggcctttaacttttctagaatagttgaaactgttccttagataaaatctatgtctaatagccaaaagacttcctttagagttagccattagaaaaatgctctagcatcttactaaagtaagttacctgcactagagtaagtaaattacaaggtataccacaacccataggcttagataatcccaaacctatgatacaaggatcgagaagttttgttaactccgttgaatagacttattatagaaatttcccttcttatccttgtaatagaaaacttttggttactccatatgaatggttttaaccatagttcacttggcattgcttcttcgttccttattctgaatatccattacttgtcaactaaaagtagatttttatcacaagtgtcttccaagtaataacaggctgggttccttgaaaccctcccactacgacgagataccgtgactttctatctaggaacattagtggtattaacctcatcggttgtgtcaatataatagaggcggtgagaccatcttatatagaataagatgataaaacactttagaatagaaaaaaaatatctactctacttt

SEQ ID NO: 335367 - DNA, 513 bp, Cannabis indica
taacctgccagcaaatcaaaggttaaacatcagagaccggcagggttattacaaccattagcaatttctttgtggaagtgggaggacattgcaatagattttgtggttggtttgcctagaaccacgggaatgtatgattcagtatgggtcatagtagatcgattcacaaagtcaactcattttctgccagtggaaattacatacatagttgatcagtacgctgaactgtatgtaaaggagatattcgtctccatggagctcctaaatctattatttcagatagggatccaaaatttacatcgaaatttttggtaagtcttcaaagggctatgggtacaaagctgatgtttagtataatttttcaccctcaggctgatgcagtggcggacccagaatttaaagtgagggggggcgtaaataaaattaaaaagaaaatataaagtgtagttagtgggatttgaacctttaccctctaacctatttacgaactaccttaaccattacaccaaggtt

SEQ ID NO: 335368 - DNA, 830 bp, Cannabis indica
caactagcgctgcaactatttagaaacctttattacatctagcgctgcaacctaaattgcaacaaaaaatcgtatagaaatccttattgctatttaaaaactcaaaccgtaaatttgaacaacaaaaaaatgttaaaaaatttataattttcctatttattaacataattttagccttttttctctcttgaaattctagtagttaaattaccatacatttttatatactagagagaacaaggtttaaattccaactaaatatttttgtttttaatatttaaagtttacttttaaaaaatagacgactattactcctaacaataaaacatgcagttagtactttaagcattgaaatatcaaatcctttatttttcttttttttttctacttcaaaaatatttaatattataaaaatataaatttatattaatttttgaagtattatattatgtagaaaataaacacgcctctgttacactatgaaaaaaataatataaggacttattagaaatttattagtaattgtaagtggtgtgtataacttataaattaatatgtaattgattaatgaatatgaaatgaaaaaataaaactttagttcaatagaagattgacattgccacaaatagtgcattttggagatttttcatgtctcgaagaagcagggctggccctgagttttagtgggccatagaaaaaaaatttattgtgggcccttatttagaaaaaaatatagtatttttcaaaatcagtaaaaaaaatggtataattttaaaaggtaaatatttttttttggcccctgagataggtgggccctaggcacaggccta

SEQ ID NO: 335369 - DNA, 1244 bp, Cannabis indica
ttgatctatgtgtttattgatgactgtttgatgtttgcaaatgttttttacgtaacataattagaattttactctggaattattttttttggatagtatggaaaaaattaagcaattcactcttttacagaactttattttgattttatttgaattagttatgaattttttgaaaattggaaaaatcgtaggggtggtgacaccccatgcgctcacggacaacacgtgacaaacgggtgtcacgcacattcagacacgggcatgtctgaaggaatgtgcccaggcagtctgaattgtcccatttcacatgcagacaagctgcacgcaacctccttggtcgaggtttctcggccagtctcctatgtgtgcgcgcacggatggtatataatgcatactatccgtaccaaatctaatttcccttttttcattttttcatggttcttcatggaatgaacttcaaattttttgtgtaattttgtatttagatttttatttttcatgtttcaaatctaattatcagaattaaagtaaataatttttttaattaatttgagatatcagtagtttttgaacctgaaaatagataaaatctattatttttctttatcttattttaaaatttaaggttatatatttaatattttgtattatttaattatttatttaaaattaaaaataagattatttgaatctagaaatttaaattgtaaccagatattttgctagctttcattttattttatttaatatttaattttattttaataacataaaatttgaaaagttgttagcatttttttgaaatagatatttaggttcgttgaaaacctaattttccaaatttttagatttaattttgaaattaattatttaatttaaatttaatattttttgaaaatgatttttttaattagaatttttgaaaataatttaattatttaattaattaaatttaaataaaggaattattacatagaaaatataaattgatattttattttaaaaaatacctccagaaggtaaagacaacatttataccttttatgtaattttaattactaaaataccacttacactatcatcacttacacattagacgatggttgcagggtggttgctgcgtgattgcacggtggttgcaacagacgaatcatacgatggttgcagggtggttgttaggcggttggccgaaggttgcaccaaactgttgggttttgggccctaaataaaaccctttacaatct

SEQ ID NO: 335370 - DNA, 516 bp, Cannabis indica
gaacaagactttcacacgttagccaacgacctccacacatatgaaaatttgattggaggaccgcagaagaaggggcctaaagctcataattctggaaatggtaatggggcgactaaggctgaggcaaactttgccctacttccaaacccaagaacaagaagaagtggaagaatagcaaaaagcctgttcaagctgtgaaaatagttaaaaagaaaaaggctgctaccactggtgatacaccaaaagaaaaaatgcttctattgcaatgaagagggacattggaaaccccactgccctaaatttctagcaaagaaacaaggtatttcttttcctataaactgatgtgttttagtgaattattatccacttggattattaattttggacctactaaccatgtttatttgtttttcttcttatttcagctccagctgcttgaactcagatgctatctaagcgagttgaatcggatggttggacagaagggttgagatagtccaagatgaaaatgaagct

SEQ ID NO: 335371 - DNA, 761 bp, Cannabis indica
atattgttggtcgtaataaaacggccttacttgggttcttgaaggataaaatgcgtaaaaggattaaaggttgggaatgaagattgctttctagagcagggaaggagttgctaataaaagttgtggctcaatctcttcctagttatgcaatgaatgtgttttttctacctgtggaaacttgcaatgagatggagcaattgatgtgtaagttcttgtggcgatcgtcgaagaacaacaaggaatccattgaaaaaagtgggatagattgacggtacataagtctaaaggtggtatgggattttgcaacttgcatgacttcaacttgagtttgctttgtaaacaaggatggagattgtttagtcgtccggactcacttgtcaacaagatttttaaagctatgtactaccataatggtaccttcttaaatgttgagttggggagcaatctaagtttcgtgtggcgaagtatttatgaaactcgagagatcgttcgaaaaggggcgagatgcaaagttggtgatgattctcgaattaatatagtgttggatctgtggctaccgaatgaagataatccaagagtaacttcgaataatcctgctattattgatcaaaatgttaaagcacttacggaaattgatatgttggcttaggatgttgacttggtgcatgatatgtttaataaaagggatgctaacttaattcttagtattttcttgtcttcaaatcgtttatgtgatgtttggtatgttgggttttatgccc

SEQ ID NO: 335372 - DNA, 768 bp, Cannabis indica
aattggcccgtattcctaattctttcaaatctaggcgagatttaattccatctttactccgcccgggaatattgaacaaggtattaagcaagctgtctgacacattcttctcaatatgcatcacgtctagattatgacgcaacgccaaatgcttccaatattcgagctcaaaaaatattgacttctttttccatggcccctgatgttcacttgcagcaacgtcacttttctcacgctgaccttttcttttcttcgaagtcaattttcgctttccaaggtggaattgaactttattcaacttttctaacaattcttctccttgcaaaggtgacggcggcatttctaattcttgcttaccatcgaatgcttttttccaagtcctaaatacatgtcctgtaggcaaaaactttcggtgtcccatataactcattttcttcgagtgttttaaccacatagaacatgttctctcctcacaaatcgggcatgcattgtaccctttcacactgtatccagaaagatttccaaaagctggaaaatcatttatggtccacagtaatatagccttaagattaaagtcttcattcctaaaggcatcgtatgcaggaacaccctcataccataattgactcaaatcatcaactagaggagctaaatacacatcaatgttattaccaggctgtgaagggccagatatcaacaatgtgagcatagtgaactttctcttcattaccaaccaaggcggtaaattatacatcacaagcaaaactg

SEQ ID NO: 335373 - DNA, 576 bp, Cannabis indica
ggagcccacgtgtataactctctttaggataggtcttgatattatttgaaaatttaaattgcttattctatacacacgtgaggatcactactattatttttacttttacaaattaaataaaatgacacaatgcttcttaattacacactactatcacttaataataattctaatgattttgtaaaacttttcattaatgtcttggccaaaaatatgggtcattatgctatatttaactgctaaaaatactatagtctaattctccaatatacaattatatttgactttaaaatgagataataatactcatatccttatcattttagagagttacacaaatattgcatatttcttaaaaaaaataatactctattcacgaatgtaaattattctatgaaatcattatatccacatcgagatttctagactagaaaataataaccaagtattttggttattacaaatgcatactaaagcatatctgagacatatcactgttgatcctaaggaattctttcattggcctttatcttttctagaatagttaaaactttttcttagataaataagatctat

SEQ ID NO: 335374 - DNA, 537 bp, Cannabis indica
acgattataacaataatatcagttttcaaaaaaaaaaaaaattgggttgttatgcaacaaaaataaatagtagaatattgtaaagaaatgtgaattgtatttatttatatatatatataataaaataattaataattgaagactaataaatgaaaaaagataaaattaaataagaaagttaaagtgggtatcaaaatccgtaagaaataaaaagtttagtaaatttaaatgaaataaaagatttaatgtggagaataaatattttaaataaaaatcactctcttctccaaaaattgaaatggttcatcagactggttcccaggtaagaagcttcctcttcgtcttttacttttacttttaggtttgattgaatgtgattttgaattccctgcgatgtgattctgggttttttttatcttaatttcgaaacaaagttctggaaatagagaagtttagcgttgtgtttgttagccgagaaaattgttagaggaattttgcataatgcttttatacacttttatacactatagatataag

SEQ ID NO: 335375 - DNA, 487 bp, Cannabis indica
acttcctcttgctcgtgctgcgctgttctggcatacctctcccaagctttgcccgaatctctagcaatatgagggcctccaacaatgacttgcaaatgtccatctaccggtggaggtagtaaatctaggttattttcgttcctctgaccctgatcggtcttgacatacttctacaagtgtgggttgtttttccttatcaagaattcaatttttcgcttccggttgttgcattcattagtgtcgtggccgtagtttccgtggaatcgacaaaactttgtcatgtctctcttgctgacatctttcttcatgggcccggacttcatatatggggccaaggtgttagttgccatgtaaacactttctatgtcttcagtcaagatagtgaatgcagtctactttgcttgattctcccaagagcttgttcggatttgccggcgaactttcccttcttcccactcccttgcttgtggttgttgttgggctgttt

SEQ ID NO: 335376 - DNA, 1517 bp, Cannabis indica
ttttgacagcttcatcagagtgcagaagtacactcgtagccaatttgatcattgtgtatacttccataaactccaagatggtacttttatttatttgctcttatatgttgatgatatgttaattgcatctaatagcgaggtggacattgctaggctaaagactcagctaagttcagaatttgaaatgaaatatcttggagaagctaagaagattcttgggatggagatcacaagaaacagagttgcaagcatagtctgtctgacacaaactcagtatctgaacaaagtattgcaaaggtttgacatggacgagaagactaaacatgtcagtacaccactcgcacctcattttaagttaagtgcaaagatgtcacctagcactaccgatgagaagaagcaaatggaccgtattccatatgcaaatgttgtttgtgccatgtatgcaatggtatgcactagacctgatattttacatgttagtatggtgagtcgctacatgcacaatcccagtaaaggtcactggcaagcaataaattagattctatggtatatctaatggtacctgtattggtttgaagtttgagagaaccaagactggtggtaaacatctagtcggatatgttgattctaactacgctggagatttggataagcgtcatcaactactggttatgtgttcacaatggcaagaggaccagtctgttggagatcgacattacagtcaacgtagctttgtctactacagaggtggaatatatggctgtaatagaagcattcaaagaagctatctggcttcttgggttgaccaaggatttgggtattgctttgagaacgtggagattttctgcgacagtcagagtgccatttgtttggcaaagaaccaagtccattatggtcgcactaagcacattgatgttcgatttcattttattcgtaaaattattgatgaaaggaatgttattttccagaaagtcagaattgtagacaaccctgcagaaatgcttacaaaggtggttacagggatcaagtttcaacactgtttgaacttgattaacatctcttggacttagagcgcctagggcgcatgtggaggcaacattttttggtttggttttttcgccaaggtggagattattgaatttggttcaaaagtcaaattgtattgaagttgcaaatatattgttcaactttcaagagatttggaacttgtcatttgccacatttgtcaatgaagctatgcaatagccattgacttatgctctctcatttatttcatatggttagaactatctctcatctattacatatggttggaactatctctcattaattacatatggttgggtaatgaactacctctcattattatatattgttgggagatgttttccttctataaatatagagctctttgaagagcatttgcaattttcggtgtgaacaatttggtcggtaccatttcggtgtacaacttggtacaatcgggttcattgagagaggagagagagagagagaga

SEQ ID NO: 335377 - DNA, 679 bp, Cannabis indica
ttttttttatttaaagaaatactaattaattaaattttaaataaatattttcattaaaatttttgtgatatattttatgttgaaaatattttgtttgaatttaattttgtttgtgtttgaagaaaaaaataacatttataaagagtggaaaagaaataaaaagatataaaaatgaggtccgaagtatagaaaaatgtcatttttttaatacaatttagcccaaaggagcccagccctgtcggcccaatttctatcttctgggacagccttgccacgtggcaggcccccattcgctcggcaaaagcaccaaagaggccaccagcgcctttgtcccctttgttatcccactcgcacgtgagcgacacggctctgcctgggccttgtgtgctccacacgcgccatgcgcgcaagtggcccttcgtttggtccgagccccttcagcccagccacttttcatatggctttctctcctctcaccacgtgtccacatgcaactaatcagacagtaccacgtggcagctccgaattaagttattttaattgtaaaaatatctattggtaatttgtaataagtttaattgcacattaatcattttacccttctataaatagaaacttaggattttaaaattcagtacagtttcaaagtttcaaacagaaaaattcagagaaaacgctc

SEQ ID NO: 335378 - DNA, 845 bp, Cannabis indica
ttccgctcgttgaatggcttcttcgagcttgatgaaggcttcggcacggtcaagaaatcactcattgagtctaccagcccgttcttccttatatccttccaaagttcaccgagtacttcaatgccctccagtattgcaaacaaatttccatcttcagttacccgtgaaagtttggtcgcctccatcacgaatctgctgatgtatgctcggagaggttcgcctagtctttgcttaacttcgaccaggtctcccagatgcaatggaagttggcaagaggaggagaattttgcatggaattccaaagagaaggctttccatgaattaagctttccagggaccaacttgaaatgccattgctgggcggcatccgacagggtagcaggaaaaattctacaacacacatcctctcatatcccttgcagatcaatttgcatttcaaaatacttgaggtgggaaagaggatcttctcttccagtatgcattttccatgttggcattttaaacttgtgcggcaacacctgaagattgatctcgggagagaaaggagttccgcgtgctcggtctagctcgagagcattgtttatttgtctagccatgccttggaacatattttttagtatctttctgagcgggaatttgagcatgagctccgggctgcacgatcttcgtgacaatctgatcgtctattcctctctttctgttcagatcactccttagggcatgagtcatccctaacctttcgaatacagaagtgtctggctgtcttagcgattgatttgcttggttgataggtggaatggaaccgttaacctggttggaactatcaggtatgacttctcttgatg

SEQ ID NO: 335379 - DNA, 547 bp, Cannabis indica
gacaaaagtccttaaatttaacaatctcaatagttcggggggaatttttaacggccaaaaaagttcagaggcacgatttagtacatgtcaaagttcggggggaaaaattactaattagcatacagtaagacgtatctcatagggatgcctctctgaggagggagccaagacactttgatagcgagcaactacttgtcattttagcttctcaagactaatattgtcttaaccttgatggttatactttctggagtcgagaagatcttcctcacatgcaaaacatcttttagcgggataaacgccttgctgtttgttatcttgacttgccatactatctgtactcagtttgtatatcgcataatatacgctaagtattttttagtgttgtcgatttctcttttacgcagcgaggttgatgcctcgtcatgagcgtatgcactcacatggtttctcgtcaatacataaattatgtatgtttctgtctcccagaaggctattcagccagccgagttataaacctaacttgcgaattatatttccaacgagt

SEQ ID NO: 335380 - DNA, 691 bp, Cannabis indica
gagatgaagctcaacttgtttcgtgtgatgaatttcaatgaggagtccaacaaaaaagccatagtagaaaacttggacctctaggaagaaaggagggacgtaacccaaatgaggttggcagtgtatcaacaaagggcagtgcggtactataatttgagagtctggatgcatgccttcaagaccggagacttggtactaagaaaggtccttctaaatactagggatccaaaagcaggagttttgggagccaattggaaaggtccctatcggatcgctaaagtcatcccacctgggacctacaagtttgcccgcattgatgacacagtggtaccaagggcgtggaaagcagcacacttgaagaaatttcattgttgagaaggcaagtcgtttattattgtttagcccttcaggccaaaaatctaaggagataacctgttggggcactagagtgagattcctctcatctcttcttatccatcttgatattctaatgtaatgaaataaaaggccacccgaatggcatcaaaattgttctctggaatataagaatattatcttggagttagtcaaccacactttgctgcagaacggcaaggcaatgtccgctctcttaaaataatgaatgacgtcaacggaaaatggggaagtaaggtacaaaaatttcttacctggcaaggattagctacccttg

SEQ ID NO: 335381 - DNA, 526 bp, Cannabis indica
agtatgaattatgtgattttatggtaaaggggcaaaatggtctttttgccccattagtgttttgtcttatgtggtttattaaatgggaaaaataaatgtttatttttattatcttggctgaaataatatgttaaatgtgtgaaaaactccttttttccccttatttcaacacttagtcatattttaaagaaattccaaaaatcacactcaagctctctcttcctccctcttttcggcttggtgttggctgctagggcagggattttctcctcaatttcttgtgattttcttctcctctaagtgtaattcaagtgtaggtaagatccttgaaattgtccttctatattttcttgaattttaagtgaaaatggaagaaaatgcatgtgagtttgggagatgttgctgctgtgtttttattgttaatttgtgaagattaaagcatgattattgatgttaattgagctgtgttgaaagcatattagttaggttgttcaagcttgtggtttttatgtgaaaaagctatgaa

SEQ ID NO: 335382 - DNA, 730 bp, Cannabis indica
tcatcaagtggttctcttatttggttttgagatgaatgttgttgatgattgtgtgtatcataagtttagtgggagtaagtgcatatttctggttctatatgtcgatgacatattgcttgccactaacgatataggcttattgcacgaaaccaagagatttctatctaagcattttgagatgaaagatcttggtgacgcctctttagtgttaggaattaaaatacatcgagaccgttctcggggtattcttggattatcacaaaagagctatatcgatactcaaacggtttggcatgcaagactgtaaaccaggtgatgcccctatcgttaaaggagacaaattttgtcttaagcaatgccctaaaggaagccttaaaattcaagaaatgcaaaagattccctacactttgtctgttgggagtctaatgtatgctcaagtttgtacgtgtccggatatagcgtacattgttggagtgttaggcagctacttaagcaatccaggaattgatcactggatagcagccaaaaaggttatgagatatttgaagagaacaagagagtacatgctcacatataggaggtcagatcactttgagattattggatattctgactccgactttgcgggatgccaagatagtaggagatctacctcgggctacatatatctgttaggtggtggagctatatcatggaggagtgcaaaacaaacactcatagcttcatccac

SEQ ID NO: 335383 - DNA, 806 bp, Cannabis indica
aacaaatctaccaaatataaaaattgttacaaatattccttctgctcatctaatttcaaatcaatagataaatctcatttctctttccccataggcccaaccatagccggagggatagcatatctaagaaaagagagtatgtacccttactcttaacttaatttagaagtggctcaaatttacactataggctctatgttaagtatgcttattttatagaaacactttttctccatgacaataatactaaaaattaagggcaggacagcgttaacctctatcgacaaggaaggagctgttctcctttgtcaacgacacaacactacacaaaataattatctttagtaataatattttagtcacaacataaatttcttataactaaatgtaacttttagtcataataaaaagttaaaagttacttgtgactaaaacataatatttaaatgcaaattgtcactaatttaattttagtcacaagcattgtaattaaaaatacatttaattacaataaattataatttttgtaactaatatttttagttacggaccttttagtcacaagataaaaattataattagttaatactattttacttttagttataaattttattgtgattaaaagtaaaaaaatttataatgcaagcaaatgcatgagtttactttagctttttaaataaattagaaaaacttataaaaatactgacttttagcctaatctttacaaaaatactgccacacggtagaaactatttttatactgtcttggccaattttttttcttttatactgtaaataccaaa

SEQ ID NO: 335384 - DNA, 681 bp, Cannabis indica
actagatggacgccaggcgaaataccaggagccagggcaactcggttggatcaaatgaaggtcagggagctcagtttgccccaattgttcggggccgaggtagaggtcacaggggcagggcacgttgtcggggtgatgttaacccgccacaagttgcccaggctgccaaagctactcaagaagctcacaattgggaaaacaggtttgcagaaatgcaaactaggatcaaccaacaagaagaagtgatttgacagttaagacaatagggtgttcctgtagtgcctgctctagaaattccagtggcacctacccctgctgtcaaggccaaaccagtggttgcattgaatcagatggaacgtctgtatgaaaggttccgcaagaaagcacctccactttttctgggaggtctggatgttatgaaagccaagcaatggctaacagtgattactagtatgttgaattttatgggcgtcactggtgggacatggtgtccatgattcacgatgtcacgacaatgacctgggaaaagttccaggaacttttcaatgtgaagtattacaatgaagcagttaggagtgctaagataaatgaattcacccatttcacccagaaggaaaacatgagtgttactgagtatacgacccagtttgatcgctttgcgaggttggcctcgcgaattgt

SEQ ID NO: 335385 - DNA, 767 bp, Cannabis indica
gtcgttacaaaatagagtttccggtatagaagagaccggtagggaaccatacatctgatgggagaaggcccatctagccacattgtgagcggaaaaattacttgttctactgacataagagaaattacaactattaaataaaggagatgacttagtacaaaatgagatatagttctctaaagcccaacgagatcccttcccattgatggcgtcgataaccactctcgaatcattctccacaataacaaacttgtagccggaattcaaagtaatcgacacagccaagcagcaagccgcggcttcaccacactagggttttactaaacttttaatttagctttgaattatatttctttttatattcttttaaacgacacaatataatacaaattccctttttttataaacaacaacactatttctattcctattgttcaaactttgatgggaaaagagaaagaaatgtcataatctcattacattagaatggggctacacactaaagagagctcaatcaaatgaaccaccataccattccatggcgcgtgtttacacgctctttaaaatcatgtagtttttatttttctcattatttccaatagattttgattatggtattgatgttaccaaggtgagcaaaactagaaagaaagaaggaaacagtagtagaacccatacttgtccaacattcatagagtttgtagcattgctatctaacaagatttataggtgggctcatttattccataatagtttttttttttttt

SEQ ID NO: 335386 - DNA, 1088 bp, Cannabis indica
cataaaggtgcagggataatgtgtctatgataaaggttataagctacagggatagagttcagaagaatacgccaaacacagtgcttaaccttggcagggatgggagagaaccagagtttagaccaaaaacgtttatttcccaaaggagatgaagaggaggggatatctctagaagtaagcgcaagatgatatgcagatttaacattaaagatcccagaattatcctttccccagattaaaacgtcagaacacgaatgacctgctataggaatttccaagatatgatcaataatgaaagcaggaaaatgatcacgcagcttgtttaagtcccaagcacctgaaggagaaataaagtaggataaagaaggagaaggaagagcggctatcaaatcagaatcctggatgataaaattgggcaaccagcgatcatgaattgtgttaatagtttgcccattaccaaccttccaacaaaggcctttcttaagaagatctctaccccatatgatacttctccaagagaaggaagggctatgacctggaacagcatcaagaaaagaggtatgtgggaaatatctagctcgaagggtaagactaagtaaagagttaggtgtttgaagaattctccaagcctgttttgctaacatggcctgattaaaatgaaccagggacctaaaacctatacctcccacaaatttagattggcagatcatggaccactttttccaatgaattgaggggcgattgagggaagagccccaccaaaacttagataccattgattcaagctctttgcagattttggtagggatacgaaagcaagccatagcataagaagggatagcttgaaggacagccttgactaaaatttccttgccagcttttgaaaaccatttatgattccaggattgaagaacagacaagaccttatccttaaggaaagcaaaagattgatacttagcacgagaaaagcattggggaagaccgagatacttagagataaaaggcttatccaccattctgagagtatgcataaacatatctcgaacattggcttgagtgttgggagaaaacaaaatggatgatttatc

SEQ ID NO: 335387 - DNA, 594 bp, Cannabis indica
agaaaaccagaataaaacttttactagaaaattagtcaaaattgactagaatctaccaaacaacaagatctaagcaaccagaaccccactaaaaaatattagaactagccaaagggattaccctttggctagtagcaactgaattatagcactctacttcataaccttcttaaagtcaccatcctttaataagaccatatcatctaaaataaattttagtatgtaatttagtaaaaaacaatgaacctaaatcctactatatatataatgaaactataatttgatcaatttctatttatatcaattatagaagttgactgtcttatttgaaaaagatcttccaaaaataaccttggaaaaatctaagctttttgattgacatttccaacaggataaaactataatttaactctattggagttaactactttttaaataaattataatatactactagtagtattaagataaatagatgtcaatgaaaaagtaatgtatattttaatgctttcctaatactatatataactattttttattattatctttcaatacaataaaataaaactcaaacttattaagcttaattgtcca

SEQ ID NO: 335388 - DNA, 1097 bp, Cannabis indica
atgagaaggaaggctgcacggtacatcatactagagggagttatgtatagacgaggattctccatgccattgcttagatgtgtttcacaagatgaagctacacgaattttgtctgaagtacataatggattttgtggcaaccacgctgccgggcagagtttatctatgaaaattctaaggcaaggttatttttggccgacaatgattgaagattccaaggcctatgttaaaaaatgtgataaatgctaaagattttcgaagatacctcgagcaccgcccaacgatttaactcagatgcaaagtccttggcccttcgccatttggggaatcagcctgatcggacaattgcccaagggcaaaggtggagtgtagtatgcagtggtcatggttgattacttcacccaatggacagaagctgagccgttagcaaccatcacgtcataaaaagtgcaagacttcattgttaaaaacaataattttcctgttcagattgccgtataagatagtctcagacaacggcaaacagtttgacaaccaatcctttaccaatttttgtacgtaccatggtatcatcaaaagtttctccgcagtagcgcatccccaataaaatggtcaagtttaagcagtcattaagacattgaaagacaccctaaataagaaacttgaggacgctaaaggaaactggccagagaacttcctgaagttctatagtcgtactgaacactaaaaaaacagaacccggacaaactccatttgccatgacatatggatatgaagctatgctgctggtagaactcgaaccaccaccccacagaagattaacatataacctagaggtgaatcatgtactccttgcaaaatcacttgatgaaatcaaagaaaagcgaaccacagcaaacttaaaactgatagctcatcagcaaaaattagcttggtattttaacaaacaagtgaaagcacgaaaattctttgtgggagatatggtcctaggaagagtatttttgaacaccaaagacagcacgagaggtgtgctcggacctaattgggaaggaccttatcaagtggtcgaggttctatcatcaggggcgtacaagttg

SEQ ID NO: 335389 - DNA, 568 bp, Cannabis indica
acatgacttttctcatgacctcttttgcactcatggtggattcatcaaaacttgtgttcattgttttgttgaatagatttatgtttatatacataataatatattcctcaaataattttttttttgactagttcatcaaatagttctatatcccatattaattaaaatacatacattattttttatggaaaattaaactacttatttaaataatgaaatgcaatggaacatctatttaagaataaatttggatcaagtaaattatatttaattgagaggttataattaaataaatttatactaaaaaaaattcaaaacactaaaaaatattaatatcaatgtaacaaaaataacaataaacaatccttaatactactatcataataataaaatatttttaagtaaatatacacatattctaatttagaataaaattattaattctacataaataaatttataaactatatgtatatattttattaagactaggttgatgttatgtgcaatgcacgcataattaattttttttaattaggttcaataaggtgatgttaagtgcaataca

SEQ ID NO: 335390 - DNA, 1468 bp, Cannabis indica
ggtaattgatttgctttcaagaagtatggattttagacgatgtatgtgtgatttggatgcgattcatgttgatctatgtgtttattgatgattgattgatgtttgcgaattttttacataaaataattataatcgttctgaaatgatttttcttggatagtatggaaaaaattaagtaatttacttttttacagaacttaatttcgattttatttgaattagttatgatttttttttaaaattggaaaaaattaggaggtgtgacacctccatgcgcgcacagatgcccgtgaaacacgggcgcacacggatttggacaagccttatgtctgagttttctcggtcaggtgggcaagttttgtctgaaggctcccaatccgcgcgcggggatgctacttgcagcctcccctgtgcggcaaaatttggtcaacttttaaatttttgttattttatttaaattaaagtataaaatcaaataaatgatatttatcgatcattttattttattagatatttaattttattttcttttaaaaatagcataaattttgaaaagtttgttggcagttttgaatagatatttaggtgtgttaaaaacctaatttttcaatatatagttttaattttaaaattaattatttaatttcattttattatttttgaaaataataattgattatttagatttttcgataatcatttaattattaaattaattttaaattaaataaatcttttttccaactatctagtttgttgcatgtgtgtgttttatatatattgtttattattaaaactttttttttttttataaaacctattaatgtttgatctaaattgtcatggttaacttgttgacagatccaatgatctgattttaaccaatggttcaattgtcaatatgtcaaataaataatttgttaaaggtaaattgtgcaatcttcttttatctgtgtatgaacctagtaacatgataggatccatccaaatcagtgtgtgcatgcgttgagaatatcttaccaggatctagatttactaacaagtatgttgaattaacatcctaaatatgaattctttaaaacaataaaaataaacacatatgggtttaagaaaacctattgcagcagaatataatgactccttccgttcaagatctctagcccttgattcctttctatagtagagtattatcaagatctgaacttggatctctttctcaacttcagattttgttaccaccgtcttactcactatgattgagtacttcgcttgctatgtgtgggcacgacactcatttactcaaggtttgaatatggtgaaaaacaatgaaggaggctgaaatcactaaggaactctctcatctaggttgaaggcaatagttaaattgacaagaggatgaaatgagagtatcatgttccttttataatatttcaactagggcttagggctgaattatatggattaaaaa

SEQ ID NO: 335391 - DNA, 1431 bp, Cannabis indica
  modified_base (1169)..(1169): a, c, t, g, unknown or other
attgatattatggttgttattttatatatattcaaatgttccctcaaattaggttgtctttgattgaggtgttctcgcaaattaggccttcttgcatctcttgggagacggttgttgtggcgacgttcataattgtagggggcattcttctgaacagcaatggagcagcttttagcgtcagatcgaccactatcctcggtaaagctcactattctttgttgttatggatgatgaggagagtgcgcgagccgcgcagagtatcgcttggagtacggcttcaaagtagcgtctgatttggacacataactatttttttgggcaggttggcgccttgtgggtgtcccttattttttcctatgatatgttggcctttgatgggtgtgatctttgcgaggtgcagtgtgtcacctatgcccttaggtggttgagcatgtggtgcattaccacgggaggtggaccgccttggttcttgtggagtggtaccatttcactgattgaggtagcttataggtgatggtggtcccccctccttgctggattattcataggtgcatcttctctccttgggcgccctcttgttctcctaggtggagaaggatttcttagtatagggggttggtccccatgcctttggttttgctcttggagctctccgttgtggcgtaagctctctgccgattggacgtacagagtttcattttcttggaacactttatggacaggtatagactggtgggcgctccatagatggagatgaggaactctcacaatcttagacttgtgcctcatcttctggcataggtgtcatgggacgcgtctctcggtgcctagaggttccctctttataaggttgtggagggacaaaggtacttcactttggagtcgattaatttctcttgggacttcagtatcctcctcataattggtcattctcgtaccaaactccattgttgtagaaaaaagtaaatggatgagttttctaaggggaaaatagtcagattttcaccgtggtactcttaatgaaagcatcaaactgttgacacggtttttcgtcaactgacctaagaagattgtaaaataaaagaggagcacggtgaattaatttgactaataaaattgcagtaaattaaatggacactagatatttatagtagctcaccccccccccncccccatgtcgcgatggtaagtgggctacgtcttacttttagttttattgattagatccgacacaccagtagttatgttctacaagagtgtgtaggaataaaaatacagacaaaagtattttaaaggtaaaatcttaatcgagtattaatgaatataagactcagtgggagacttgatattcataaatatgatctaaattagtgattgtaaagttcttgggatcaataaaccaataaagtctatagaaaaaatgtgtatcta

SEQ ID NO: 335392 - DNA, 573 bp, Cannabis indica
cctcaaggctatgttctgttggcaaatcatgaagaatgatatcgctgggtatgtttctaagtgtcttacttgtcagcaagtgaaagctgaacatcagaggcctgcagggttgctgcagccattgaatatttcagagtggaaaagggaagacgtttctattgacttcgtggtgggattacctacaaccacaagatagtacaactctgtgttggtcatagtggacaggtttacaaagtcagcgcacttcttacctgtttgaatgaacttctccattgatcagtatgctgagttatatgttagagaaattgtttgtcttgatggtgtcccaaagtccattatttcggatagagatccgaaattcacatcaagattctaggacagtctgcatcgagctatgggaactcagttaaagtttagcacagcatttcatcctcagacggatggacaattcgagaggactattcagatcttagaagacatgctacgggcatgtgtgcttgactttgaaggatcatgggtaaagtaccttcccctgatcgagttctcgtacaacaacagctatcaggcaacaat

SEQ ID NO: 335393 - DNA, 739 bp, Cannabis indica
ataatatttaagctggaaattttctaattcagatcagctaaaattagatgaattttcaaagtatattttattttattttaataataattttttttttaaattttgaaatgcatttgattattaaattcatatatttttgaaattttgaaaattagattaaatttaaaaattaattctttaattaattttagatcaacctaaattaagtaattttcataaattattttattataatatatagactaatatattttaattagaaaattagtaattagtttatgaaatgtctagatagttattttctatataaactttttgctatttttctagatatatttaatgaaaattaatatttaagttgattttattcaagacacataaatattagatattttttatttgattaaataaaaaaattatatttatgttgaaaattagtttattaattttagatcaacataagaataagtgttcaatatttattttattttatttctaataaatttgtaaaatgtaaattttttactattggatttcaaaaattaattagatatatatatatttatagtaaattaaatttgtaagttgaaaattaatattttttaattaattttggtaccaacttattgttatcccaaatttggtcactctgacgtggcatcatgagaagtggtggacacgtggacgtccacttggagcatctgctcggaacgatatgccgagcaggatgcctcgctgg

SEQ ID NO: 335394 - DNA, 626 bp, Cannabis indica
ttcctatatttatcaatacacatggtttaactgatgggataatctacaatgtaatttacttgcaccttgaataagtgccatgtcctttccagggcattggttaaagtaagcttgagttagatgtatggagtatgcattgaaagggaccgatattgaacttggatcagatatataataaacttactgtaatatccattcaattcaatatcacctagttgatcttagagcaaatgatcttaatcctgagatggttaggttctagttcaattgtattatttgtgttcttcattctgttcgttaaagtcgaccaatggttcttctcgtaacatatagataaaagacatggcagttcaattgagtgggagcgctaatcatagatttagaatctatagcttctatctggacatagaagtgaaacgatgatttccttcgagctttgtttaatagagataaatgattgagtactcatattacagtgattattttagttaattgaaatatcatttatatgtagctaagtgttttaaggatacaatacattgaagggtgtaacggtaaatttgtccttactcaatgtaaatcatctatagaggatcattgatttttaggattataacaaatggata

SEQ ID NO: 335395 - DNA, 638 bp, Cannabis indica
aaaccgatttaccctttcctgcacagtagagcactcgtgagccaagcccagcaagacagtataactatcaataatcataattaacacatcgcataaatattaatgccattatattttttttcgtatgacacagacccgcgtgttacgctcacacgcctagttatgtctatgtggtatagacctacgtgttacgctcacacatctatttacattaaggccttagaacggttcatctcggttctaataccgagtccaacctgattatgtcttgaacacataaccctttacttcaatatacatttatatacatcatggcataacaattacatattaataatttacttgggtaataaccctaagccaataaaccgctcactttagagtaataactctaatcttggtttctagtttctcatatatatatcacagtctatataagcgccattgcgcatatctctacgtgctaacaactgtcttacctgatgtcccgcaaatatggagattccaaatcacccagtgcttctgaccaagtgacggtaatactagtcacaaacccggaatacacaagtataggattaacccctaaattcatttccaaaaattataaaattggcatttaaattccaaatattcacata

SEQ ID NO: 335396 - DNA, 658 bp, Cannabis indica
gggtaaggccttgtgatattttggaaatagggtttggaaccctaatgcctagtggggcgttggttatctctaataggcgctttaagtctatgctggttaggatcgaagataggaagtcgagcgctgaccttataaaattggaatttattgagtttgacattataatgggaatggattttttgtttaagtgttcggccagtatagattgtaagcagaaaatggtaactttttcagccgaaggtgaagatccatttgtttaggatggatcaatcctggggtcttggatctcggttatctttgtattaagggttagagatttaccatgcagtgactgtgtagaatttctagcaatggtaattgatttcaggaaacctgaaacatctgggcgtgaggcagtcagggcggtggaagattttctcgacgtgtttttcgagtagttgtcggggttgccgcgccgccacaacgagaaattgatttcgtaattgatatggcatctggagtcgaacctgtttctaaagctccatatagaatggctccagcgagactcaaggagtttaagttacaacttcaggggatgcttgacattgggtatattcgacccagtgtattgccctgtggagctccggttctgtttgtgaaaaagaaaggtggttccctc

SEQ ID NO: 335397 - DNA, 692 bp, Cannabis indica
aattttctctaatttcgtccgtataaaaccctattattttcttaaacaggccacatataaggtgtagattcttgatcattgggtctagacatatacatgtagtattcgttagttccaaatgttcctttaataaatttaaaacggagtctgtactgacaaaattgaaaaaaaaattacagttttacaaacattaggtacttatgccgctatttaccctatttataaaatcgattgattataattatttaaaatacttaattcatattaatattattatgcttttaaaagaattgttgtagtaagtatttttatataatttaaatttataattttacaatatatatttgaaaaaaaaattatataatatatggcttcctattatttggagatgtatacaagatattatatgatatagatgatattaagtccattgtaattgtgtgaaaaaaaaaataataccaaaatttttaataagttattaagttaataaaaataagaattactttagtagaataattacttatttattaacaaaatatttttatacaaaatattaaattataatttcataaaatatattacacaattattattaaataaaataataaaatttttatttataatttaaaattttaataaacaaccgcacgtgaagcgcggtatgtttcctagttgttgaccgaggtttttgg

SEQ ID NO: 335398 - DNA, 743 bp, Cannabis indica
gtaaggtggaggaagccatctagaagttagaatccgacatgaggactcagtatcaagagttgttcaggttaaatttcaaagatgaaatccttttaacagagggatagttgtaaagaccacttagctttgttttggaattagcagataattagggtttaatcatgaaattggaatattaattacgatttatcattttatggagatttatttgaattcagaatgcattatatatgccacatatgacttatgtaaattttatgatttttgctcggcgacgacggaaaatgcgatggatagccgttagagtcacatgggtaagtctagaaccttttccttagtgggttaaatatttgagataaatagagtaccgagtttgagcggagttatggcttttgaccattttacccctaggcttgttatagttgaactttcgggataaaaggtattttggtcattgttattagtaagatgtggtggcttatcccttcaatggtagatggccattgttacttagggtttgaattatccctttttattaactaagaaaattaaagaagaataaaacaaatgttaaattagaaaaaaaaacaactacttcacctctttctctctccctttgctcggctcacacaaaccagagggaatctctcccctagcttccttttttatgaggattcagcaagaatcaagggtgattcaagttgcggtatgccctagtgttgggaattattttaccaggatct

SEQ ID NO: 335399 - DNA, 490 bp, Cannabis indica
taacagcaaattccatctaaagagagttgagagagcgaggaagcccgattacccacatcaaccagtttcctttgcagatcaaagcttatgtgggtttgaagctcaagaatcaatggctggaggtatttcgatccttattcatagtgtatatatgtttgatttaattccgcattttatacataaacatatatatttcagtttatacatataaatgtctaacagttggtatcagagcggattatatatctctgccttgatttattttgagtttcatatatatatatatatatatatacagtacggtaccactatgcactcagacatactcatatatatgggtagtgcatggatatatatatattatatatatatatatatattccagcgaaaaaaaaagagtatatataatttaggtttggggattaatttgtaagtgagatattcatcattaatatcaggatataattaaaaggaaagaaaatttgcaaaa

SEQ ID NO: 335400 - DNA, 739 bp, Cannabis indica
tgcttgtttttcgcttgatactccgtccaacaatcatcttgcgtgttgtcttttgtagatgaaccctggtgagtcttgggagcctgagcatctaatagaccaggaactccttcaacttctgcacgaagtccatcctcgtcttcgtgctaatcctccttttgatttcgtacccaaccatagaatgatggctcgtacgaagaaaactacgcgtctggctgacgcttgtgacccccaggtggctcgccttgccaccctgcccgacgctgaacaagatttggcggtcccaatggaggaggaccgtgagggggacgttgaagtccaggaggttgaagagctggacgaggcacgtgcggacagccctcctgctgctgacggggaggacgagattgaaccccttaactatggggagtacaacgaggctgggcaaccagttgatgctgaccgggacgtcctggttgcgagtgttgattacgtcacttaggagcttgctgagtcggttcctcataggaggcaggttgccttgggcgctaggtgggtgagtcctccatccaagatttcggaggcacgcctccgcactctcgaccaggacagatacctcggcgagctggactgctacattcccgcccacaacaatagtgccttaaaccctgataaggggatgtgcgactggtcgagggctcacggccagcaagggacgctgatgcccttgcacaagtacttcctgttggaaattatttta

SEQ ID NO: 335401 - DNA, 1015 bp, Cannabis indica
acttcatcgctgattatcacatcagtgtaaatccagtgcactaatgaaatagggacttcgtcgtttgaagcatataatcacaacaaaatccaacggggttgacatcactgtaattgtgaatgactatatgttttggacttaacagactttgtatatattaaaccataaacatgaaaactacaaataaacataaataacttctaatcttatattgataacaaatcagattagattgaaatgggttttatttagcgcataaaattccaacacttaccacactggaagcaagaattcttgttacattctcccaagtgatgtttcttacaatgaggacattctgggtacgtaaatccaccctgatgaccaccactccgaccatggttccctcggaaacatttgttctgcctagagttgcttggtgtgaaaggagtcttactttttgaatcaaaaattgaatcactattacttctacccaaactagaaagaggcaaagcagtgactccacaagaaccttgattccctctgggctcatgcaaaaatagtactgcaccttcgggtcaaagagccttctgtaccatcattgcatatgcggtcgcatcatcggttgtaattgtcaaatcatgacagatcttggcattaagcccacccaggtacttttccttcttagtgtaatctgtaggtactatacctaaggtaatctggctaattattcaaacttggttgtatactccgtcactgacattgattcttcttgaaccaattgtgtaaactccttccgtttgcactacgaacaacctcattataatacttggagtaaaacagatcctggaattcatcccgggtcatcgatatcctgtgtgagtgatactaactcccaccataccagggcatcttcctggaactgaaatgtggcagaggccactctgtcactatcggtgactcccataaaatttagtatatgattcatagttattagccattgctcgactttcataacattagggcctcccaaaaa

SEQ ID NO: 335402 - DNA, 1197 bp, Cannabis indica
aatgttggtacaatgccaaaaactgtatagaactttccatagactgaataagtgtaacatttagtctcactggtagagttagagactctagatcggtttttacacttttccaaaatcattgctccacccaaagtaatcaccatcttatcagtagactttctagcatcaaggcaagtctagaaacctgatttggtgtagtctaagagtattaaaaataccacccttatcgactaacacatagtttctcttcttgatcttaagatttacttgattatcttctaatgttcctttacttgattgtcatccattagacaaacataatagtgttagatctcaacagataagtttttataaatgtaacatctagttgcacatccaaagatgacaatttagactagtgtttacaatataaaacaatgaagagattaataaaataagaataactttgactctcgcctatcgagacatcattggattcttattttaatcgaaattatcctttatgagtttccaattagtttttttatttcgaatttacttaattagtatatcattagatgaatagtttgtaaattatttgcttatgatgtcactttaatttttcttatgaaatggatgacgcaaatgactatattctcgatattctatcccgaaatgatataaatcttcgatctttaaatctcctacttgtatatgtttactttaggcaaattagacttagagttagattattagtggtgctccaagaaagaataattactcatgtatatttggtataaatttaagtttttgacttttaattttagattccaaatagaaatttttattttgtttcctagaatgtgaaatttgtgttttctacagtttttttttttttgtatatgatttaatagtggtccaatatggtacgatgataggtatggtggtaggaataaagatccgatagtagtctgataataatacaataattgatagaaaacacgatatggttcaataaatacttaaaatttagactaattaggatttttggcccccgaactttgacatgtaccaaatcatgccccctaaacttttctggccactaaaaatttcccatgaactattgagattgttagatttaaggacttttgtctaatttcatttaattttactatttcagtgattgtttgtgtactaaatcatgcttcacagactttg

SEQ ID NO: 335403 - DNA, 610 bp, Cannabis indica
ttcttgattctttccttgatctcgctaaacagcacaaagcagaaaatatgaaaagattcagtaagcactccttgatgagaatagtcttatctcatttttagatagaataattaattattcagaatgactatgctaacgtgttagataacaaccaaataaaaaaatagaacgaaacttaaatcttttgatcaaatctattctatttacacagcctaacaagaaccttgtgtgataagaataatgcactagagaaatgtagtaacagtttataattgttatataagatgagatttagagatatgaaaatatggctgttttgatagattttaattggcaagaacttgattgaaacaacaaacttcaagttcttaaaaaaatggaactattaaaagagagattcaatccttgcttttaaattttttatttttttgatgaacttgcaattataatatgtacaaaatgggaatattagaaagtaaaaaattagctcaaaagatcagaacacgcaccgaagcgcagcttcccttgcggcatcacgaacttctggcttctcagctcttctcttttggataacctccaaggtggcaccaacaatagacctagaataagg

SEQ ID NO: 335404 - DNA, 544 bp, Cannabis indica
ataccgatattttggtgtcttaaccatactaatctatcctgaacttagtgattaaactttactacgatgacaatacagtaggggcatcgaggtcctgtaaaaaagccaaaatataactcgaaacaagaatgataaaaatgttaaaattatttattcttagttcaagcttaaaaattgttaattttaaaatgaaaagactttaaatccaaactacagggtaaatttcaaagaacagaggtgattaaagttattttaaattgattagtgaaattgctaatgggaagaattgattcaatcaaaataggcattccatattcatctactcaaattaacttaaaacttattcccaaaaaacacattactaatgaaatggttgaaaaagaattcatggccaattcgaatgtgagaaaacactcaaatttgtcaacaaaattcaaattccttcagtttacaaattaagaactaacccataataaaagattaattaattacaaaccctaaacagaataattaatattaattacaatcttctccatcatcggag

SEQ ID NO: 335405 - DNA, 528 bp, Cannabis indica
ggggagtttgttaggctatttttagcctatattttggatcgattttatgtgcgcttttcactgtgttgggacagaattacgcttgttttttatgttttcaggctctttggaataatagaggtctcgggatgaaaaagcccaataaaagacgagctgagccaagaaaaacactttttggaggaaagatgtatatctggccgcggctagatacagcttggccgcggctagatcacgaagcagggaagaagggttttgaggctacagtcgctgcggcgagatacaccctcgccgcgaccatttgagacttacagaactgtgtattttaggcacttatctggccgcggcgagaccacacttagccgcggcgagatcccgtacggcccaggggtatttttgtccatcgaaccctaaaaattagttataaatagaaaactgcgattggaagtcaggggaggcgattgggaaccctaaaacacagcagagagcggcaggaagagcatagtgattcaagtgaagatccagaattca

SEQ ID NO: 335406 - DNA, 590 bp, Cannabis indica
atatttgaactgatatttaagattctgatgtttgttttctttaatcttatacttttaactgaatttaaatgtctcaagtatatatattatataatgacatatattttactctcactgattaatcttttattgttccccataaatataatagtgtgcattcttttttattattattataaattgttgtcgttacatattgaatttgtatttgacttgactaatctcagtgatagtgtggtagtggctttcttgcaacaatgtacttgaggtcgatagacgatcaatgtgtgagtaaagagcgagtacaaatagtataggtattctttcttttctctttatctcttcatctcctatctctttgaattatatttgtatttataatttttattaatttattgcaaatttcagtgatgataacattgggttcgagatgcttgaggttgtattttgttgaaaatacaataaagaataagaaaaattgttacaaatgttataaagaagacatttatttagtgaatcaattataatttgtgtggaaatctcaaattttgagttatatatatactttctttccatgtatagttattctt

SEQ ID NO: 335407 - DNA, 1319 bp, Cannabis indica
aaaaaatgattaaaaaagctaacaatcttcttcacaacctcaacacaatagcgactatatttgcaagcccaatcttgaaaaatcagaataacaaatttactaaaataaaactaaaacaacacaaaaataaatataaaacaatgaagcaaatataatcacttagaaaaatataaaagaaccacacacctcaacactcttttgtcagtgtgctcgtgtatttaaaaaaccttatggtttctattcaattaaaagctcgcaccatcaccttcaagtctcgaaagaaaactgcaaatagaatctgatatgtagatgaagttgtggaagctcaaagtccccctaaagtgctttattttgattggaaagctttatagggtttttagctactaaaactcagttgcatactaagcatattttattgagatttatgccttaaaagtaagtatttaatggacaatatattattgaatatatgaaataaaaatgataagataaatgaatacattaattatagaagtataattaataaatacctgcaaattcgttatttatatgaagatggaataatcttgtaaggttgtacaagagaattaagattatacaatatgaataatttaagtcggtagtgtattaaaataagagatctttaatatgaatttctgaagtgcagtttactatacactatacactatactctagtgtgtgtgatttaaaattttcagatcacatacgtggatagacatgtagtaaatatgttgtgtataatttaattatacatgacttgaccgatatgtaataacatctttcattaaaatatcatttaccatgaaatagttattcatatcacaatgacgatcattagtagatcaatttgaatcctgagtatacatgaactcttatttgtatttattgagttctttaattcacatgttaaagtttttctgagaagatgattcttaaaacttctatgttgggagcttaataacatgagtggttggaaacgtgttatacaataatagaatttaagctttcctagcaagtcaaatattagttctctgatagtattaattttggagtactaacagttagatccaaatctataatacgttattgaataactgttcacattgaattaatggtacacaaggaatcaagagataattagaaaggtaacatagtaattttgacaaactcttattatgaactaataattgaagagcgaactacttatattgattatatcaatggactacaagtaagaattttgtaaatataattctacattgtcaaagattgtaattccatatttatagtagagtaat

SEQ ID NO: 335408 - DNA, 593 bp, Cannabis indica
taaataatttgtcaaatttgtcattttgtgtaaaaaaacctttaatttaagactaatgtgtctttttgtaaatatatatattgttatatttatttatgattttaatctagagtcattggacttgataaatatatatgagtttcataaaagtaattagttattagggtgtatcggtcggtttggtcggcttatagtatatctttactaatccaatataaatatcagggtgtaaatatttaattgtaacccgctcaattaaaaattaaaaaaagttcaaccctcccaataattttgtcggtttggtcgggttaaccagtccaaactgatattttttttttttataattattattgttactttcaagtattcaaataattagatttaaaaaaaacaaaatatattatttatatttcaagctaaaaaatgctatagtctaaattatattttgtgaacattaatataagataaatatatataattgagtaaacataaaataattgaataaataataaaaagagtaataatatagtgtatattttaaacttcaacttcaatatccaaatacatgtaaaaattattaattataatttaac

SEQ ID NO: 335409 - DNA, 702 bp, Cannabis indica
gaggcggaggaagaaaaggaggttgcacccccaaactttgggggatacaacgaggctggaaagctagttgacgcggatggcgatatcctagttgagggtgtgaacttcgtcactgaggaacttactgtcgcagttcctcacaggaggcagggtgccttgggcgcctggtgggtgagccctccgtccaaggtcactgaggcacgtttacaggatctcgaccagggcagctatctgggcgagctggactgttatgttcccgcctcaaacaatcgagcttccaaccctcagagggggatgtgtgcctggtcgggtgctcatgctaaataaggggcactgttgcctttccacccgtactttaggaacgtggcagacttctttcgtctctctcctacccaattcactcccaagggcatcaagtatgtgtctaccctgttcgttctctacgccacccagaaatggggtatgccttctcctcacgaggtgagctggttttttgacttgaagtctactcccaaacaaggcaggtcaggatacttctacttttctcagccagacttcaagtggttgacgggcaccggggataaggccattagcaaaattgggcattttgttgaggagtattacttggtggattgcatgggcaccacctacactcggttccagcagatccctatatataaccgcccacccttcacacttgct

SEQ ID NO: 335410 - DNA, 830 bp, Cannabis indica
ttttcttattagttgttttaacaaattttagaggcttcttattattcttccacttcttctttatgggttttgaaatagaggcaatgtttgcctcagccttagccgtaccattagcagtgcctaaactaggagctttagttcatcctttatgtggtcctccaataaatttttcaaatgtctgaaggttgttgattaactcgtggaagtcaaaatccaactttttcatgacataatttgatgtaaagggcagaaaagctggagtcaaactattcaagatcaaactcacttgagttgtctgatatataatagctccattattttcagcctcttggaagtaaatagtcatctggagcaagtgatcacgcacgttctgatgaggtttcatccgtgcattgataaaatttttggtcgcctcaaaatgagcttgatctgatgccatcccaaacagtttagttaactagttcatgatatttgcagccgtgagagtattggcaaaccttgttttcaaggtgtcgatcatgctagacaacataaagtatcgagctttgttgtcagcattctgccaacgctcgaacttttccttaactgccttggtcgcattctcacctggctgctcaggagcctcttcagtcaacacaaacaaggcattctcacctatgagagcaatattaatgttctctttctatttgacaaagttagctccagagagcttgttgtcagtcagaagtgacaccatggggttgttaatagccatattgggtactacaagtatcaataaatagaaatcaaataaggtttaataaaaaatcatacatattcagaaattatta

SEQ ID NO: 335411 - DNA, 806 bp, Cannabis indica
ttttattatagtcaagtttttaatattatcacggtttttaataattaattattctattagtattaaactactttataaaatcacacacgtggcgtccctatagattagggcattacaaatattttcatatcttgtttttttgtttattttttttagttattgaattctctttttttaactgattttttattttgattttggattgttttgttgtaataacaagaaaaatgaaaaatcatgtggtgatattgagcctcctttagatttcagcgtcgtgcaaattaaagacaaatcctggtttgttattttacagacttgtggagaagaatttttgatttggtacgtaactggttagttttcattctgtccatttttctgtttagttttttgcttgtcaatttttaattggttattgtttttatttattgtgtgcaacatttgaatgttgcattctatgatcttaggaagagtattttatttgatgccaatgtgaataagagagtgatgaccacatgcacctatttcgacgcaacactaaagggagtttatgatgtttttattaaagtttaagcgtgattccagtgttataaggtataacaacatggttaccgactatattctgggccaatataacttttgtttttagtcttgggttggtgtggatgatgttatcggtccctgtcacgttactctacaacaacattggatttttctacactttagcattttgagaaggaaaatctttgtctacaattcactgaagaatacaaagaaaaatcaaaagaagattttaccagatcttcttg

SEQ ID NO: 335412 - DNA, 848 bp, Cannabis indica
aagtaaaagtttaattttaacgtacttaactacactccctgtgggatcgacctcactcctggtgagtttactacttaaaacgatacgtacacttgcgtgtgcaaaatattgcaacatcagcaggccattcacttaaaagtaaatgttcttttagtagttagtgtggtcatccgaccttgtactttattggtagtattttcttaaatgctccccattccaatactggggtactagaacaagttgcattttttcatcatacttacctaatttgtatgcttcggattcaagaacttcgaccacttgatatggtccttcccagttaggtccaagtacacctgccgtactgtctttggtgtttagaaatacctttcttagtaccatatctcccacgatgaatttccgagccttcacttgtttgttgaaatagctagctactttttgttgatggactatcaactttaagtttgctgtggttcgcttctctttgatttcatcaagtgattccgccagaagtacgttattggtatctagattgtacgtcaatcctctgtgggatggtggctcgagttctacaagcatcatagcttcgtatccatatgtcagagcaaatggggtctgtccagttactgttttctcagttgttcgatatgaccgtagaacttcaggaagttcttctggccaatttcctttggcatcttcgagttttttctttattgtatccttcaagttcttgttgactgcttcaaattgaccattcacttgaggatgtgccattgcggcgaaacttttgatgataccatggttcgcacaaaagtcagtgaaggattggctgtcgaactgcttgccat

SEQ ID NO: 335413 - DNA, 755 bp, Cannabis indica
ggcccaaaattgttggctcaattaaagcagttgggttactatttgcctactatggttcaagatgtgattaatttcactaaatgttgtaagtcatgccaattacataaagatttcatccaccaacccccttaaccattccattcttctatactgtcatgacctttcgaaatatggggaatggacgtcattggttcttttacgccaccctcttccaaagcccataaatatattttggccatcacatattacttctccaaatgggccgaagccataccactaaagaaagtacaggcagaaggtgtcgttgattttataaggactcacataatttattgatacgtggttccttcaaaaattatctcagacaatgtcatttatttcaaatgtaaggcaatggtaaagttgatgaacaagtacaaattcaagcacagtttctcagctagttacaactcatctttaaatggtcaagcaaaagcatttaacaaagtgttatgcaaaatcatgaagaagacagtgacaaagaataagagggattgccatgaacgcctcttagaagctttatgggcttatagaaccacggtaaggaccgcgactggttgcacactttatgggcttatagaaccacgataagggttgcgactagaagcaattttacctttggaggttcaaataccttcattaagaattgctactcaattaacagacccaaatgaaaatgtgcaagtccgtctagctgagcttgaagcactagatga

SEQ ID NO: 335414 - DNA, 585 bp, Cannabis indica
agctagacgagctgaaaaatatgttgcatggcatggctggatagagaaacaatgatcttgagttagaccgagcacgcaacacgcctttctctcccgagatcaatctcttggcactgccccacaagtttaaaatgccaacatggaagatgtacatagggagagaagatcttctctcccacctcaagtatttgcaaatataaatggatttgcaaggagtacgaggggatgtgtgttgcagaatttttcctgctactctgtcggaagtcgctcagcaatggtatttcaagttgtcccctagaaagtttagttcatggaaagccttctcttcagaattccatgcataattctcctcctcacgcccactttcattgcatctaggagacttggttgaagttaagcaacgaccaggcaagcctctccggccatacatcagtagattcatgacagaggcgaccaaaggttcactggtaactgaagatggaaagttattcgcgacactagggggcatcgaagtccccggtgaactttggaaggatataaggaagagcgggccggtagactcaatgagtgattttcttgatcgtg

SEQ ID NO: 335415 - DNA, 817 bp, Cannabis indica
tgaaaatgtgcaagtccgtctagctgagcttgaagcactagatgaaaagcggcttgctattccacagaagctcgaaatttaccaagcccaggtagctagggcattcaacaagaaatttaaatttcaatctttctcacttggagatctagtgcttactgtaaaaaggcaaattgtcataactagaaggatgaaaggaaaatttgaagcaaaatgggaaggaccttatgttgttactaaggtcttcctaagaggggcgtatgaactttcaaattcaaaaggttgatgcatttatctgtgtgttaatgggaagtttatcaaaaagttctacatttaaacaaaaacgtatttacccatggtgtagacaacgcacttaaaaaagacgggtgtgcaatgaactacgtaaggcttgatcccgttctgggtacgtaggcaatctaatttataactaggcccaaccacacataaaaaaatttaatctccttaaaaaaaatgcaaagaactacgaacggcttcatcctttaaaaaggtacgtaggcaatctgaacaaaattggatgcaaccacaaaataaaaatatatatattatttattcctcctaacaaaggagtcaaaattctaaaaggtctaaatgacaaaatactattagtcttcaaggctaataaacacaagaaagctaacgaaagctgaaactaaaactaaaaagttttagaaacaaaatcataagatctttagtccatctggagaaacaaagttaaatcgccgagtcttctctagatttcttcttcttgaatcttgagtgttgctttcgctctctcagc

SEQ ID NO: 335416 - DNA, 886 bp, Cannabis indica
tgtggggatcatgcaggttggcacagcctaactaaaaagatcattagacagggatactattagccaacgatcaataaggacacccatgagtttgtcaaaaagtgtgataagtgtcagaggtttttgcatacccctcgcgtatcgctgatggaactaaggacgatggcctcgccgtacccatttgctatatggaggatagatttaattggggcattacccactgggcaaggaggagccaagcacgcagtagtagcgattgacttctacactaaatggactgaggacgagcctcttgtttcaataacctgcaagaaagtcctcgactttattgtcaagaacattatcagtaggttcgaaatttccatgaagatagtattcgataacggaacccaatttgatggtgacttgttcattgagttctgcgagaggaacaaaataattaagagtttcttgtcagtatccaggcctcaagtgaatggacaagtggaagctgttaataaaaccttgaaggatactatcaagaagaagttagacgctgccaaaggtagatgggtcgacgagctaccacaagtactttgggctcacagaactaccgagaagacggcaacggaacacactccattcttgctagcattcggctcagaagcaatgctacctgttgaagtgaacatatcaactcacagacgagaattttataatcaagaagaaaaccaggaacttctaaagttatccctggatctacttgatgaaaaatgaatcgagtcgcaagtcactaatacagtgtatcaacaccgagttacaagatatttcaacaaaaagtcaagaaaagactattcaatgttggagacttggtgctaagatcggtatttgcaaacacgagagacgc

SEQ ID NO: 335417 - DNA, 1328 bp, Cannabis indica
gatgaagctcacaccacgccttattcgttgcatccgggaaccaccaagatgtatcaggatttaaaaccctacttctagtggtatgggatgaaaagagatgtggtagattatgcgtctaaatgcttaacctatcagcaaatcaaagctgaacatcaaaggctggtagggttattgcaacctttggcccttcctaagtggaagtgggaggacattgcgatggattttgtaataggtttgcctagagccacatgaatgtatgattcagtatgggtcatagtggacatattcacaaaatcagctcactttctaccagtgaaagttacttacgcggtggatcaatatgctgagctatatgtaaaggagatagttcgtctccatgaagctcctaaatcaattgtttcagacagagattcaaagtttacatcaaagttttgggtgagtctacagaaggctatgggtaaaaagctgaagtttagcatagcttttcaccctcagacagatggcaatcagaaagaacaattcagatactagaagatttgttgcgagcctgtgtcatggactttgagggttcatggagtaagtacttgcctttaattaaattctcctgcaacaatagctaccaaagtacaataggaatggctctctatgagatgttgtatggtaggaaatttcgcttccctattcattgggaagaaactagagaaaggaagcacttaggtccggagttagtttagaggaccaatgaagctatagacaagatcaagactcggatgcttgcttcccaaagtaggcagaaaatttatgctgatctaaagcgtagagatgctacatttcaggcaggggaacatgttttccaaggagtttcacctgtaaagggtaccaaacgcttcgggaagaagagtaagttgagccctaggttcattgggccatttcagatactcaagaaggtcaggcaggtagcgtatcggccagccttaccaccagcgctatcgactgttcataatgtatttcatatttcaatgttcaggaaatatgtttcgaactcgactcatgtcttgagttacgaagcccttgaactacagctaaacttatcttacgaagaacagtcagttgagatccttaataggaaggagaaagttcttcgaaagaagcccattgctttggtcaaagtactctggagaaacagcaaggtggaggaagccacctgggagttagaatctgatatgaggactccatatccagagttattcagattagatttcgagaatgaaatccttttaacgggggaataattgtaatgatcgtatttttaatttggattagtaaag

SEQ ID NO: 335418 - DNA, 503 bp, Cannabis indica
acacaacaaaatatcataacataatttggagaaatgtaagaccattcataggtttggagaggatggggccagtgaatggtgcacaaaaggcgagttcccaagacctcaatcgagatgaatcacctcagggactctcgcttcacctctgaggtagtcattggcagcttccaaaaatgcttccaccgtcttcacttggtcacttccttgaccctggagcttgttttgttggtacatggtcgaagcaagctcgataatcctctttcgagcctcatctaacaggtcagcacatttgttttttgaagcattcactgagttaagagtgctctgcaacatgacacaattggagcaaggttctgtcgcctgagaccggtatctccttgaccgagaggaagatggaggagatttcttgcaaattgatgaaggagtccctaagttcattggacatacatgggcgtccgggctgtaattcttagctgagccgtaacaagagttagtggtaggga

SEQ ID NO: 335419 - DNA, 568 bp, Cannabis indica
ataagtaagaaacctatccgcggtttcaagaataattactcatgacggtaatgaccgttaccaatcctcaccactcgttatccacgagcttcgtatgtcactatcgttgcccagtaaagcaaacgataagtaagaaacctatctgcggtttcaagagtaattactcataaggataataactgtatcttaattcattcacaacaacagtgataaccgtgttcttcccttattcagaaacaattcacaaacgacaataatcgtttctcaccattacctcgattactatcaagtcacaacaaatacatattgggatctcgatcataatcgagaccgtaacaattatatcattaaccataaatattgcttaatacttttcttacctcaagtccaaagtcaagtatgtggggcgacctgagtgtaacgatgtttgaaaattttaggtcctatgtcacggcaaaggtaactcaataagggtttattccaaaatactgtccaaaacccccataaaataacctagggtttttaaccgaaacttatggtgaaaacaccctaaattaaaatacatatt

SEQ ID NO: 335420 - DNA, 695 bp, Cannabis indica
gcttcaagagagtatgtcaaacaaattctattccatgccaagccaacattccacaatccaaatagaacaaaagtgatacacatcaaaaataaatgttttacatctaaataaacaaccttctaatacacatccaatttaattcaaaaagttatgactcaagcacacgattaagatttcaatccattgcacaagtgaataacagtggttcaatcaatcttccaacttagctatcaacacacgacactaaagttatgactcaagcccatctgagcatcagaataatgtttgtttggtaccaaccttgcactaacaaagtatagccatgccttggctaccgggtttagttcacacctaaacagctgatacggttctccatcatactcgtgaaacctaaggcctagataacctaaggtttcagctatgtccacataattcaagctctttgcccgaatttgttgttttagtggttgttcttttggggtgaaggtcgataagtcataaacagcatgaatggcggctgtggaaactggcactctgaccccctaactttaaccttgtcatcctctatttctggccaattggccaagaattctaaagctaaggtttggttgttgcgctcaatgacatccacaaacttagtccaacgcctatttatgattttctctctgatgggctcaaatacagcagggatgttt

SEQ ID NO: 335421 - DNA, 535 bp, Cannabis indica
ggtagtacggctgctgcatgtgtggaatttgctgcactgatgtcatcggtgatgactgctgcacatgagacaccggtggcatatgttgcatcgatggcatcgaaggcatctgctgcatatgtggtgtttgctgcatagaaggcatctggtgcaaatgtgacacatgctgaatatgcgcaatctgctgcatcgaatgcatctggtgcacctgtggcctctgttgttgcatctgtggcgtttgttgcatggagagctgctgcatctgtggtgtgtgctgcatggaaagttgttgctgcatctgtatgttttgcatcaaaggttgttgctgcatctgcgatgattgttgttgcatctgcgatgattgttgttgcatctgttgagtctgctgcatttacggtgtctgttgcatataatttacttgcagctgcgacattggcgaggacaaccaaggaaacgaggacatttgctgaggtgatgacgaagaatacataaatggaataggactctgctgtgcttgatgagattgagaagtccc

SEQ ID NO: 335422 - DNA, 757 bp, Cannabis indica
aaagcataacaaaatgactaatcctatgctaggtccgccggtggtaattagtcaatgttaagatagtgtcattacctttggggccataataagtgactgtgcaggacgtcaaataagattttctcttaatgaatttcctctcttgcacacaaactcatttcactactaccattacttacattcaggttaccaaattcaaactttcttattagcttaattatcagacagagtctctttgcaccaccctaatgtcctaagattttcatattcttttactttattctacagattgttcatgcataccatagattcaatatctaccataaaagatatatactacattaaaaaatatcctgagagagaaacaccatcatttcaaaaactcaattagcaaaatactgaattaagtaaatgtggaaattaagtacctttagttcagaatttttaaaagcaaaatggtatgaattgtcaattccagtaaaatcaaaacaagacataatagagtatgaatcaaaatacatcaaattacatatatacctgaaatagcccacagagcataattgttaagcttagtacaatctgcaactttcaaagaactcaaacacttaaaagctccaagttatccattctccatcgacataattttgatctctgagatcaactttctccacagttttcttaaaaattttgagtaaaaaaatagaaacttatatcaaaattcatacctttaaactttgataatagatcaaaatacaat

SEQ ID NO: 335423 - DNA, 887 bp, Cannabis indica
agataagtattattgtaagttttcatatttttagtaacgtccatccgaatagtggctactaagagtaggacttacaagttatgaaacaatggtgatagctcatgaaataggaatgaccttcactctcgactaaaatgaagcaacgtcagattgtcttttcgatcgaataaaaggtttctagaatagttttccattttagatgagttgactactctattcagtgaatggtctctttgactcttgactcaaagcgaagcaatgtatcagtttgttggaaaacttgaaaattatttaagatgtgtttgttttgtattttgacatgtctttcttacttgctaattgtatgataatttctgaatgtacatgaatttatattgaacaatgttgtgttccgttattatttttgtagtataatttcgaatcttcattgttggtctaacttagcttgttgttttcaatgggacatatcccaaaggattgtcatccattagacaaacataatagtgttagatctcaacagataagtatttgtaaatgcaacttctagttgtccatccaaagatgacgatttagactagtgtttataatatgagacaatgaaatttttttaaataagaataactttgactctcgcctaaacgggacatcgttggattcttctttaattcaaaattatcctttaatatttcttcttagctttttcatttagaatttgcttaaataatatatcattggatgaatggtttataaatcatctgcttatgatgtcattctactttctcttatgaaattaaatggcgcagattactatattcctgacattctatcctgaaatgatataaatcctcgatcttagaaatctcctacttgtaaatgtttactttagg

SEQ ID NO: 335424 - DNA, 509 bp, Cannabis indica
gtaaaataatttccaacaaaatgctcgctggtatttataggcaaataacgaaaaggggtaatcatttaaaaagaacctcagacgcctcggttcccccaaaaagcgaatatgggaaatcaaaagcaaacaagtgtagctgtcaaccctggtgagagaaagtttgattttgaaatattaattgcattagagcatttattagccaaaaaccgaagggacacccagtcagcctcacattgagtcatgaacagacacacctaacatgtgtcacccattcaaacgcaaagaaagcttggatgaagtctacatgcaacttcggaagtcccgtacagacttggggggcaaatgttatcccaatttctgcgctctgacgcggcatcacacgatggtgacacgtggaatcaactccaagtatctgctcgcaaggtatagtctaaacaggatgcctcgtatgcttgctcaagacgaagcagtcagtaacccgcacacaacgacaaacacttagcaaattt

SEQ ID NO: 335425 - DNA, 689 bp, Cannabis indica
ggccttaggcagggggaccccatatcccctctactatttgtcttgggcatggaatacctttctagacttatgatgaagattggtgagaaggaggattttcacttccatgataggtgctctcaacttaggatgaatcacctggcatttgcagctgatgtcctattgttatgccatggagatataaagagtgtcacttatatgctacaggccctcaaattgttttctctcacttctggacttcaccctatgcaagtaaaactgcaatttattgcagtaacatgcaagaagacagtgtgaagaagttgatagaagtatctggtttctctaggcgggttttgcctttcacttacctggggattcctatttgtcctaagaagatatctggcaaagaatgtgagttactggctgaacgaatgactgctaggatcaagagttgaagctcaagaaatctttcctttgcaggtcgaattactctaatcaactcagtcttaataactattcaggcatactggagtcagatgatggtgttgccaaaaaaagtgatcaaagctatagaagctatctgtagagcctttttgtggaaaggtctagctatgttccatggtgctgagctgttgcatgggagaacatttgccagcctaaaagagcaggggtttgggaattaaaaagcttgaggagtggaataaggc

SEQ ID NO: 335426 - DNA, 652 bp, Cannabis indica
agtaactacacctcgtcttcacactatgttggtgatgatgagtttgggtgattcaaccacaatctctatctacactttagtacttttttttttgttatgtgaagagtatatatgtatttggaatggatttgaatggtgtggtgtggtaaatcttcagcttccacatgcacatctctggattgatttagatgttaataccaggtatgtttattgatttcaaaatcactaattcttttacctctctttctctctatctgtatataaaaaatgtaaaattccctaatttttttattcatatttctaattttattttttcaaatccctaatttctttacctctttttctctttaactgctatatataaaaatgtgagatgcctaatatatttctattttttcaatttttagtcataaataaaatttacagccagttaccattttgatgaaatttatcttcagttacacatattttaatttcagttttttatttttgaatttcttggactgatgcatgtttggtaatttttcccttaaaagaaaaagctaaaaaaatatatagataatttctagggttttttttttttagaaaaaaaaaacaaaaaaataatacaactatttgttaatttatccatatttagcttactcatcaaata

SEQ ID NO: 335427 - DNA, 515 bp, Cannabis indica
aaaaatatacaactatttgttaacttatctatatttagctttctcatcaaatacgtgttacaatgctaaattttttatttttcataatttctgaatatctgttagtagagttttcaaagtatttgaagataaactttttattttatctcatattttgttacgtgttgaactaattgatatattagtgctgagtcattatatatacgtgatatatgatttgttagattgagagttatcctctctttaagggttagtataagtatactattctaacataatcaaacttatcaaataaacagttttaagaaatggaactttgctgtagaatacgtaattgcttctctaatttaacttcttcaacctctcaggtttggtttactaagtcattatatagacttgttttgttgtatacttaagtcatgctttcatgtatatatggttttatttggtgaaatttattattatgtatttaagttttatgctttgatgggtatatatgtgtatgttctcggttt

SEQ ID NO: 335428 - DNA, 765 bp, Cannabis indica
attgcttgttgcaatgttatttataagattgcaacaaagcttttgagctctagaatcagcaacattcttcctgaaataatttcccagtcacaaggggaatttattaaaggaagattcataggacataatttaatgatttgcaaagatttggtgagacactactgcaggaaagccaataagccaagttgtatgatcaaacttgacctccaaaaagcccatgacacagttgagtgggagttcctggaggaggttctaattgggctcaacttccccagcacatttgttcaactcataatgaattgtgtatccactccaaagttctctcttatgttcaatgggaccttacatggtttctttgaatctaagagaggacttagacaaggagaccccatgtctcccctgttgtttgtactgggtatggaatacttttctagattaatggggaagactggagagaaggaagatttccactttcatgacagatgtttgagcctcaaattaaatcatctggcttttgcagatgatgttctattattcagtcatggtgacttcaagagtgtgctatacatgttacaagccttaaagctcttctcattaacatcaagtttgcaacctaatgccactaaaactgttatatactgttttaatatgcagcatgagtgtccactttttccaccagtacatcccctcttgccacatactctatgatgatgtgatatttcctttctatgtgttttcttctcttgtggcttcgaggttctttac

SEQ ID NO: 335429 - DNA, 802 bp, Cannabis indica
actttatcttctgtccttgtaccacgaacccttgaggttgctccacataaatttcttcttcaagataaccatttaggaatgctgacttcacatcgagttgaaaaatcttccatttcttttgtgcggctagagctattaaagccctaatagtgtcaaggcgtgcaactggagcaaatgtttcgttgtagtcgactccgtattgttgtgagtatcctttcgcaactaatcttgctttgtgcttttggatagagccatctgcgttgagctttgtcttgtagacccacttgactcctatagtatctttgtcttgtggacgatctacaagctcccaagtctcattcttcataatcatctttatctcttcattcatagcttttctccatacttcttgtttatgagctgcttcaaagctttctggctccataagtactaagttgcatgtctcgtagatttctgatagtggtcttgttcgccttactggtgagtctggcggagattctatgacttgtgcaggttcttgtgttgttggttgagtaagaacttcattttgatcagtttcttgtcttggcggtagaggaatattgactgtctttctttcaacttcttgtgtctcccagttgtatgcagcatcttcgtcaaattttacgtctcgactgattattagcttgtttgtttctaagctatagactcgataaccttttgattgagtactatagcctaagaagattcctttctcagtcttctcatcaagcttgctcttttttcttttggaatatgactatagcatatgcaaccgaagact

SEQ ID NO: 335430 - DNA, 679 bp, Cannabis indica
acacaactatataaaaaaataaaactaaaaattctcctaaaatccgacacaaatttatacaccccttatttcatataattttcaaaaatatattgactctttaaattaactctgcactaaagtgtttgatttataaaggtgatttgaaacttcacatatctatatatctatatatataaaagaaaaatatgagggtgtcatgatactctaaaatctctcccaaactttttttctcttctttccttaattctcttatttttaatattttattggagcataaatttataaattgatattttactattattttaataagttatttttttcttctctcctttattctctcatttttaatatttacttagaacataaatatgtaaattaaaatgtttatatcattttaatatatttttttttaaaaacacacactatatatacactatcatacgttaattaatatattttatttgatgtattttttttataaaagaaaattgtgcagattcacttatttataaaagtgagtaattaactcattatttaatttgttttatatatacaacgaacatattggggtaagcctaacatcatgttatgtgagatatgacaataacacccttgaatgtaatgttgactacaagtgagatatggtgacaaaaacggttttaaaatcatatga

SEQ ID NO: 335431 - DNA, 509 bp, Cannabis indica
aaaaaaaaatgtggttcagtaagagtattacaaactactctatagagattggatgtttcttctttttgataggggcaagtaacaaggaactaagaaatttgtttcatcttttaattctgctaaaaccagaattctcttgcattataaatgtataatgtatgacccaaagattttcccccaatttatttggcttatagcaattgttaattacttgcaaaaattatgaatgttttctacttacttacattacatatactcttaatataaaataaaattaatttcaattgtatggttgttggtttgcttttgattttttgcatgtttatggtattgttctataatattctgcatactaaaacatatcataaacaaaagtgatccgtacttaatttaattgatgtatatagatataattcttactcggcaaagcaatttttgtgtcagtttttcataataggtaataggtaaaaaaaaaatgtattttcataatagatatgacatttttaaac

SEQ ID NO: 335432 - DNA, 611 bp, Cannabis indica
aaaaaaaaacaaataataatatgaaaaaatagttcttatagttttcatggatttgaaaaatgttatggacaacaaagcgtggattaatgccttaacaaatagtgaattattactttcaacaaataataaaagtaataaaagtcccctcaacgagatatacacaatcgaaaatcaaacacaacagagcagcaggagcccacccactctttttctctatttcctaatatcctcacccttcatttctatatgattcaaacaatcaatctgaacttttccttaaaatctatatatagctaagtcatttcttagatcaagcttactaaaatggtggaggcatcaggtggtttaagtgttaggcatggctggaggagtacttatcagcttcgtagcttggggtcccaagtgttagagattttattacaatggaagaaaatcaagatattacaactctattgtaatacaatacaaagaccaacaaagagattaaataaatattacaacaacataatatacaatatatatatacactatatatatattatatataagaaatatagaagaagataagaacacatgtaatataaaatttgtatatataacaagagaataat

SEQ ID NO: 335433 - DNA, 460 bp, Cannabis indica
ggtaaaataatttcctacagcttcaatctcgtcgcgtggaagagaaacgataacgataaaaacacttagcgtatattacatcgtatacaaattaagtataaacagtttgctgaatcaagatgacagacagcgaggtgtctatctcgctagaagatggcatgcatgcgagaaagatcatctcgacattggaaaatgtactcgggaagttatatgacgagccacgctcgccatcaaagttaactcggctccattcctagcgaggcatccccatgagataagtcttaccatatatctttaaatatgcgttcatctcagcccaataaaagcgggatactcacagctgtgtggattctaaataaaaaccgcatttacttagcataatttgtaatcaaatcccatgatttgagggaataattgttgtaaagattacaatcaaattttgtaatttactgcccactat

SEQ ID NO: 335434 - DNA, 840 bp, Cannabis indica
gatgttaatgaaacatacatggtagtaaatctacatcctggtaaaatatttccaacagcttctgcatcagcctgagtaatggcaaacacccttctggagtgggtttcgccggagcctttggtgtttcggttctgagttgagggcaatccctcttgtaatgctctggcatgccacactaaaagcaccattggcctctacactcccccagatggtgccttttacaactggggcattctgggtaagtgtatcgggtctcagaactaccctgatgactgcttcgaccctggttccctcgaaacctcttgttctgacctgagccaccggttgcaatggatgctttccttttctgatccaaggccgaaccactacctcccctgctaaagcctgatgcaggaggggtaggaactctgccaaccactggagtcctaccagactctgacgtgcatccaactgcgccctcagctcgcagtgccttttccaccatttcagcataggtggttttgtctttggtagtaatcattaggtcatgtctaatcttcgcattcaatccatctagatacttttcctttttactgaaatctgttggcactatacccgaggcccaccttgccagacgatcaaactgggtcgtgtattcagtaacactcatattctctttctgagtcaggtgggtgaattcttttctcttggcacttcggacgacctcattatagtacttggcattgaaaagttcctggaacttttcccaggtcatcgtagtaacatcatgtatcatggacaccatgtcccaccataccaacgcatcttcttgaaactgaaaagtggcacagaccactatat

SEQ ID NO: 335435 - DNA, 674 bp, Cannabis indica
ctatgttttaggtaaaaacctgggtaacttcatagaatatgacctgtaagttggcataaccgcatacaatatacttgaataggcactgtttcacgctttgaatactcgcgggtattcagatgaacaattcgaatactcgcgggtattcagatgaacaattcgaatactcgcgtattgacaagatttacttacttttgattgttggctagatcttttaggattttatatgctgtgaattaagtcgcgagagcattaactgagtttccaaatggtgggtgtgtcacagtattctaatggtcatatacgcggttatatgtcccttgagatactgtgatacacccagccatttgtgacatgcgttaacgttcaaacgagcgtactctttggctggtagatattctcggaacggtgggagtaccccagtaacttcagggtcatgcttgaaaacgcatgccccttgagtcactgggtttctcccagccatttctggaggtatatcgcttggcccaggatgcgtgacttattcgcatttttagtattatctctactcgcatattgatggggcggtcagcattcacaaggatgctgaccattctatcaagtgcgactttatagtttaatgcgggtgagatcacttattttgcttttcacacattcatcacgctgaaaagatc

SEQ ID NO: 335436 - DNA, 1735 bp, Cannabis indica
agtgtttccgcagtcgatatgcgtcgctttcgtcttcccacatgtaatgtacttaatgcctcgctctatgcattcaatgccatatggtttctcgttaatatactaagcaacaatttatatatcgtttcttcgcataagacctcacagtaagcaagttgcaaatatactctgccacttatgcaatcaatgagttattccattaaaagtgatttcgtcgatccatattctcttcatcttgacacgtgtcctccattgagatgttagccaaattttggccgtaacagatttaaaattttggttggtacaggattgtaccaatcagtatttgttttttgtgagttttttgggaatcggcgattttcgtattttggccataacttttcactcgggtgtccattttagacatttcatatactatttttaagcttatgaagagctctacggtatgaaacatatattatagccaaaaatatgtattttatttttgggtgcttttaccataagattcagtagaaaatcctagggtattttatgcaggttttagatagtgttttggaatagagccttattgatttactgttgtcatgacataggacctgagatcgtcgagcatcgttccactcaggtcggcctgcacacttaattttggacttgaggtaagaaaagctatttgcactactatgcatgttatgtgagaaacaataattatcatgtgtggctcgattatgatcgaggtaaagatatggtcattactgttattgagaatgagcaaagatacggtcattattgttattgtgaatgagtaattactcgcttgaaactgcatataggtttcttacttatcgattgctttatcgggcaacgatagtgacatatgtagcttgtgggcaacaagtggtaaggatgctttatgaagcaccaaagtcggcttgtcttataagacaaataattgttaatgtaatgtctaaatatgcattgaataaatgtttatattggatgataagtgtgtgggttatgcaatgttgtgatttctcatattatgcattatttgtgtttcaattgcttttcttcctaagtctttgtgactcacgggtacttagtggtccaggtataggaaaggggaaagtcgatcagccatgagtcaaaagtctccgagcaatatacatatcaagtgtggtgtctcggcttccagcagacaggatccacccttttgatcatgttttgaaaatgtaaccctctattgtaaaagtggttttgtaatgtgatgcgaaagcttttaaataggggatccctaaaaatagcagtatttcgaacagtaagacaagttttagtttgattccaaaagttttaaataaattgccttttattatattgttaatttataattgttaacgcagattttcgttaaccaaatttgagcctcacgattatgattcaacactgaaataataaaactatagaaaaatagaatatgaacaccaggtttttacgtggttttacagttaaaattctgcatagtccacgagtcaatcttattctgatttctgagtctttttcttttagggcctcttgtgtaagagttttttcatcccccttttgatattgtttgccactatttatatttgcatagtgacatttaattacaaggctgaccaaaatgtaattacatttatcatcccttaaatcgtgggatctgattacacattacaaaatgtaaacgcggtgcatgattttg

SEQ ID NO: 335437 - DNA, 326 bp, Cannabis indica
gttcatagtatctactattaaagaaaaaatgcattaatcaatccaaccaacaaacaaacaacttatttatcaaagattcaaatcaaactatatccaatatccatagtctataaaaatttaaagtctatattatatatataaaaacagtaataaaaaatatatatatataatatatttataaaccgggttggcgggcgggttcgcgggttcgcgggttcaacccgaaacccggtacccctaaaatctcaactcgcccgaaacttttaaaattttttttgtgggttcaccagttcgggttcgggcgggttgctcgggttcgggtcaaa

SEQ ID NO: 335438 - DNA, 902 bp, Cannabis indica
aacgttggtacgagtcctcaaggtgagagaggtggtgatgtgaacttagtggagagaacatgcacttgcggacttttccaaacgctcaaaatcccttgtccccatgcatgtgccgcagcagttagtcagaatgtgagcgtgtacacactttgctctccatattacactaaagaaatgtggaagaagatctacgatgccacaattaatattgttggcgaggaggatgagtgggtactaccggaacatatcaagaacataagaatcgaggtaccagtggagaaaaaaccagtaggtcggcctaggaagagcaatgcaggtagaagaccgacgaagcgccaacagtctagtggtcaggtggtagtggaacctcgtcattgttcgctatgtcacggtgcagggcacaacagagctacatacaaagctcgagtttgaactgtgtctcttatttaattgaatatgtgttgtattgctggttgttgtttaacaggagtatagcttgaatatttaacaatatgcatggatattttaaaagtgtgtgcgacactgtgcgatatttttgcgatgtttgtgcgatttgctctcatatttgcaattgatttttgcgcgcaatttgtatgcgatgtgtgtgcgactttgtgcgattttattttaatttgttatttgagattcaaatgcgatttctggctacatttaacgatgtctacgcgatgtgtgtgcgacatttttaagcgagctaagcaaattattatttcaaatttgataatatttgcgatttttatgcgatatatatgcgacaattgagcgatttcatatttcacagtataatataatacaattacaaaagtttatgtgtataagaataatattacaaaaacttacaaaaaactaccatgtcaagttct

SEQ ID NO: 335439 - DNA, 897 bp, Cannabis indica
tagacttttttttactaaaattagacaaaagtccttaaattcaacaatcccaatagttcaaggagcatttttaacgaccttaaaatttcatggggcatgatttggtacatgtcaaagttcggggagtaaaaatcctaattagcctaaaatttaattgataatgagtagaataatttatatattttatacattactaatataagactttgtaaccttaataggtaatatctatatattaatataaaagaaaacacataagagtctatgtggctttctaaattttttcttcatatttttttaattttttgagagtgttgactgaggttttcggcaaccaattaaataatatatataagaaagctgtagaaagtttaatgcatgtaatttttacgtggttggggcattaacgagccttagtccacgagtctttgttatttatgagagtatttattacagagaatgttcttggtgaatctctctcttattttctccctttgattcctatgaacccagaattctcgacccttgttttagtgtatttgtggggtatttatagtgtttttctgggagaatccctagaactgaatcacttgtctttctgtgcaggttcagtaggggcacatattcctagcagataccaaataggaaatacatgacctatacgtaggtatcttaggagttaggtggatataatcttttatcccttcttgattgatgtgatccctcataaagtagccatcactagccttattaatcacagcgtaataactgcaaaagaggggttacgccgtcagccatattgcttatggtagttccaatacgttttctcccatgcgacattaaatgcgaggtgactgttcaaatagagttcagtacctcccggagatgccttagcat

SEQ ID NO: 335440 - DNA, 560 bp, Cannabis indica
ttttctgtatctgttcgtattaagaattattttcaagttgattataataataaaaaagttgtcaaaaattaagctcagggtcttatttttactattttggaaaatacatggtccattttatcatttaacaaaatacagggtccaatcggtaacttttgcaaaacacagggtccaaaatggtattatttacccataaaaaagtgctaagctaatattaaagttgttgatgcgatttttcgccaactgatttaagaagattgtaaatgtgtaagatgaacacaagtgaatgtcgatcaaaataaactaatttacttattaattttcttttttatgacgaacacaaatgaatgtcactcaagagtgttcgtcataattattttattttttttatatataaataggtttactttgatcgacataattaatcttttttataaaccagtttgctttgatcgacattcacttgtattaatatcaaaaaatttaagagatcaatattgagaaatgtatattttggtttcaggataatgttttattttttttatttttaaaacattaat

SEQ ID NO: 335441 - DNA, 728 bp, Cannabis indica
agtggaacaactgctcggcgaattataggctcctaaatcacatcgataacaacacgcataagtgactcgctaaaacacaaccgggacttaggttttaaaccaaaaacctatctactgcaacttaatatggaaataccctaaactagcagggaatcaaccaactagaaacctgaaacatacgcgaaatgataagctgaaattttgggttttccctgctgcaaaatccgggtaaccggttttacatgcattgtaaaaccggttagccggttttacctagaaaaccaacaaagcttcaaaccctaaccaaatcgtttccaaaccaaccaaactttccagacctgcataatacaccccaataaacatttctcaagcaacaaaacaactacccatgctcagaatcaaatttcaccattaatgagccaagcttgagttctaaaattcaaagcttggttaaacctactaaaagccaacaatttaagcttaaataaacctaatctaacataaattagccccagaaaacaaattcaaacaaccacagttactacagaattcaaacaaccaaaatcatgcaaaactctaacttcaaactcaagaaaaccaagaaggagttaaaaggagcttacctaaagcttgaaaccacttaaaccttgctgaaaatcacttgaatttagggagaaaatccagaaccctaaatggttctatagtgttcgaaaagagagagagagaga

SEQ ID NO: 335442 - DNA, 1013 bp, Cannabis indica
atattactaacaccagtgttgaaaatttttctatatcagataacaacactacagattatcaacatatgactccaagcagtaatcttgatgaatcagaatctactacaacacctaacacagattctaatcaaacaaattcacaatctgctaccacatctaatacagattctcctctgcaacaaactgattcttctctgcaacaaactacaccagcaccaccattgagacgaacaaatagaatttcaaggcctccttcatacctccgagactacacatgcaattccatcattcaggacaagagttctacaccccattcctcacataaatatttatcttatgaacatctatctcctacttataagaaatttattcttgccttgacagcttatttcgaacctagcaattacaatcaagcaacccaatatcgtgtttggaatcaagccatgcagcgcgaattatttgctctcctcaaaaacaaaacatggacatatgttccattacctcgaaacaagcatgccataggatgtcgatgggtctacaaaatcaaatacaacagtgacggaacggtggaacgatgcaaagcgcgattagttgcacaaggatacacgcagcaggaaggattagatttttttgatactttttctcctgttgcaaagatggtgacatttaaacttctgcttgccgtggcttccatcaaacaatggcatatcctgcaaatcgacatagacaacgcctttctcaatggcgaccttattgaagaagtctatatggaacttcccaaaggcctcactataccagatactgtggacaaaggatcaaacatcgtctgcaaactcaacaagtcaatctacgggctaaagcaatcttcacgacattggtatcgtaaattgtctgatgctctctttcaagaaggctttactcaatcaaaggctgattacaccttgtttaccaagggtacgaacgattccttcatagtgctactcgtttatatcgatgacataatacttgctgga

SEQ ID NO: 335443 - DNA, 825 bp, Cannabis indica
cctcgaccatcatcaggtagcttatggcatacataaactagggtgtttaggatttcatccttgttattattaacccttattttttgttgtaactgcataaatgactttcttgaagtccgctccttctcttaaccgcaagctaaagcctgggacgatagcaacttcccctattgcttctcagaagaggaaaagggatgtggtggttactcctgtcgcagattcttctaagaggcctgctaagggcattcaggagaaagggaagaaagttgtgatcgacccagcggttcgagctcgtcatgtgatgtaccttcaggagagatttatcagcgatgagttccagtcgaagattgacaagactcctactgaggagctgctgccttgctctgcggagctagctacgcagtttatggccatgttctcgaaggcttttgctacagggtccaaggaggttgaactcgcgaagaaacatattgctcaacttcaagaagacattaagaagctgtagcaagatgcgtcttctaaggacaaagagctcgaggaacttcgcaaggccaaggagcaagtcgagcttgaggccaagcaaaaaatcgaagagatgtctcgcgacttggaaactgagaaggagaatggaaaaaagcagtatgaccaggcggtctcagactacatctatactactctctccaagattccagactttgacttttcaatccttggagcagaagccgctgaaatggccgaggcttttcgcgctatgtcacccacaccaactcaaggtggtggagggaaccttctcgaggagaccgaggtcgcggaggtggaggaagt

SEQ ID NO: 335444 - DNA, 880 bp, Cannabis indica
  modified_base (830)..(830): a, c, t, g, unknown or other
ttgtaagtttctctaaattttatagattttattttttatacaacaaaaatatatgtttcaaaataaatagatcttatccgctcgaactaagactcttagaatttttgtggaaaaattacgactaacagtgcagaatcaaaataactaaactttaaataatcaaacaattatcaatgataagatttacaaacactaaacaaaaatcagagaaaaacaggggcaaacatagtatataaaaccagcaacaataaatgtagaaaataaagaaattaacactaagatatatactggttaaagtctgatagatcgatataatctatggctatactccaattctgaaacaccaccaaatcttctttattgattgagcaagaatatgtacattacactcgagaaagattctctattaagttctctcaaagcttttcaactctcacactcttacttaagaatcttcttcatctacagaatattcttcatacaaaacccaaacccaatctctctctctcttttctcagtacttccctttctacctttcaatctttttctctctctaactcttaatctcaatctaaatcatattctgaagatgacaagtcaaggtggtatttataggcttaagatcaaaatcctaaagtcaatggctggaagaattgaagttgctaagttagttagacaataactaacttaaccaactcccctatgagcgagatcttcacgtcagcataagtcttagtgcatccgggaatatatacgtgcttctaggatcacagaccaaaggcactcgctgaagaagcttccagataggataaaactgcaggagtcaactntccagactaccttcgggagataacctcgagaggataactagctatccaga

SEQ ID NO: 335445 - DNA, 1859 bp, Cannabis indica
ctaaaaggattaggttcttgcttaaatgtattacatgtgttctttagcttgttcgttacagctgaccatttagatcgacccaatacttacatcttgggaacacggtagtgttagcgtttatgccctgaaaagcatgtaaagacatttttaattattaataaagagttgaacatttttatatatgtataaatattaaattattaatatttatcattgaataatttatatattaaatattggaatattccatggttgtggcttgtagctatacagagaactaagactacttagctaaggataaaacaatccccaacatattaaaattatggaatttttaatcaatggttgctagtacggttcattgatgcccgttcactactacaatgttggcctttagaggctattttttcaaccacatttataaaaagggaagctaaagggtgtgaaaatacccgcttagttcgaaattgacatttactgtaatctcggttcggattacgaatgtagtatgatatcaaagtgaaggtgttgtatataatagagattatatattataatgatcgatatgaatgaagctgtctttatctaacatgtcatttacataaagacatatttaatatcataacgagatcaatagtagaatggcctaaatcttgagtaattacaaactcatgttcatgttattagtttctttgactcactcgttaaagtttcttagagaagatgattcttacaacttttattttgggactctaataatgtggatggttgggaacatgatctacaattatggaatcgtgactttcttaatagattgaatgtcgattccctttaagtgttaattctagaattggaatattatgcacaaatttagatgtgatctaaattatacttccactagtaaatcagtggtactgaaggataatgaagtaattagaagggtaaaatataattttaccaaaactaattacgaaccaacacatggagagataatcactagaattgattatatgaattgacactgtagtaaaactcagtaaatatacttctataattactaaaatttcaattctatattttttgcagagtaatagtggaattaataaataaaaattatttggttgatgagactcaagaaataatctagtttgttggagcttagagttataggtccatggcccccgaattaccaccttgaaacactgtcataggaagggatgaagattagtttaatgtcgttcagaaaaatctatgttaaattggaaaaatagtaattatttattttgtaataaataagtaatttttcaaattaataaaataaagacaaaaattattaagacaaaatttatcaaggcaagatttgttaagataaaagttgtcaggataaaagtcaccattcttgtcctaaacaaacaagaataggcgccaatccctatgcatattttttttgggttaattaattatttaattaattcaattagataaatatctgaatttgaaaagtagttatagatatttcaaaattattgagatattctctcaagtagttgagagattccctcataaatatcaataaccgaatttagttatagatatttatttatttaaataattatatataatttaattaaagggttttaactactataaataaaagcctaatttgagaaatcaaaacactctttttcacactaatattttcaaaatatagagagcagaaaaggaaacagttttttgtcttaattgttcttgctcatgtgttgagaaccgaacaagaacaacattatacactttatcctgttagaattaaaagagagattataatggaagaaaattaagatgcattacaactctattgt

SEQ ID NO: 335446 - DNA, 612 bp, Cannabis indica
caacgaatgcgaaagaagtcaagcccttaataggaagaatgacaacattaaacagattcatttcaaagtaaacagacaaatgtctaccattctttaatgttttacgaggcaatcagaagtttgaatggatcaaagaatgcgaggaagctttgaaaggcataaagaaaaatttatcaacacctccagttttggcaaaaccaataactgtagaaactttatacctttatttagctgtctcagagaatgcaatcaatgcagccttggcgggagaagagggaaagaaccagcaacctatttacaatgttagtaaaaggatactgggggcaaagtcaagatatccccctcttgaaaaacttgccttatgcctaattcatgcatctcacaaagtacgaccttatttccaagcacatcccataaaagtcttaactgatcagccattaagacaagttttatccaaacctgatacttcaggaagattgataaaatggtcaaatcgagttgggacaattcaatataacctaccatccgagaacatcactcaaaagccaagctttggccaattttctaattggatggataatctcagaagaagatccactcgtcaagcacgat

SEQ ID NO: 335447 - DNA, 966 bp, Cannabis indica
ccacactagaccaagcgagttgggatctatcactgacgtattttgtaatcttattttgccgcttaggtcgacacgtaaaatggacttgtaatattttgtgaaaatatttacgggatcccgaagcatatatcttttgattgtttgtaaagttaaaaattattacaagtttaattttcatcctgttgtaaataaagtttaaatttttccgtgcttacccttgcagtaatcccagtttagaggattagggtttcataatctgttttcgtgacgtgcctaattgttagggcattacatctagggttgtaccctataaagctagcctattcatgcctgagtttggtgaacgtggctagttcttggctgagtcatgggaccctggccgaccctttcaaggcttaaggaccttagttggcatgggccttggttctaagtgggtagccagttttttgtcctcttttgacttcggcaagaattcatctctgtatgcatataccaccttagtctcatacgtggttcctttggaaactctatataaaacttaatggcgagtctaatatagtcgaatgttcaacttaagactcaatattttccaagttgttacacttgagaatttgctaatatccaacttgtacgtggcttggaacctgtaaggaactttgccttagttgtagctcggtacgtgatccctataggagttttgtctagttcttatctggctatacagttcttgcagggccttggcctcatgcatgtgaaatgatttcatatctggcctcaaggctttcatgttcttgatttggcctataggctctctattttcaaacattcctattatttagccttaaagccttttatgacggacatatgatcctcttggctatcttcttatggccttggcatgtaaatgtatggatttacttgtcaagccaaagtgtaacaccctaactagcctaggcgtgttaacgt

SEQ ID NO: 335448 - DNA, 2222 bp, Cannabis indica
attgttgggtttcttcctgacgatgtatcaggcataagtatggacgttgacatatgataagtaccgggagtaggtacgggctcatctaattagacgatgtgatatattggtgccaagttgtggcacgggctcacctgattaggtgatgcaattatgtaccgggcgtaggtacgggctcgtctgattagacaatacgatatatgggtgtcaagctatggcacgggcttgcctgattaggcaatgcaatacaggattattagactaaagtatcaacttgcctaattaggcaatgtgatgtgatgaagatggttactttatgaggtaacatatatataatttatgatattaaatgaatatgattcgtattattggtagaatagttttgtattaccaaatatttgtatactgatgcttatttatggcagatgccagtagtaatttggattttatattatgaacaatgcgtgatggtttgattctaattgtgtataaatgattatattcgaatactaaactgtatgattattattattgattttcttgctaagtccttgtgactcacggatgctatgtggtgcaggtaaggacaatgaaaagttagagcttccatgaggtggctaccttctccagcaatgtacatattgaccccaccgacctgtgtgctgagttgcaagagttgttttggactggttgtatttgctgtattttgaattgctattgtctataatcttttgggtaaaactttttatagcaaggatctccgaaatacgatttttatgctgttataatgtccatttttagtattttatttaagttaagtttttaatattatcacggtttttaataattaattattctattagtattaaactagtttataaaatcacacatgtggtgtccttatggaataggacgttacaacttgatatcagagccaagttagttttgaaggtcctgaagactggtcgaatatgtacatttgctgcgaagacaggtcgactcatggtatggtaagtgtttatgttattcactatctatactaagataattatagtgtatgatgggaaaaaagtagcatattgactatctatactaagaatatgcgtatggtatatgtattttaatattaatatttgtttgagttttaagtgtttgtaagatgtggattaaatgtgtgataagttatacagtaagggcaattgaattgcctgattagcgagctatctaggctcagggtaaacggtaaggaagagaatcctttattgccgtaatactagaaacatgtaaattttactatgcaggatatgataagacaacaaggtataatagatccgagatttgaaagaacaacatgctcatcttatgtttgttcttgtactagcgacacttcctgttgtaccaatggatgtggtgaaatatatggagtcaaattactagcagatcagggagtaaaaactaaatgaaccaccaattatgggacagaacaaaaaggctccaggttgaccagactagtggtcaaggtgagaacaagagatggtgaccttatcctgagtgtcaaagatgtgaaaagcgccatttgggctaatgtagagccagatcttgttattgtcggggtagtgggtcatctgaaaagagcctacccacagttaagaaagactgatgttaaagaagaaaagtgtacaagtcatgcccaagggccaattatgattcaaggggactcgaatatcggtccttcggccaactcaagttagaattttatgggcaatattatagttgttgtttcaattgatattgatattaaacattgtacactcaatgaggggatattaaaagatctgaatgggcagtgcggtatgttatttagtggttactcatctgacagggtagacagattagaaaaatgacaatatgagttaaatttgctaatattcccaaatggaatataggacatgagtagctaatggaggtattcatataattgatttgggggaaacgaaatcttttgattaaaagtgatctagagttagtataagtgagacaatttatgagtattgtctaaaaccctaggtgaattaaaggcgatgattgtgtgggtggatctattcactactagggggcatgacactcagagccctgtgatctgtgtaggaaagactgttgtgatatttagcacacgcaagtgtacgtatcgtttaaagtagtgaactcgcgaggagtgaggt

SEQ ID NO: 335449 - DNA, 718 bp, Cannabis indica
ctttcattgagatttgaggaaagtattctctactcttgtcatctacaatactggttgtgactggaagcatgagaaaaaatccatcttctcacaatgacaatgaaaatgtcacagttgatgaaaaaaatgccccctctagtggagtttcaagtgaacattgtaggggatgatgaggcattgaaaatgtaacgccctaacatttaggcacgctaccaaatatgattaagaaaccctaatcccctaaacgggattactaataaaatatgcgtggaaattaaaatttaaacgaaaacgtaatgaaaataaacctgtaataattttaaccttacaaacaaaagttaaatatttcaagatcccaaaaatcattttacaaaatattacaagtcttttctccttacccgacctaagcggcaaaatagagttacaaaagtttcaacactggtagaccccaacccgcttggtctagtgtggcccgaacatgtacatacatcgcccaactcccatactcatggctgatcagagacagatttaccctttcctgcacagtaaagcacccgtgagccaagcccagtaagaaagtaaaatatatcgttaatcatatataacttatcacataaataataatgccatttcatgtttgtctttatgacacagacatgcgtgttactctcacacgcctattcatgtctatgtggcatagacctacgtgttacgctca

SEQ ID NO: 335450 - DNA, 1125 bp, Cannabis indica
ttgagtgagtttcacatgttaaaatgagaaatggaaagttgtaaatttaaattctctgacttcatgaatcttagttattttgaaaaactagacggacggttgaaacagaatcaaaattagatgagcataacctagcgcaccatgccatttgtcaacatgggcgctgggtactcattcttgagctcttgggatctcgttttgatacttccaaggttcttgaacctgagaacgaggtctcttacctcgcgtttgaccattccaaattcattggtcgaatcaaattttgcatttgagcaatcgaaacagcaccccaagttgattcaacttgggcgtttaacctagcaccaggtgaacctgggcgctgggctctgtttccaggggctcgagtttgtggttttctccccgagtttgcttgaatcttcattatatgtgatgacaaaaaaaaaaagactgaaacatttttttgtgaacttaattggaaacaacctaggattacaatatgtaaccttggcattgggtccagtgccaggtgttaaactgggtgctgggtcccagaccccaccccaattataaccctttaaaagttttgtttggtactcaaaaatagttgaatcttaatcttttctaaaacaaagaagatgctcagaagagttcacgaaaaacattaccggaatcagcctaagttgacaaaatgtcaacttgggcgctaggccagccaatgagtcaagctgctagctgggtcttgcttctggcacccaagaagtgttgtttctttcccaaaagtacctattttcccttttttatgaatactcagaatatacaaaagtctccttaaaaaaatgaatatacaaaagtcaagttgtcgatttgatacttggaaggcgcctagatcgataaattgtcaacctaagtgctggggtgcttgggctccaggtgctcaaaaataaacttgctctgaactgattctgatcccttaaatatattcgtggtatgtttagttgatgtcacaatgcaaagtttgaccaatttgcactaagacggtcataaaaactaaaatcctagttaggaatataaacttgggcgttggatgaaaccctaggtgcccaggttggcttccaagttgca

SEQ ID NO: 335451 - DNA, 1016 bp, Cannabis indica
ttgagagcgagttgttaatttatatgatcaaacgtcatggttaactcaaagagaactcccgctacaacatcaacctatgacggttgatcctgatgttcgtgttcctgttacagctagaatctccataaactcaatggatgtggccactcctgtcacctcgacaagcaccaccaacctgaccaccacaactagacaggttgacacaaccaacccagttggtctcaatgattgacctttccgcccagggaggaccctccactggcaccccataccgaaggaatggccaacgtggagcaatcctcaaggcaccacaattggatctggtattatgctggagagacgggtctaggaattggtgagccaaccattggcgagccctatgtggacttaggagaagatctcgagctggcaaaacttgagtggctttatgtcaagtcagcgaaactgaagaacgcgttgttagctgtgatgtattcgcacagcagagacatgaatttctgatatggatggatgactaagagtacatcctctgatctcaccaggtggagctggaccgctgtaatagagaagctaacaacctgataaggcagttcaatgagagaactattggaagagatcaagatctcattagagatcctctctaagggagactagtcgacagatcagagagggtctatcaacaaattgtctaactaggttcctctggaaccaagacaaatcttcccttacttgaaggaagacaagttggtggcgagaaaagcctgatctcgataactagtggtctggggccagccaaggatcttgagctcgatgacaccctagccctaattggtcaacctttggtcggtcagccccttggtggtacacctttggacaactaacaaggtgaactccagtcttggggcctctagcaacgagtaatccaaaggtcaataagtagttctaaaatttaccaagtaaattttatatcttattaatttttcctgactccactatagattcagaatttcactcct

SEQ ID NO: 335452 - DNA, 1085 bp, Cannabis indica
gaagtctaacgaggaggagcttacggctgaggtgacgaggctgggagagaaagtcaatgccttagagacagccggtctcgagctcttttatgacttctgaaaggctaaccttcaggcaaactttgattacttgggtgaagccaaagatatgtatttagagttctgcgcttcccaagtggttatggtgaaactgaggcagttgcttctacctccggccaaaatactgatgtacctcccgttcatacaatagatcctccagctcctaccggcccagaagatccaaaccgagagcctgggactccagctgttcaaatacttcttcttttatccttcctttttttatatatcttattcggccataagtcattttttaagacatcatgaccgaccaagtggtctttaaacttggaattagttttcattttacaaacaacgggctgaccgggcagcttttaaccccggtattacgtgcttttgttatctttaatggatatcattctctatttataatcatcgtgcaattgtggctatattatctttaccaaatgctttgtacaggtataagtgccccccaagtgaccgagcagacttatgactcttggtcacttgtttcttagaagtatacttttttacctgtttggggttttgggttcgacgaaaccttttgtatgcactggatggtaaattagcaacatgttaataattttgactcaatttgaattttgaaataaatatctttattcatttattgatcaaaaatttgtttgttaccgtagtaacttacatcagagctatttgatctaatctgatcttttagcttaacatgaaatgaaacaaattgcagaaataagaaattgtactttaaatggtggtcatccaacctgagtactttttttcttttgtcgaaacctttgagcgtagtcccccagtaggccattcacttaaaattaaatgttcttttagtacttagtgtggtcgtctgacctggtactttattggtagtattttcttaaatgttccccattccaatactgtggtaatagaacgagttgcatttttccatcatatttacctaaattgtatgc

SEQ ID NO: 335453 - DNA, 726 bp, Cannabis indica
tgaaacaccataaaaggaacatgctgcactcatctcatccaacactttcaacttgccaaaatctagttcctaactctgtcagacaactagtagatgaaagacaccttctatagtgatttcaagtctccttcattgttcttcatattcgaaccctatagttatagagtgtcatgcccacacatagcaagtcaagtactcaatcatagtgagtaagacggtggtaagcaaacccgacggagagaaagagatctaggctcagatcttgataatactctacgacagaaaggaacaagggttagagatcttgataatactcagtcatagtgtcatacttcagcttgataaagtaaatctggacccttacctgtcaaggccataagaagacagccaagacaatcatatgtccgttatagatggctttaaagctaaataatagtagtgttcaaaaatagagggcctataggccaaagcaagaacatgaaaactttaaggtcggatatgaaatcggttcgcatgcatgaggtcaaggccttgctagaaccacatagcctgaaaagaacttgacagatctcttataggggccacatacttggctacggctaaggcacagttccttacagtattaagttgaacattcgactataatagactcaccattaagcttcatacaaagtttctaaggaaaccacatatgaggctaaggttgtatatgcctacaaagccaaa

SEQ ID NO: 335454 - DNA, 724 bp, Cannabis indica
tgtttaaacaacatacttgtgagtagatctaagatcttggtaaaataaatattccaacatgattttcggaggtcttataaatgaagttcaagaatttccaacaagatctagaatccttaaattgggctttacaaggggagacgaaaaaaatttaaaatatttgaaattttaacctaaaattgaagaacacttgaagaactgatggaagcagaactctcatactctcagttctctctgatagacgtgtaaaacagtgtgggaaagtgattagaggagttctctatttatagcaattgttctcctccactcctaaaccaataaggagtgaatttaaatataaattttaaaagaaagataagagagagaaaaatgctattatcttttacttttctctcttttcttttatctttaaattttgaattccctatttcatcagggaatacaattttcgaaattcctaatcccactaggagtcattgaagaacaaaaaacaattgttgagattgtcaaaattgatgcccacctagtaatttcgtatgaaatggggttcacgtcattaagtcaacctcacacaagtttaaagttgactttgggggaaaattgtttacctaaaaactgaccctggtgatgtggacatcaatgtttgacacgtggtaagtaaaaaaatatctcggagttgagtagtgtaatgaccgctctagtaatgtggattagtaaaggcaat

SEQ ID NO: 335455 - DNA, 503 bp, Cannabis indica
aaatattgatttttttagtaagaaaatctgcaaaatagttttaaaaatttgtgtcaaacatattaaaattttaaaacgataaaaaactgttttctatttttacttttaaaaattgaaaactgaaaacacaatcaaacaagctcaaaaacacccctttaaatcaaaaaattctgttacatgatacaactattatttgatgagtaataattgtatgaactcaaatattctaatgggcgacttgcaatatatctattctatataaagtgtgtctatataactaaaattcttggtttatgagaaatttatgggtcactttaatttttatttaataaaataataataaaacaaatcctattaatatttgaactgatattttaatttttatttaataaaataataataaaacaaatcttattaatatttgaactgatattttaatttttatttaataaaataataataaaacaaatcctattaatatttgaactgatattaaatattgg

SEQ ID NO: 335456 - DNA, 937 bp, Cannabis indica
agtctaaattttgttagaggaaatttttttaagcattaaaaataaaatttccctatttaaaaaataaaagaaaagttatttttatttatttatttttaatataaatcatgcaattttattagtagcaatcagataagataataacatgcaatttaattgggacatctccctgttagtagggtcgggcttggactaaggtggactagacccgcgcctaaggcccacctagctcaagggctcgaaaaaaaatatttttcctttaaaagtatatatatttttttagtaatttttaaaactactatataatttttaaataaaaagcctaataatttttattttctaaggctcaccaaatctcagggtcggctttgcccgttggagacacgaccaggattattattagaaaaacaattcaaataatcacccacctaattcttaaattttgacaaaaaactaaaaataaaataatatgaaaaagattgcagcatcacacttaatcttaagaacacctatattcagttccgtctaccgctcagaagacaaaataaatggttgcagcaggttcattcaacctcgtagcttgagcactcaactattgagcaaggtaagtaattacactactaacaatcttttcagtcgtagagaaattgttattcccaaccacactaacaacaatttgatagcgagtcatcggagaacaaaagaagaaccaacaacgaaacaaaacaaaactaggtcattcagataagactaaaacactcaaaactatgtaatagagacaagactaaaacacctatcatagagacaaggctaatcgtaataataaaaatcgaatcacaatagtaaaatacaatcttgaccaagctgcacctatactaggaaaggctggcaggcctggttggaaaaaaaaaataacctcctatagctataaatttag

SEQ ID NO: 335457 - DNA, 493 bp, Cannabis indica
atttcgtgcccggctgttgcatcgacgagctgatcgattcttggaagtgggaaacatttctttagggtacgctttgttgaggtctgtgaaatcaatacagactcgccatttcttgttccgcttaggcatgatacggggttcgcgacccaagtcgcgtaaaaggcttcaatgatgaagttgttgttgcgcagcttatcaactttgtctttcatggctactgctcattctttatccagcaatcttcgtttttgctgaactggccggatgttaggatcgatattcaggacgtgcaaaataatagaaggattgatttcgaccatattcgcatgtgacccgacgaaaacatctaggtttggtctcataaattttatcaattccgattttacttcgagcaacaaaccctttccaattttcagctttctggccgggatagctggatcaatctcgatctcttctaattcttccacagctccaacattgctgcttgggtccc

SEQ ID NO: 335458 - DNA, 728 bp, Cannabis indica
aaataatggtaaataccaagtcccatcccgatatggacaatattaaaggtatttacgaaaataccactgccatacaaactaagcattagcatgtcaccagcatccacaccaacatgtgccactacttgaccaccacttggccaccttgtggacatcacctagcttgtatcgtgccatcttggcacacacgtaacatagcgcaaagcgcgacttgattcctcagtgtattataaaatataatagtgtaattataagactatttaatatgtaaagaccgcttaatttaaatttggaaattagcagataattatggttttattatgaaaattatttattgatattaaaataattatttttgacgatttatttgaattcagaatgcattttatatgtcatatatagaaatttcatatttttgcatgttcggtgcccaacaacatggaacgcggtgtatggatcaatagaatcacatcttagtatttttgtatagcggggcagtttaattggacattgggaatgttgagattagtcggaaatttagagttttcccaaaataccctaagtgaattgtatgactctttagtataggtaaggtcgttatggtctttttgcctattgagttttgtctttagtgagggtttaatattaagtttaaatttgatttttgaagcttagtttggctgaagcaatgtgtttaattaaggaaaaatcatccatttactcatttt

SEQ ID NO: 335459 - DNA, 507 bp, Cannabis indica
cctaagttggacattcctcatgaaaaaaaaatctgaaacaagtcatatttttcaaaatttccacaaaataatccaaactcaattccaaactaacatccaagtgttaaaaaccgacaatgcccgtgacttcttcaattctgtacttggatcatatttgcaatccaatgggatagttcatcaaagttcttatgtacacaccacaacaaaatggtgtggctgaacgcaaaaatcgtcatttactagaggtagcccgatctttacttttttcatcccatgttccaaaaagattttggggtgaagttctcacagctacctatctcataaatagaatgccatcacgtgtattaaaattcaaaactccgctgcaaatcttcctagaaacatatccccactcacatcttgtgtctcaaattcccttacgtgtctttggttgtgttgcatttgtccatgttcactcctcacatcgtagcaaacttgatgctcgagccacgaaatgtatccttcttg

SEQ ID NO: 335460 - DNA, 754 bp, Cannabis indica
gaaacatttttggtcctcctctgttaactcatctggttcaaaagaagcttttgaacaatcactattttgatggattgtgactcctttttgcttcttgaaatgaacatttttcttcattgttttgaaggttttcggagttacagaagtggaggacgttttattgagagtaatgactcttttatttttcttgctatctttaccaaaggaaactgaaatttgcattttacccttgggtagtgactgatcgattttccttagtggtaaagtaaagcttgtcatcagggctgtcatcgaatcttcgatcggtgtcaaagctttttgccctactcctcgttgacttttagggatatacttaaaggttcgtttttggttagataccttcaagttctcctctttggactgaggagatttcacaagcgatagtcgcttaatttgtggagagttttgtatgactgagttttcgtgatgtttgctctcctcaggtttccctttcaagatggtgacattagctggcttgtaaaattttgcatcggcataattcacttgttccccgtaaaagggattcgggtctgcattgacacttttgactttgccttccttgcaaaacttaaagcattggtggagtgttgaaggaatgactccatattcatgaagccatggtcgccctaacaacacattgtaggacgtatctgaatggatgacatgaaataaggcttcagatttaactagcctatttcaatttttagtgtgatac

SEQ ID NO: 335461 - DNA, 792 bp, Cannabis indica
cctgtccaccttggccctcacccgttcggtaggctcatttgaaggtccatctgcaagacctctcaacctgtaagacatgtctgtaaaaagaaagtagcaaagtaaaaaagcattcataaatattcaatacaagaacaaaagcatggtgctatcaactatcaaatatcatcatcatcagaagaggaactatcagagccctcaactacagccttgcccttgcccctagatgtaggcacaggtcatgtaagtctcttagaaacctggcctctaggcccaatatgaagggaagcatcacctactggacccccactggccaagcaccggtggagagccttctctctcctctccaaatttcgtgcaatatgagacaaatgtacttcatcatcatccaacttagggccttgcccatctccaggataggcctcatcagtagccagcactcttgcaggtccaggaacaggaggatacaagccatacatctagaaattatccacactggtcaaccagataatgtttctctgctcagccgataaagaaaggatgtgatttgccctctccctttatttgtaatgtggggatggaacgcttgaagaatggtactctctgaaagtgtcgatggaaaatctctttaacatctcaagcaatgaagtacttgttagcatgctcgtcaacctttggcatagatgagttgttggaatcatctagccattggtggctaacttggctaaaatagaagtattcagaccgatgttactgtgaaaaagactccaagtcgaaatagtatccaatctc

SEQ ID NO: 335462 - DNA, 619 bp, Cannabis indica
ttattccaatggggtgaacccctatttatacaaatacaagagtgagatattaagaaactaagaaaaagggaaactaaggaaaagaggaatgttcattacaattcatggtaataaataaaagatttggacatccacataattattaatatttataacaatttcttatatatcattaataatacacctagaatttaaatatatctctataattacaaaaataatactttaaaacctatttttgagaataagtcctatttatctactaattctcacaataaaactaataatcattacaatcataactgtagttataaccaaatataaaaaggtagattttgtttcataaaaaatataaaaacttgaagatgatctatccatttcatgactgattcagcaaaattttgtagtaaagtaaaattaaatttaaaaataagaatattactgaaaaatattaaattatggcggcatttggtaacatttttattttgaaattttttaatcacaaaaataaaagtaaaaatttggtttttaaaatcttgattttgaaaaataaaaatgtgttctgtaactatttttattttttaattttaaaaacagaaaacaaaagtgtattctataa

SEQ ID NO: 335463 - DNA, 1171 bp, Cannabis indica
agaagcttcttgggattagctgggtattatcgtcggtacgttgagggtttttcaaagatttatgtacccttaacggagctgacccaaaagaattaaattttgtttggactgatcagtgtgagaaaagtttactggagttaaagtagcgcttgattaccgctccagtactaacccttcattcagataaggaaaagtttgtggtttattgtgatacctcgagacaaggtctcggctgtgtgcttatgcaagctggaaaggtaatagcctatgcttcttggtaattaaaggtgtacgaatagaggtaccgtactcacgatctagaactcgcagcagtggtatttgccctaaagatttggcgacattacctatatggagtgaaatgtgagatatacactgatcataagagtctgaaatacttcttcacccagagagatctgaatatgagacagagacactagctagagttggtgaaggattatgattttgaaatcctttatcaccctggtaaagccaacgtggttgctgatgccttaagcagaaaggggcagagtcagataaatactatgaaacaaatctcccagcagttagcaaatgagattaaattggttgtagggaagttagctaatattactctgcaatctactcttttagagcgaattaaagaagtacaaatgcaatatctagagttggtaaaaacccaagatagggtttcagctgggaaggctagtgatttttcagtggatgaaataggaatgttgcgattcggaaatcgtgtttgtgtgcctatggatgagagtatcaaaagagagatcatggataagtctcacatgactccttattcatttcctccaaggtcaccgaagttgtatcagtatttaaaggctatgttgtggtggccaggcatgaagattgacattgctgagtatgttgttaagtgtctaacttgtcagcaagtaaaggctgaacatcagaggcctgcagggttgctgcagccattgaacataccagagtgaaaatgggaagatattgctatgaacttggtggtaggttttcctagaaccacgggacagtttgactctgtgtgggtcatagtggataggtttacaaagtcagcacactttgtacctgttcagacgaatttctccattgaccagtatgctgagttatatgt

SEQ ID NO: 335464 - DNA, 2508 bp, Cannabis indica
acatgtataatactcttgatatcgaacctaaccatatcatgattaagatcatttgatctaggatcaactaggtgatattgaattgagtagatattacggtaagtttaatacatctgaatcaaagttcaatatcggtccctttcgatgcatactccatgcatccaacccaagctttactttaaccaatgccctggaaagaacatagcacttatctaaggtgcaagtaaactatgttgtagattgtcatatcagttaaaccctctgtgtactgataaatctaggaatatatatttaatcacctacacttgattacttttcactgtgttggcgacacaataaattagaacataaatgtgagaaggatttggatgaatttatcaatcaaataaatatataaatgataacatgaaccaaatgacacacaaagtgatgataatacttctatttctttattgatatttaaaagataaatattacattgaatttgagttttatttagggcataaaacccaaaaggttcggaggcaaaaattgactgctcgttctttatttctttcacacatctcttctgagcgttattgctttccttagcaatatgcggccctcctgacataaccaggatgtcctctccttccataggaagaggttgcaaccccaggtcgtttgggttattaggctgacggggctggttgtattcctggccctatcttctcacatacttcttaaaatggcctcgagcaatgagactttctatctcatctttcaactggcgacatacgtcagtcgtatgcccgatatcattatgaaatttacagtatttgttaggatctcttttcctcctcgaattcctcataggcttgggtttaccaaaggctaccttctgctcatgtgggaggtaaatatattcccgagtttcattaaactcggtataaatagtatatactggcacatattagtcatgcttcttttatttctttctatcttttgatggttccctacctccgtcctttcttttcagactagaaacccccgacttatcaattctcgtggaaacagcccctattgaaacattgttgggtttacctcctgagcttgttttcaataagttcatttccttttgggcttcttccttctagacaaacacttgagctctctcattgaactcagagatgtttcatactggacatccttgtaggtcatcccacaactcgcccctgacagttaatggatcagtggagattcccgcctgaagggctgtaagttgcgtgctgtcacccaagtttctaaccctagcggcatccgtgttaaaacgactgaagtgtttcgtcaggctactgctttatattgattagcgaggccgcttcaggtcgcctatccctagcggcttggaattgcttcttaaaatatctggatagctgctcccaggaaattattgaatgatgagtgaacttgtgaaacaagctactcgctgctccaacaagcgaggtggggaacaaaatatgtcgtaaattgttcgtcacgttactcgctcgcattatcgtgttaaagttattcaaatgcgataccagatctgtggtcccgtcataggacgagacatgcaagtttttgaatcctgaaggaaaaggggtattcataatatctcggtgatacggctcaagctccttgtcagattcctatccagatgatttccctatttcccccacttgatatctcctgaacttgttctctagctcatttatctacaattggattggatcctcttgctttggaccaagctgttagcgaagatcaagtttcttccaattcaagtgctctcgtagatttggttggcagtaattgttggcagatctcgtattactcattgaccgcatcctacttatagactttctttttaagtggcttgcggatttacttgttcccatactatcctgatcattggctcgttgagtactttctgctcttcgagttgatcgtctatgagttctttcctcccgagagcggtttgtcgtattttccccatcaaggtacgtacgagtcctccctctatgggtttgggaagaacgctagtgattcctagtaggtgatctccgttcccccagttgagttccaagaacggggtttctcattttccccaggttgttcttctcaggccttttcctgtctcctagttcgtgagccacgaggtctgcctcatgctcttctcacatcaggttcaggttgattttgagtgttcctcccctgcgctgccctggtcgaggctacctctcgctctaactcagagtttcgatgctgcgcctcttccagacggcgtcttaggcggcgactttccgtttcataagttctttctcccacagattaggcacccctacggttgagctcctcatcccccgcctcgggattctgaccattcccacactgagttctcctcgagcgtgttgtcctcgtactcaaaccaacgccgggttgagttctctggggatgtgttgtccgagcactgggaccatcctc

SEQ ID NO: 335465 - DNA, 530 bp, Cannabis indica
atgacatgctcgttaaatctgaaaaggctggtggcatatagatgacctggacgaatgtttcaaagtcctcagaaaattcaacatgaaactcaatcccttaaagttctccttcggagtcagctcgtgtaagtttcttggttttattgttaatgcccgaggtattgaagccaatccagaaaaatccaagccatccttgatatgaaatcgcctacaataaccaaagaagtccaaagcttaactggtcggatagccgcactaactagttttgtttcaaagtcaacagaaatgtgtgttcctttctgttgggttttgtgccctaaataaaactaatttcattataatcagatttattagctaataatgatcagaaagaacattttatgttgcatggttcacatgatttatttcatgattatatttaatgtgtaaattctattaagtccagaaaatatgtatttgttaatgattatagtgttgtcagtacagtggaatataatcttgattatatgttcaaaagtttaattccctga

SEQ ID NO: 335466 - DNA, 664 bp, Cannabis indica
tatagtatattccatctactgtttctggttttgaattttccatccatatgatttatatacatatatacatatatattttgaagtattacctgtgcaattttcccaatcccgagttgggtgtaatcaatctactggcccatcatgtatacactattccacatttgttctttgttcttagatcatgcataaatcaagtgtctattacatgaatcataattaagttgtattatgatattttaattaattttgggctttggtaggttcactaactaaaaattattaaaacaatagattcgtagcttttccataagtgagatacatcacaatgactattaataaactcaattgatatacgtccttatcagatttagtatataaccctgagaatataacgatatgacatttattaaataatttaattataatcacatgttttagttgtattttacattgaatgactgccttcacagtagttacacaaaagaaactgcttgttcagttataaacctcaactttaaatggttcgctaaatagtttaaatttaaatttaatatatttaactcccttttcaaaattctataattaataattggttagacagtttaaatttaacttttaacacaacttttatatgtaatcttattacttttttatcactttcatt

SEQ ID NO: 335467 - DNA, 819 bp, Cannabis indica
aatatggaagtgtacgtggatgacatgctcgtcaaatccaggaaggctggggggcacatagacgacctggacgaatgcttcaaagtccttagaaagtacaatatgaaactaaatccctcaaagtgttcctttggagtcagctcgggaaagtttctgggcttcatcgtcaatgcccgaggaatcaaagccaatccagagaagattcaagccctcctggatatgaagtcgccaactaaaaccaaggaagtgcaaagtttgactggtcggattgccgcactcagcaggtttgtttcaaaatcaacagataagtgtgtcccattcttcaatatcctacgaggaaacaagcagttcgagtggatggaggaatgtgaaaaagctttccaagagctaaaagcacaacttgcaaaacctcccgtactctcaaaacctctggacggagaagaacttggaatatacttagctgtcacggaacatgccgtaagtgtcgtgctaatcagagaagagaacaacatacaacacccagtctattacatcagtaaaagactcattgaggccgaaggccgatacccattgatagagaaactcgcttactgccttattctagcaacaagaaagttaagccttattttcaagctcatccagtttgggtgtacactgaccaatcattacgccaaatactgcaaaagccagatgcctctggacggctactcaagtctgcggtggaattgggacaatatgaaattgctttccgaccccgaacaacaatcaatgggcaagccttagcagactttgtggtagaatgcacaggcaagaaagaaa

SEQ ID NO: 335468 - DNA, 1007 bp, Cannabis indica
ttaaggcaataagtgcataagtgcggtattggtgtttaactcgtcggggttgttgattacaagggtacttgtaaaaatggaccctccgcaatcatctagactacagggtaagcaagtaaagcctggttgaccaaaccaatccacgggcatagcctgcgcctccgcagaatccgggggataatgcgggtgttggcaatgctaatccacctgttgagtgacagcagatgtttcaagaaatgcgaggtatcatacttcgtcaagaggaagagttgcgtcagttaaggcaactagcaccaggtacccctgttgagcaagtgttaccacccgcacttgtgttagtggtgggtaactagtggttcatgttatcgcatagagattcggtgtttgagcggtttgtgaagttgcaacctccaacttttctgggaggtactgacataatcaaagttgagcagtggatgagtacaataacccgaatccttgataatatgggggtgacgggaacagagagagtaaattgtgcagctttcatgttacaagatcatgcccgcgtctggtgggatattgtgggacaaactcgagatgttagtgtgatgacttaggaagagttcaagagtctgtttgaggaaaaattttataacattgatgtaaggacctcacatatggaagattttgtgaaactaactcaagggaaaatgtctgtggccgaatacactttggagtttgatcggttgtcaaagtttataggtgatctggtgcctacagattttaccaggaaacagaaatatgtgagaggactgaatgccacaatcagtcgagacttgaaaattacaactactcatgacactttgtacaagaaagtggtagagctagccttaattgctggggaggctgaacaacatgtaataaaagaacaaacagcaaaggataccaccatgacattgaatcctcctgctactggtaatatcagtaaggggaccgacggtggtaaccctgatcacaaatggaag

SEQ ID NO: 335469 - DNA, 720 bp, Cannabis indica
atgctaaaattggataatctaggttttatgtgaaacgaaagtatttgcataacctgtgtgacatttagattattacttaaagctgattacatgttattcaaattcagagattgattagagaacatgtgatttaggatctaaaagatctgaaaagagttaagttaatttgtttaatctgtcattcacatcaagaaaaaggatagtaattagcattaacaattgggtaaataaatcaacatgattctcttccctattttatcatcttggttgaatctttcgctgttaattttagtttcttaatactcttgttttgtgttttaatcataaaaattattagtttgccaaatagaatcataaaattaatctagtggtattcaatctaattccctgtggttcgacctcacttgtgtgagtttactacttgattacgtgcacttgcgtattgttcataattttcgtaacacatacctattttcttacatttaaaatgcactttaagtgccacgaatacaatgcaagaggtcgagcgccgctttacaagctccctcaatagcatcacaaaactgaaaattcagagcgcaatccaagaggctaaacagctccctcaacatttaatatgaaatttgaaaaagactgagcccgactcaagaggctatacatctcccttaacatcaaataagtaaacggtaaaaggtcaagactgctcaaagagtctatact

SEQ ID NO: 335470 - DNA, 759 bp, Cannabis indica
gtaaagatcagatcgttgtagatctgatcttttgctgggtttgtgtttgggatttctgggtttctagggtttggcttcgagtttctctttgagaatctctctgctagggtttctagcatttcagagagaaaggaaggaaatgagaaggttctcgatccattcctaggttttgttcaaagacaaaacggggtcgttttggggttaactttgaaaagtcaaagtggacagggaaaggtcgaaattgaccttggaatttgattcgtttgtttgttggtgtagggggcaagatagtaaatttctatcttaaaattcctacatattcctttttttatggtgtgtttgttttagtgtaatcaaagttacaatctagtgtatcattatattgttaggtttcactttaaactattgtaatcctattcggtggtaattgtagttaccttatgtattataatgatgattaggtgagtgaccatgtttacaagattctattgcatcactgcatcactaagtcgtcaataactaaagctcaacacagactgcacaagaaagtttctaccgtatagttatgctgctagaaatttaagggacaaatgtttactcaaattttaacgatgatgacgtgttaagagtaacagcacgtggcataaaaataccaggactaaatttatgaagaatatgtaaagtcataatcgatgggatgaccgttgatcatgatgggtggtcataaccgttggattggaagtctaacggtcaccttta

SEQ ID NO: 335471 - DNA, 737 bp, Cannabis indica
atacttgtgagtagatctaagttcctggtaaaatatatttccaacaagattctggtttggttagttattagttagttgtaggattgggagttggttatgacagttataaccaacatcagctactataagtagcaaaaactgtatctgtatttttctttgagcattgaataacagattcagttcttctcctctgttttctctttcttctttctgttatggatttgtgaaatggtatcagagctgccattattggttgggcttcgtcttcatcttctttcttgtttcattgatttcttgtttcttcttcaatggtggaggagctcaaactcgaactaatcgtgatgctgctaatgcatcaaacgattcgaacagatactctgttcttggagaaaactcaagatccagcactgccaacgacttatcgaatccttttttcctttcgaatggtgataatccagctgcagttcttgtgccaaagatcttgacagggagcgaaaattacagtacctggagaaggtccatgatgattgctcttgttgctagaaacaaaatgaagttcgtcaatggcaagcttccagatgaggaacatgaagattttgatgcttggtgtagatgtaactgttgggttttatgccctaaataaaattcattacaatttgattagtgatcaatttagaagtgaagtatgtttacatgtatgttacatgtttatggtttaatacatatacttgatatat

SEQ ID NO: 335472 - DNA, 650 bp, Cannabis indica
ttaacgtactgtgcagctcgttgctaatcaacgaggttatcgaaaatcgtgattaattaaaagttcctttatttaattaaaaacataaagtaacatacttataaaattttgggaccccgtttacaaaaatatttataaaagtttaactatacatatataaaagtctgttgcctagtgactatacagcaaaagccctgatgtcccaaagatcctacgctctaggcctaaccgccctgacttgtataatcttcatctgctcgctctcacggctgctcagccttagccttgcccttacctacacatggaaatagtaactgtgagtcaacagactcagtaagaaaagcatagcataaaacataataatatcccaggttataatcaggcgcccatacacctgactataaccctatccccgtgtctcacacggtaatgagtctagaacgttcttacgacagtactatcgaccataatattaccttagactcagtactctagtcatactctagtagcaccgatgtaattgcgtcgatctcgtacttgagccaaacatacatctatcagtatccagtacaactctatgtatactgatactgctatcaatgtaatctcacaggctccataaacatgcacgctaaacatgtaaatacata

SEQ ID NO: 335473 - DNA, 901 bp, Cannabis indica
actaaaagaccaaaagaagatgatatagagatttttactttgaatagcttgcatgcataccaagttgtctgattccaaaatcacttgtccccaactgtgcggatcaatccaacttaaaacttctttgatgtcaaccatctccgcaacttcaggttgaatcctccccaaatgaccccgattgaaagcctccacgacattgccatggcagtcacgagccacacaaccccacccaaacctaccttcatgctcaaaaagggcgccatcaacattaatcttgatctttcctgaagaaggtgcactccaatgctcaaccaaatggcctccgtcgaataacgaagacaaagaaagaccatttctttttttagtgtctttgagctgatcaagtagcattcttgctgatgtaacccaatttgcagcagtccaacttttttgctgccaaacaaaatcatttttggcacgccaaatggcccagctgaccatagccgcctcctctaactcgccttctcttcctcggcattgcagctccaacagccaattattgaaatcgtcatccatattaccgccgacatccacacttgtcctgttccagcaggcacgagcatgaacacacccaactaacgcatgaaaaagagtttcagctatagtgagacacaaggggcatgttgggttaactagaacatgtcttttttccaattgaacacaagttggtaacgagtctgaagccaccctccataagaagttactgactttagggggaactttttgttggaattaattttaccaggatcttagatctactcacaagtatgttgatttaacaacctaaaattgaacttctaaaacgataaacaaaacacataaaagttaagaataacttacagtgatggcagcggaattaagt

SEQ ID NO: 335474 - DNA, 958 bp, Cannabis indica
ctgatgatacacttcttgaaaccgggttcaagacaccacagcttgtatcttttaacaccttcaggataccccaagaacatgcatttcactgctctaggcttcaatttgtcttgcctcacatgagcataggcagtgcacccaaaaacctttaagtggtcataggtttgagcttctccagtccacttttcttgtggtgtcatgaaattgataccagaagaaggacatctatttattagatagaatgctgtgttcaatgcttcaccccagaactttctatctaaaccagctcctttaagcatgcactaaccttttcaagtagtgtcctattcatcctctctgccagaccattttgttgtggagtgtctctaacagtcaagtttctagctatcccttctttactgcagaattctttgaactggtttgaacagaattcccatccattgtctgttctaatcttcttgagtttcttaccagtttgattctcaagaagttttctccaattgacaaatgtgttgaaagcctcatctttggttttcaagagataaacccacacttttcttgagtaatcatcaatgatactcatgaaatagtaagcaccaccaagtgtaggaattcttgaagggccccaaagatctgagtgcacatatgccaactgttctttggttgtgtgctttgctggtgtgaatttctgtctgcagcttttgccatatatgcactcctcacagaaatccatcttgcatgacacctttcctttaagaattccttgcttcttcaattccatcaagcctctttcactcacatgtcccagtctcaaatgccacatccttgtcaagtcatcatcacctgtacctgtaacatttgaagctaggccagtaactgattttccattaagaaaatacaaaccatttctatatattcctttcattacagtagtggaacctttaattacattgagtga

SEQ ID NO: 335475 - DNA, 984 bp, Cannabis indica
tctacttcagtttttatttcttacgagatggtattacaacaataggctaagtgtcagaagctctaaattctagagagagaaaatctagagagagaagctttgaccttgtgagtagttttctgaatgtgaaaaatgagctaagagagatgagatatccttttataggtgaaggagggcccacaaaaacaggagaaaaataaaaataaattttttccaccgttgatgatgatggccaatttttggagcccgggggtctcactacaagtaacttagagctgattttcataactactttggggtgaattttgacaacgatagcttcagaattgcgatttgagtgtgagacatgacttgatagggcatttatataggttcataatgcaagttgaatttcatttaaataggttcataacgcaagttgaattgcaccaatctgatcaatattgagtgacctggacgctgggtaagtgaaaaaatggccaagggatctcttgtaagatgcccaagtgatattttgacaacacttagtctatttatatgttccagagaagttggtcactagttcttagagaagttgctattctgcagaaatgagagactcgaaactcttcatttacgagtgaaattcccatgtgagaaatgagaaatgctaagttgtgaatttgatttctctaacttcatgaatcttagttattgtgaaaagctagacagatggttgaaacagaatcagaatcggataagcaaaacccagcgcactgggccatttgtcaacctaggcgttgggtacccattcctaagctctcgggatctcgttttgatacttccaaggcttctgaaattgaggaaaaggtattatactcctttttggtcattttagattcaatggtcacattggattttgcatttgagaaattgaaggtagtgttgcgatatttttgcacacgcaagtgtacgtatcgtttcaagtagtagactcactaggag

SEQ ID NO: 335476 - DNA, 1135 bp, Cannabis indica
aaaaaatcttatcaaaagaagccctaaaaattactcaaaaatctgaataagattgactcgtggactatgcagaattttaactgcaaaaccacgttaacgaaaatctacgttaacaattatgtatcgaggcactgaatacaagaatttttgtgccttgtttttgtcagttggaagttgcctgtcgagtagatagttgatgataggggtcatccatgtaggtgaactgtctatcatctccacttcttccctttcacatatacttggctcgctctgcatctccaccgaaaccaagttcaatttatccaagtcattctacgaggccgtgccaaggcattagagttagagttttgctctctttggatttgttcgattttaaagtaatcgaatctttccaagttcttccgaaccttctctaaatacttagccatttttaggcccttggtctggtattccccgagaaccaagtttacaatcagttgtgagtcactatggtagatgagatgtttgactttgagcgcctcggctatctttaagctagcgatcaaggcttcatactcagcctcattgtttgatgcgtcaaattaaaatctcaacgcaatgtgaaacttaaagccctctggtgaaattaatattactcctgcactcaagccctgctcgttggatgcaccatccacatataacttccaagtatccgcgtctcggtgaacaggcagaatttcttctaaagttataccttttattaagatgtctgccaaggcttggcccttgatggatgttcaagggtggtatgttatgtcaaactgccccagttcgattgaccattttatcaatcttatagaagaattaggttttgataaaactagtctcaagggatgatcagttaacacttttatggggtgtgcctagaagtaaggccgtagcttgcgagatgcgtggactaggcacaaaacgagtttttgagagggggatatctagactctgcccctagtaaccttttacttacatagtaaatgggttgttggtgcttaccctcttctcgcactatagccgcactaattgcatcttttgagatagccagatagaggagtacgtttctcaagttattagttttgccaaaacagcaggcgtcgctaga

SEQ ID NO: 335477 - DNA, 361 bp, Cannabis indica
aaataatttccaacacttttgtcatctctgtcaactcaagacacgatgattactctgttgctgaaatagaaacactcctactgtctcaagaacatcgaatggagaatcaccacaaagatcttgactctgtcaatttggctacaaatcgtggattttgatttcgatctcaatctaacccctctattaccactgagtctaaaccatcctcttctcctaatccttctttctctaatcaggcacgtggtgcttggaatccttatgccatttcatcaagatctccccctcctggtttttccccaacaaatccaaacacctctgtaggccgtggctccactactccttcttctgctcaaccaggcac

SEQ ID NO: 335478 - DNA, 758 bp, Cannabis indica
caggagaacccacctcaggctccggttgactaggagcaaaggtttgctgaaatgcaagctagaattgaacaacaagaggatgagattcgaagacttagacagcgggatgatcctgttgagcctcccctgcaaccgcctgctgtggttcctgcagcccctgcggtgccagctgagcaacatgttgctggtaaccgtatggagcctttatatgagtgattcagaaagcaagcatctccagtgttcctgggaggttctgatgttcttaaggctgaacaatggttgactgttattgaaagaatactgaactttatgggtgtgatcgggaatgatagagtggcatgtgccacgtttcaatttcaagaggatgccttgatttggtgggagatggtatcccttaccagggatgttgccggaatgacctgggaggaattctgggatttattcaatgccaaatattataatgagacagtccgcagtgcaaagcggaaggaatttgttgagttggtacaaggcgagggtatgtcagtgactgaatacacaaccaagtttgatcgcctggctaagctggcttctggaattgtaccaacagattttagtaagaaggaaaagtacttggctggactgaatgccaagattaggcacgatctggttattacaactagtgatactacaacctatgctcaaatggtagataaggctcttagagctgaaggagcagtaaaatttttgcatgaaacccgagagcctcctaatgctgg

SEQ ID NO: 335479 - DNA, 1274 bp, Cannabis indica
aaaaaaatttgaattggtgggtttgcattatacaatgtatttccagatgaattccaattagtcatacataaatgccccttaagtaatttaaggaatgaaactttgtaattacttaatataaatgattctctttattcataactgaagtttaaactttacatcagtaatgcaagttacatcatttatttattgatagtaggatcgcaaatgttctacgttccagtagttctttattagggagccatcaagtcgagccaatttatagactctgactccaacactgcttcgatgacatatggaccctcccagttctggttaaacactcctactgacgcgtctctcgtatttgcaaagactagtcttagcaccaagtctccaacactgaatagtcttttcttgacttttatgttgaagtatcttgtaactcggtgttggtatgtggtgttggtgatttgcgactcagttcgtttttcctcaagcagatccaaggataattttaaaagttcctggttttcttcttaagtataaaactctcttctgtgagttgatatttcacttcaacaggtagcattgctttcgagccaaatgctagcgagaaaggagtgtgtctcgtggctgttttctcggtagttctgtgggcccagagcacctgaggtagctcgtcaacccatctacctttggcagcgtataacttcttcttgatagtgtcctttagggttttattaacggctttcacttgtccatttgcctgacgcctggatactgacgagaagcttttgataattttattcctctcgcagaattcagtgaacaagtcgccatcaaattgggttccattatcggatactatcttcatgggaattccaaacctacagataatgttcttggagacgaggggctcgacctccgtccatttagtgaagaagtcgactgctaccaccgcatacttagctcctcctcgcccagtgggtaatgccccaattaggtcgatcccccatatagcaaatggatagggcgaggttatcattctaagttctgttggcggtaggtgaggtatatgtgaaaacctctgacagttatcacatttcttgacaaactcatgtgtgtccttattgatagttggccagtaatatccttgtctaatgatcttttacgacagactttgccaacccgcatgatccccacagaagccttcatgaatttctctaatgatttcgtttgcttctgcgggagaaacacaccgaagtaggggcattgaataccctcttctatat

SEQ ID NO: 335480 - DNA, 522 bp, Cannabis indica
aattctttaggatcaacagtgagaggtctcagatatgttttgcaatgcattagaccagacacctgctgttgagtgggagtaatgagttggtatcaaattaatccaggaaaggaacattggaagacaatcgagtaaatctcaagatcaagaagagaaactatatgttagtcgataagggtggcattcaatactcttaaactacaccaaatcaggtttctagacttgccttagtgcttgaaagtctgctgatgagatggtgattactctgggagtggagtagtgattttggagaagtgtaaaaacctatctaaagtctttaagtctactagagggacggaatgttaaagttacatgaaagatacttattcagtctataaaaagttctatactaattttggcattgtaccaacaatttattaattactagtgttacttcctgactaacacagaagtagttgccaaaaggtaaagaatctagtatccctagaggagtagacatatagagaggaatttcacaatatc

SEQ ID NO: 335481 - DNA, 860 bp, Cannabis indica
aggagtgacaaaacccttgtcgaatctgtaatggcaaacggttgttgtgtgtccaggcttgtgacacacttgacaaagcagtcgtggaattgaaggaggaccacttctttgatttcttgcagggacacagttcatgttaccataggctcctcttggttgagaattatagaatcgatgaggggcatcagaagtatttcttggattgttaatgctgagattggcagtgatctttgaggaaagatcattcacattaaagtgcctttcaatcctgctctcatgggttagtagtaacgactgaattgattcaaaggaaagattatctacaaggcttgtaacatgaactactacagggtcatattcagggcccacaccatttagtaagtgcattatcaaatcactttcatccattggatggccaacagtggataaagaatcagctaacaacttgactttatcatagtaatcggatttagagagattacccttttggattgttgataactgagacttaatttgaagaagacgagccttggactgacttgaaaatttttgagcaagggcacgccagacatcaaaagacgattcatgctgtgcgagggaaccaagaatgatttctgtcattgaggagcggagccaattgagaaggagttgatcctttcgtttccatgccgtgaattctgggttaatttctccattgatgaggcgctgaacaggagccacaccagtgaggagtatgtcatcaagtccatgcccgatgaccgtgggaatcacttgagatttccacgcaagatagttcgtgcgatcgaggtgaacagtaagggacgaattgagggaattttggaacggattccattgatgta

SEQ ID NO: 335482 - DNA, 844 bp, Cannabis indica
tgtgaatgaaaatgaagaactgagtcaaactgttaaagaaaatgagaaaagttcaagtgatgtgaataaaaatgaagaactaaatcaaacaatgaatgagaatgagaaaacttcaagtgatgtattcaactttccttttgatattgatgatccaggaaattggaataggatttgtcatattaatatgacaaactttatagttgaaagaggtccaaaaagagtcattaaggacgagtttactagggatgcgctttcggtaggaatttttcttcgtggcattatattagagaataaccaaatggagagaaataagataggacgtgattgatatatttatttttttttagataaagaattttgtttttgttgtaaattatttacaacaaagaagcatcttgtggattttttagctgagggaggttttgatgactggcataatatttttgattgactaaaaagtcatgaaagaagtacacaacatattgagtcaattgctagttgggtgaaattagaaaaacgactgaaaatgaagttaacaattgatacaagtttagaagaacaagttaatcaagagaaaaaaatattgaaaacaagtgttggagagaattcttgctattgcgaaaagacttgggaaaaatcatttggcatttcgaggagatcgtgaaaaaaaatagagaatttcttaaaaattattgaattacttgctgaatttgattcaactatacaagaacatgtccgtcacattttaagaggtgagactcattatcattatttgaatcacaagattcaaaatgaaatgatacaactacttgttgggttttatgccctaaataaaacccattac

SEQ ID NO: 335483 - DNA, 686 bp, Cannabis indica
ctatttgatgcataatctgcatcaacaaatcattcaagttccaccttgatccttgttttcttgaactttattccatagtgagttgttgtcttgagatatttcagtaaccatttgactcctttccaatatcttccccaggatttgacatgtatctgctgagagtgctaacaacatatgcaatgtcaggcctagtgctaatcatagcatacatgacactcccaattgctttaccatatggtatttccatcatctgttttctttctttgtcatctttgggagattgattggtggagaacacaaagtgtccaacaaggggaaactttggtttcttttgagtcattcattttgaaatttccataaaacaagtttcaatgtacttgccttgagttaataacatcttttgattcttcctatttctgggtatctcgactcccaaaattctcttagccacccctaagtccttcatttcaaattcacttttaagtaacatacttaaacttttctaatttgattttgtatcctttcccactgattaacatatcatcaacatacactagtaaaaatttagtcaacttgagagttcaagttgtaaagtaaaggcaggtgtcatatcttgatcttgtgtatccaacccttgtcacactgagtcaaatttcttgtaccattgtcgaggagattcttcaaac

SEQ ID NO: 335484 - DNA, 380 bp, Cannabis indica
ttcgtctgggttctggtcctagtctgagccccagatctagacaccgactactagtctgttcttggccccattacttgaatctagagtcaagatctggatcactgtcacgggtctcggtctagttctagttcaggtcccaggtgtgatttctgagtttgcgtctgggagcgagactggggtgcgactctaggtccaaaccctggttctgtgtcgctaatctagttctgtgtttgggtctgagttcaagttcaagttcggttcccgagtccaggtttgggttgggatctgggtccggctcccattttgggtctaggtctgatttggagtttgggtcctggtccggttacgattctggatctatgttctgttggaaattattt

SEQ ID NO: 335485 - DNA, 1191 bp, Cannabis indica
gacaactgaaactacaataccctaagtaacagggaatcacccaaccaaggctctgaaatggacacgaatcgacgaaattgattgttcgggaaaccaatcccagaaccggttaaccagtattacaggacctggcaaaccggttaaccggtttgcaccaagtttcctaaacaatccaaaacctgctcaaatcgtgtccaaacctcaccaaaatttctagaacagctatattgacctcccacaacatattccaatcaatagaatccaaaaatacacataaaatcaaaaagtgccatggatgaaccaagcttgaatttttaaactcaaacttgtacattcatcaccccacaaccctaaaccagtagcaagaactccattctaactaaaattaaacttagatactgaattataaacaaatctaaccctaacgccctagattcacaattttgcatattcaaaccaaaatcaaagcttcaataacacaaaattaagagttctaggggtacctttgctttaaaccacttgaatcttagctcaaaacacagaaaacacaagaattggagctggttccttctagtttggaatggccgaacaaagaaagagagaggaggattgaattttctattttcttaattttctttaattaattccaagtaaataatttctaatattatcatttcaactgaataaaacattgtggccagctgccacacttgcaaaaagtcacctaatccccccttgctaaaagaccgaaatgacattggtgcttaaacttaatctaattcaagcctaggggtaaaattatcaaaaaccacaaccccgctcaaactcgttattctatttatctccaatattcatcccactaagaaaaaggttctagacttactcttgtgactcaaatggccatccatttcaattccatcgttgtcgagcaaaaattataaaaatagcataatttatatataacacaaataatacctctagagtttaataaaatctccgtaattgagaaattataactctagtgtcaacttttaataatgggacccaaaattaaataaattcatgaataattataaaaatatcaataattaatgctaattttctttactaatccatattctaaaaatgcagtcattacaattatctccccgttaaaaggatttcgtcctcaaaatctaacctaaatagctc

SEQ ID NO: 335486 - DNA, 511 bp, Cannabis indica
aagcttcatcaagctcgaagaagccattcaatgagcagaaggtgagacaaagctgggcaaagcgaaggctccttccattggaacatcccgcccaacttcccaactattccaacaattcaagtggcaagcgttcaagcaacaaccacaagcaaggaaacaagaagaaaggaaagttcactgataaatccggacagactccccgtgatcatgccaaacacactgcattcactattctaactgaagatatagagagtgtagatatagcaactcagtcgttaatctcgtacaagaagcccgggcccatgaagaaagataccaacaaaagggacatggcgaagttttgtcagttccacggagactacggccacgacaccaatgaatgttacaatctaaagcgagaaattgaatttctgataaagaaaaaacaatacgcacctgcagaagtatgtcaagaccaaccaaggtcaaaacaaccaggatctgctacctccactcgtagatggacacttac

SEQ ID NO: 335487 - DNA, 591 bp, Cannabis indica
aaattacaaaggaatggacgagtctcgcaataaagcaagcctcgcacaagggggagaaactccatccacatagttctaactttgtttaacaaagcatgattggctaatgcgtgagccaccccattggcttcacgatatacaaaagaaaccccaacaacattgtgattagataataagtccctaatatgactcgcaaccccatctatgtctctacaaccatcctccttactatagattaattggacagcttcaagacaatcagattcaacacaaaaatggggtaatcattgttgaattcccacctgtaaaccattatgaatagctaacacttcagcatgcaaaggagagagagcttgcgacagtcccacagcagaagcaaataccacatggccaccattatcgcgaaccacacaacccaaacccgatccattattccccttatagacactgacatcaacattcatcttcaacaaattctgagaaagagcagtccatctagcagcctgccttttattgctgcccgcagtagtaactagggctgttcatccgatccaatccgtacttttttggtcaaaacaacatccaatccgc

SEQ ID NO: 335488 - DNA, 878 bp, Cannabis indica
aattaattaattaattaacctaaaaagataaaactaatagggacactctattatatggggcgcatgcactgtgtctagacacggtgcatgtggcgcctcctatgtcttgtttaagacaaggaatatgcattttttcctgacaacttttatcttgaaattttttcttttttccctatttgattaaattgaaaataaattatttattataaaaaataaataattactatttttataattcaaaataaatttttagaacttctatatacaatttttatctcaacccttgatagtgtttcaaggttgcaattcgaaaatcatggacctaagattctaagctccaataaactaaatttatttattgaatctcatcaatcaaataatcttgtttattatttccatgattactgcacaataaatatagaattaaactcttagtaatcatagaattatatttactgagttttactgcagtgtccattgatataacaaattttagtgattagcccttctaatgttggcttgtaattagttttgatcaaattactgttttatccttctaattatttctttatcctttaacaccgttaattcacttcatagtaaaaatataattcaaatctaatttgaatttatgggcaactttttaattccagaaagtgaaccaacatttgatccgttaagaaagtcaagatttcataattgtagacaatatttccagccatcaacattattagatttccaaaacagaagttgtaagaatcatcttcgctgagaaattttaatgagtgaatcaaagaaactaataatatgaacaagagttcacgattactcaggatttaggccgatctactattgatccaatataatatgaattatgt

SEQ ID NO: 335489 - DNA, 988 bp, Cannabis indica
cctcgctcagttatgaatgatgttttttcttgatcattgggatgcattaagatttggttataaccagagaaggcatccatgaaactcaacaattcatgtccagctgttgcgtctaccatcatgtcaatgtgaggaagtggaaacgaatccttcggacatgccttgttgagatcagtaaagtcgatacataccctccattttccattcttcttcttcacaactactacgtttgctaaccagtcaggatagtcaacctctctgactgatcccacgtcgattagtttttgtatctcttcatttatcaccttgttgcgatcgggtgcaaatttacgtcttttttgcctgaccggtgggtaatcagggtcaacctgcaacttgtgaacaataatgttagaatcaatacctgtcatgtcctcatgggaccatgcaaagcagtgatggcgtttgattaagaattcgatcagcctggctcgaaactcaggtgtaagctttgttccaatctggactttatggtctgggaactccttgctaatgcacacgtcatctaggtcttccatactgggttcatccggtgcaaaggtcggactagactgctgtagttgctataatgttgccgatttctcttttagcgagttttgataacaatctcgagcagttttttgggctccccatatttctttcactccccacttggttgggaacctgatcacttggtggtatgtggatggcacagctttcatggaatggatccacggtcggcccaagattgcattataagctgatggagagtcaactacaaggaacttcgtctgtaggttgactccttctgcataaacgtggagtgtgacctcgccgactgagtgtttctgctctccactgaacccaaccaatactgtggatttgcggatgatggtggcctcgtcgatccccatctccctaagagcattcaaaaataagatgttagcagagctaccgttatcgatcagta

SEQ ID NO: 335490 - DNA, 1183 bp, Cannabis indica
gagccccagctccggggcaaaataaaaaagcctgaaagcaggcggtaagcttggggaatgagttggtatggcacaaggccgacaaatacaaggaaattaataaagtaatcttggagagggagcatggccccggccatcaagtgtgtctggctccaggctccgaagcccccatagttatggttgggcgtctcctcgtcccgaggcagccggtgataggtcccggaggtcgaaggcttgatgcctgccaccaccacgatcttctccagctggtgagcgcaggtcaaggtagagtggagctcagccgcttcccacccgttggcacgggacttatacccttcttgggccacaggaccccgcatgacctcctctagggtggccaagcgtacttttcctttccttgaagacttggaaccggatgcggaagtggacatcttttggttttgagaaagattgaaaaaatccagctgttaggccccaaacccaaccccaattcaaaaagggaatgggggtcccctaaccgctggaaagaggccccctccggacagttgccaaaaaagaaagccccaaaaggttttccttgacaagaatcgggtgcaagaatcccacaggtagtgaccaaacaaagtaaaaagaaaaagaaaagaggggtaaaaccgaaaaggcaaggtttactctaaaccctaaagtggtcattacatggaatgaggacgatgccccagcaaaaacatggtgaaaagaagtaatctaaacgcaaaaaaggaggattttaatgcatcatacagaaactcacacaaaactattcccagaagttcaacatccaacccagaaacagtaaagcatgctatgtaaacaaacagtaagcaagtgtacaagatacgaagaacttacatgaagtttgagggttgcgagttggtgttgatcgccggtaaaacgtagactagcagcgtcgaaggaataagagcagcaaatcaatggtgtttgaagtttcttttctctctagaaaactttgaggaattttggtgaaatcctaaaagtaaccaaatgaagttagaaggctagcttttataggccaaaacaggtgtaagacagctgtgatcagccaccatcgtatggtccagatggcaatcgattctaattttacggatccaacagttggattaaattgtcatcaaggcggtagaaa

SEQ ID NO: 335491 - DNA, 763 bp, Cannabis indica
atataccatagcacaattaaaataatatactacaatcataaactaatatactaccttttagttatttcaaatatatatatataaaataacgttccaatttttttttaatatattattgcacataaaaagatatactattttgtaaaataactataccaaacacttaattattcaaggttataattgtagtttcattatcaaacttttaagagattggacattttgttaattttttttaaaaagggacttttattaacttaattgttagatttagagccatttttcatcttggccctttttttttatgctgcttagaaaaaaaaagtttttccaaaaatacttattttttttaaacttttatttacaattttatagaattttttatttaaaaaatatgacttttttagcaaaatgtaaaaaaataactaaaaattaacaaaattcaatctcataacaattataagttaactataaaatagccccaaaaaggaaaaaactaactccatgacaactataaataaacaaaaagaatataacagtttaccgcatttttgtaaatgataggaggagagttagcagtagaccaactaaacaaaccaaattatccactcttcaattaaaatttcataaccttttttgtttgcttagaaaaatcttgaatccacaatattaaaagcaaaaacctagctgttataaaatacgaataattatataaggcactatttttttgtaaaatatttacatttttacgttcagagaatat

SEQ ID NO: 335492 - DNA, 974 bp, Cannabis indica
attgataacaaatcagattgtattttaatgggttttatttagggcataaaatcccaacaaactcccacttgcactaacataaaacaagtagtgcatttcaatcaatctattgttttgatatccaaatcaagtgtagtgtatttgactaaacccaaattacaggaactgtaagtctgttgtaagctattgctttctccaccattacttcctatgtactcataaaacattatgcaacatcactttctatatgcattactcctctagggatactgaattctttactgtttatcaagtgcatctgaataaatagaagacatgtctctaattctatccaaaatagaatagataacacagttaagaactttcttcagttgtatagcttttctagtgtttttcgaaaacaaagttatttagcttcactggtggagcttatattattatagatgaatttttacatccttctagaatacttcctccaccccagagtaaccaccattactaataggttatgaggttgtgtagataaaaggattttaatatgcaccccaatcatctaacatataggtcactctcagagatcttccttgattatttcctaaacactactgatatcttctaacatttttcttaaaaaagtaaaaagataggctacttcaatggaacttttttatttttcagtaattatgtttttagttaattattgtgcatagaaaagtagaggaagaatattctatccaagggaggggccggagaggtcagtcaaagttgacccattggaaaataaacctgtaaatacaaatgaaggtttggtaaattcttgtaagagaagaaaacttgagcagcaaggaattctttatattgcataatggatatgaaatgggtcaaagtgtgttgtatgttgtgacgtggtgcctgacatataacatattcaacatgctagagctatagctatactctctctatatatatatata

SEQ ID NO: 335493 - DNA, 759 bp, Cannabis indica
agtaactcaaatagttgtgaatgggatgttgagtgcaagagcgaacccctttcttgagagcaatgggaatgcttagatcttcagacacatcttcttccacaataggttcagcttgagcatcttcctgtgtttgttcaagaatgaatggaatcggattatattcttgactttgctgagtgtgagtagtagcttgttcaatgtttgctagattcttctttttccttgagtaaacccgaatttctgtgtttgggatgtggacaggatttgaaaaggttggatgaggagtttttggctcgtgtgaattggctgaatggtttggagtatgagtaacagacggatgaggagtttttaaagtaatggtgttgtcagaagaagaagaatgaggatcaatgagtgaaacaggaggatgagtagtttttggagcaagggtgttgttaggggaagaaggatgaggatcaatgagtgaaacaggaggatgagtagtttttggagcaagggtgttgttaggggaagaaggatgaggatcaatgagtgaaacaaagtcccaattttgtagttcttgattatgattctccccctgaactgcaaatttgggataataagactgttcctcaaagaaagtgacatccatggagttgaacactttttgtgaaacaggacagtagcatttgtatcctttttattagatgaatagccaagaaggatacatttcgtggctcgagcatcaagtttgctacgatgtgaggagtgaacatggac

SEQ ID NO: 335494 - DNA, 590 bp, Cannabis indica
tttgagtttgttcaatcacataatctgccatctttgttgcatattctgttcttgttggtagcagttgccttgtttgtaaactagtttccccattgtaggtatagtttactctatcattgtgttcattgtcggttgtggatgttgagatgttaacacagataggatatttggtctcatcatcatttttccttcgtatttgttcataaaacttgcatccactatcgtctttgattcttattggtggtatgccttcagttacttgaaattgaagatcaatcgtatatttgtttctgtccaaattcaaagcttcgtatactatgtgagaaagctcataatgtgaacaatctgttggaattagtataccttcgacttcataatcaacgtatgttgttttgtcaacccaagttccattgtaaaaaagaatcactgttctaacatccatattcctgcgtgatttgtttagtttaatcatgttaagtattgtatacagtaaacattatgtatatacaaaaataataaacatgtaataggtgtgatgttcataaactaaattttatatttattatagtaaggtttatatgcagttttac

SEQ ID NO: 335495 - DNA, 515 bp, Cannabis indica
agtaaaaagaagctgaaagtttacatcagaaaaagaaaattcttttcttatggcagcgaggttggaagtgagcagattttcggggaagatcaccttgatgagttggataaggatgaagacccaaaagtggaagaagttattgaattcagctcagaagatgacaattcggaggaggaagatgattccggaactgaagaagaaagtgatgaagaagaagaagatgaagatactttgtgtcacatcaaggaactttggcaagaggaggatcgattcaaaggtgacttagtgcctcatgagctagttgcggaacaagaaagaatggaagtggttgatccagaagagaggaatactttgttgctttcgaaatcagagctagttgaatccatggcggaaatgggcatgaatctaatacttaaagagaatgaagagcatcaaaagagtcagtgcctcaagagtggaaggaagagcagtagagaactacaaaaaacttgacttttaacataaattatgagaaa

SEQ ID NO: 335496 - DNA, 1029 bp, Cannabis indica
gggcgttacaacatggtatcagagggaccaaggtataaagatcatgaagactagtttgatatgtacattgcctgcgaagactcgaccaactcatggtttagtaagtttaaattactagataactgttaattatatgattgcctgtttatctaaattatgttagttgttggaaaagagtgaaaagtttgagatgtttagaaacacttattagtattgtctttacttgaaatgtgaccacagttgtatagactatgcacccaaggcggtctggtaggggtaaccgtgagcttgcaaggctcgtggttgaaggtgagagcgagaaccctccaccaccaccaaactaggaagagttatatgccatgatgcaggagactatacggcaacaaggcgagcaaatctgagaattaagggagcagcgagctcaaccttctccaaacgttaatcctgatcctccggcacttttggtagtgccacaggatgcagggaatcgcctagaaccattgtataagcagtcaggaagaagaacccgccagggtttgggggtggtgatgatccactcaaagcagagcagtggatgagtatgataacatccattttagatttcatgcaggttgagaataatgatcagttcaaatgtgctatctacatgttgcgagaagatgcccgaatatgctgggagattgtgtctcagggtcatgacctaaataacatgacttgggatgctttccaaatattgttttacgagaagtattataatgagtctatccgggcagcaaaagtaaaagaattcatatgattaacttagggcaatatgacggtggcatagtatgccaccaagttgatcgactggcaaaatttacttcacttgaagtgtttattgaggctgctagaaaagaaaattttattcagtgattggatgaacatattgcacgagatgtgattgttgttgtcaaacaacctgggtttgtttgtgttggaaataattttaccaggatctcgatttactaacaagtatgttggattaacaac

SEQ ID NO: 335497 - DNA, 343 bp, Cannabis indica
cccgtacactcgcacacacacacatctcaccactcccctatatgctcgcacacacgtctcaccactcccctatatactggcacacacgtctcaccactcccccatatactcgtacacacgtctcaccactcacccatatacgatgcacacgtctcaccattccttcatatactcgcacacacgtctcactactcccccatatactcgcgcacatgtctcaccactaacccatatacttgcacacacgtctcaccactctcccatatactcgcacacactcacctactcacatgcgggcctctcatgggcttgcatgggagccctttgttggaattattttacc

SEQ ID NO: 335498 - DNA, 703 bp, Cannabis indica
gggggcttatttattataaaaaaaaatatttataactacattataattactcttactaaatttatctaattttgtgggagcttttctactattttggtctataattattaaattaaaaaatccacatttaattttttaaaaggcaatatttttgttagtgggggctatagccctcacatcaatgttaatgggtccgtccctgggtgcaatagacgatgtacatgtaaatgtcgtaattccacctgaagatcaagtaccatttgttggtagaaaaggggtaccaactcagtatattatggcaatatgtaattttgatatgcaatttatatatgcatatgctgggtgggaatgttctgctcataatacaagaattttctattcagctttacgtgattcaactttaaattttccaaaaccaccccaaggccatctaaacacatttataaattattaaagtctttataattttttaattatgtttttatattttatttgataggaaaatattatttagtggatgcgggatacccacaaattacaagttttttaggaccatataaaggccaaagataccatcttccacaatttcaacgaggtagcaaacctactggttataaagaggtatttgttgggttttgtgccctaaataaaactcatttcaatttaatcaaatttattaataaagatcagaaatcacatttta

SEQ ID NO: 335499 - DNA, 762 bp, Cannabis indica
ctataaaattcttgtgtctttacatttcttttctatataacaattgctataaatcactcgcttactaaataagactcacagtcgttgactaaaagcgaggttaacattttggtgctttcattgagagctagaatcaagaatcgctcttcattcaaaacctaaccataagtacgattgtgctgcagactcgtaggggcctggttgatccagccaatccacagacggtgtatcctacattgtaaaacccaagaaacgcaagggttccgccagctgttaatcctgaacagccggtgaacgtgggtcacggtgtaacgactcctatagatgaaattgcgcctgatgtgcaagagactgggaataatagttcaacagccaacaaggtcattcataacacagtcgttatgcctgttaccaacactcaaacaaccattggagatgatactgagttacaaaatctccgtgctgctcttggacttgtgcaaggtcataccaataccctacatcatgatcaggaagatctccgcgcagcggtaaatctcgcgttcgaggaacaaaggtgtatgtttaccgagtggagagataaagagatggaagcattaagggctccatcatacataaattgaaaatcgtagtcggcaagatatgtgctgatcaaaagccaacaactataggacatcaacctccaagtgtcatccccatgggcgaaacggcgaagatccaacgatgaatacttcccagactgcaaatggtcagccgccaaat

SEQ ID NO: 335500 - DNA, 566 bp, Cannabis indica
tatcagtggtaactttgattaaaaacaaaatgaaaacttacagaggtaattgaaagcatagaaataaatgcttcttttcttttgttttggtttcttcactacgcactccacaaaatttgctatgtgattcacttgaaatcacaaacaattatggtgaaaataactccttggccaatgacaatatattcaaagaaaaaggaaaaatcgcccaagaacacagagagggaatcgtggatgaaggagaattatattattcctaaaatttttattttagtttcacttaattccaagactcatattttattagtaactaagaaacaaactgcgcttcgcgtgcggtttataaatattttcaattatttatataaaaagtatgttagtaacatttctatcttaatttacaataataaaaataatatactcaattgattttaaaaatatgctcccaacataataaatttactattgttaaattatttatgaactgtgtctcttaatctgatcatattgactctttttttttagtacaatgagcatagactcttaatgtgtaaaataataataat

SEQ ID NO: 335501 - DNA, 559 bp, Cannabis indica
ttaaaattgaaaaatcacgcagacaaaacaaaattggtgtttggtaacactttcgttttttaattttttaattacaaaaatgaaagtaaaatttgtgtttttaaagttttgctttcaaaaaataaaaatatattgtataactacttgttttttaattttaaaaatagaaaataaaagtgggttttgtaatttttatttttattttttatttttattttctgattttatttaagtcgggttcaggttctaaagtccaagttgggatcggagtctaaaatattaattaaaaaaatgttaaaaaaaaaattaaaagtcatttttttttcaaaatattttaaattttgattctcaattaaaaattaaaaagtgaaaataattttatggaatatgtttttggaaaatattttcacttttctaattaaagaaatagaaaaataattaaaaaaaaaattatcaaatgcacacaaaattaacaaagaatttttttaaaaaaataataagaataataatgatttgctttcaattcccgttctcaacacatgacccatatgagcttgaa

SEQ ID NO: 335502 - DNA, 1092 bp, Cannabis indica
ttgattctgatgtcacggtccctgtttctagaaaaaatgtatcatcttgaactgatccaattgtgtacgcagatagttgttgcttggaagttgttgccgggttgtttccaggttgctgcaaatctgcctgtgctgagttgttgtcatatgatgccatcatcatattgttgcataccattgtttggttaggtggtgctgtgttgctgattttgttcacacacaatgggtaccttgtgaaatcaacctctttggttaatagctttatgtagaacagcagacttttgtcatccttgatttgtagtggttggcctccttctttcagttgatatttcagttgtatttgtgttgttccagggttgcattggagttcttccatcattattctcactagttcatcaaaagtgcatttgctggaaattaattctccacttgattcatattcagcatagtttttgttgtcatcccaatgcccattgctttgtaccaaaatttgtaatggtttcgtctcctgaaataatgtaaaataattatttgtttcagttttagaagttgcaaataactatttcgatctgtcaaaaaaactaataaacaactctttttagcaacaatatttgcaaataacatttcgatctggacgactatttttatctgtcaaatcaactattaaacaactattttgaagcattcagtaattaataagaataaattcatcatttttcatttgcagatcccaaacaataattattttactggaaaacaacttataaacaactgtttacagattaaaaccctgtagcatctaattatatgcattaatattttttttaatgcaaacagttgatgtttttttgttcagatttatccaaatttcattattatttcaatttattcctgttttcctcaatttataacaaattctcaattatgtagaataaaagataggaagatgtacatgaagaaattgtattaccttcaattctttctctgattcaatcatgggtgagtttcaatgatttccagatctccttctcttcgattcttctactctgaacgcgttgggcttttgactgaatgttgtttttgagttttttt

SEQ ID NO: 335503 - DNA, 562 bp, Cannabis indica
gcggaggccatgatccgggacgaggcccagcggagggacaggctggaggcccagcatcaggaggagctgagggcacaaagcgaggctgctgataaggccaagcgggagctccgggaggccagggaagctttggacgaaatggttgccaaggtgagatccttagaggaaactcaccaggcgaacttagagtccaaggccgctctagccgcggagttgaaggagctcagggacttcaaggagcaaaccatcaagaaggcaaaaagagccgagctcctttctcctgtttcctgcggccggtgcccaaagcgcttcgacgatggggtctacatggcttggtctaccaacgaccaaaatatcaagcttaccttctatcccaaacctgaggaaatgattgccaaatttcgggagaagaaaagaagcttgatgccatggtagaggcgcgtattggacctcgccttcctccgcgcattgactgagctgctttgagattgacccagtacaaccaagattccacccgcttctttattattattctctttttttttcttgtacatatttgctg

SEQ ID NO: 335504 - DNA, 1000 bp, Cannabis indica
ttagagatttaagtggaaggagacacattattccgctgccatcactgtaaggtttcttaactttttatgtgttttgtttatcgttttagaagttcatatttaggttgtatatcaacatacttgtgagtagatctaagatcctggtaaaattaattccaacaaacatgggctagtgtaccaagcatacaacatggactatcgaatcaattttgtattatgccaacgagtttcaaacattttgttgcgcctctctatagttgcacgtggtagttgtctttctagcgtctccaaacttaactcgaagcaaccatcatcgtctcctctctaggatgtctagtattcccatgaagaaaagcgacccagtctcaactccatctcagtctactgatcccctttaaaagactaacttgctcaacgacatcttgttccaacattcaaaccatctcgatctgtccacacgcctacatcctctctaggatagcccaaccaggttcacctccgactgagatgaacctggctctaataccaactgtcacgggcacaccttttcacgtagcggaatacccatgcgacacaatgacttctctaagccaaggtcaaccttccaaccatctaagtaacaatgggttcattttttgcacgaccgtgtgcctcgtgtacactttcgtctctcaaaaaactcccgccgagtcatgctcggaagcatccatgagtgcatccatgcatcgaggctctctagccaagatactcgcactattcataggttctcactatgttaagacaaatcccaacactgacgctcacctagtcactcgtgaccaaggtagcatgtgtggcaagatgccaacaccaagccgacgtgccaacgcttctatcatgccccattcgatacttttcgaatagtctccctgattgcccaaggactcgccttgcctccacgcatgttggcaggccctcgagacaagctgtcagactagttgcatacattagacctctgtct

SEQ ID NO: 335505 - DNA, 629 bp, Cannabis indica
catgactgcactcgtaagagttgggagaatataatctctcaaactgcggccattagcttgatcttcaacgacacctccattattaccgttgttgcctccattatttgcagcattcgccttaacataggcagccatgatttctggtgtttcaacagttgttgaaactctttcttgcctcttgttctttctgtttctcctgcaagttttctcgatttcaggatcaactggtactatgactgcttgtccttgacggcgaatacacttaaaattcctgaaatagataaagaaaatattgcaacagattagtaattagcaagaaaaataaaccaacgtagaagttagtataattttgtgtaatatcaatctttatacaattccccggtaatggcgccaaaaaacttgttgcgaaaattattgaatactacgcaagtgcacgcaatcaagtagtatactcacgcgagtgaggccgaaccacagggaattggattaatttctactaaattatacttatgattctatttggcaaatcaaaagtttttatgattgaaatagaatgaaagtaattcagaaaacttaaataacacaagtgaaagtccagcaagatgagataatagggaggagaatcctgt

SEQ ID NO: 335506 - DNA, 1666 bp, Cannabis indica
ttacttcccaatgtgttgacggcacaataaacaggatcaagtatgtgaaaagggtttcagatgaatttatacattatgtatatataatcatgaaataaatcatgtgaaccatgcaacattaaatgttatttctgatctatattaataagtaaatctgattatattcaaatgagttttatttagggcataaaacccaacagataaatagttgagaacacgtcgacaaatcgtcgataacatgggaaaaaatattgaaaatacaactatacacaccattgacaaacaattgagaacacgaagataacatgtcaagagtggttggaaatgcaaaatcattcgccatttccacaaacaatcgagaacctatcgaaagtctttgagaaaggtcttccgtgaccttgggacatctgctttgagaatcttttgagaacttaccaaccagtcgagaaaaatacgaacatagaatactttaaaaaacgagatctcgcaattttgatgaaaatcatacgaacaaccgcataaatctaccgaattatactatactttttcaattatttaacaaatgttttttaaaaaatatttacccattattccacaataaaaaggaggaataggtggtgcgacggttgggctatgagtgaaggttggccgacgtccttcacaatggttgggctggtgagagggctgggcagacgtcctcaagggttgtaggcagtagagctagagagaaaggaggagagctttatttattttttatttttttttttgcaaaaaaacagggaggagtcggttgatggggaagggaaagggggaggagttggctaatggggatgtatagagagataaattttttttaggttttgaaaacaatagtaagggtattttgggtaaagtgggaagttaatatgatggtattgtataacatatttaagagggtattttttgaaattggggtttttttaagtatattaaatgaaattttcctatttaaattaactctttttcgtgtagggttttaaatatttacttttatgagttactttagatattttatttttctacttattttttataattttttgagttattattaatgaataaaatatgttcaaaatctaaaatgataaaataaaaatctaaatttaaaattttaaaatatttattataaaattacttagatatttttagttaatatttattataaaaataaattaatacatcataaataaatatttttaataatatttagtaaatctagttaactggaatatttttcatttcgtttatgataatttacaaaaataaacacatcaaacaaatcaaataaaaataaacaaaaacatgttttcaaaatcattgtaaatatttaaattataaatctttctaatcaacaaaaaaaaaaaacaatgtgatttattaaaaatttgttcaacactgcaagctataaaatttcatgtcatgtgaataaaaaagttacaatatatttaaagcaaaaattatattttagctatataaattgaaacacaaaataaagtttaagtcgttgtcatcaccgtgtcacacttgtaatcactattatatttaaaattagggtaaatagcaacaaaactcccaaaactttcattttggtttcacttaacccccaaaacccaaatttgggcggtaa

SEQ ID NO: 335507 - DNA, 947 bp, Cannabis indica
tcagtaaactttttaggaaactttaaggcaaccaacatttcctcgagaaaatcccaatccaaagtgtcataagccttttgcaagtcaagtttaatcaaacaattaggcttagctccttttcttccataattcctaattaggtcttgacaaatcatgatgttatgagctatatatctacccttaataaaccctccttgattaagagagactaaatccggaaggatgttcttaagcctagaacatattagtttggtagcaattttatacaacacattacaacatgagataggtctaaagtcactcaccaaattagggctcttgatctttgggataagcgtgatcactgtagaatttatctccttcagaagcttccctgaatgcagaaaagatctaatggcttcacacacctccaacccaatcaattcccaattatcctggaagaagaagctcccaaacccatctggacccggactcttgttcccaggaatgctaaaaactgcttgctttatgtcttcatttgaatactcagctaataaggcttcagcttgggcagccgaaacagtaggcccctcagctatgacagacattttcactttcctcctgttttgcattttggttccgagaagctgtttatagtattgcagaaacgcatcagtgacatcttgcccattatccactctaatcccacttgcattcacaatagatgtgatcctattttgaattctcctttctcttaggctagagtgataaaattttgtattctcatccccatccttaatccaattcactttggatttttgttgaaggaaggaaataaaagccttatgaactttctggtactcttctctagcttccaattccttttgctgagcatcccgatctctaggattcctctgaatttctacttgacactcttccaatcgggccttcattttggacaccacctt

SEQ ID NO: 335508 - DNA, 612 bp, Cannabis indica
taattcaaaaacacaaaataatatacaaaaaatggtaaatccgaaatgagtatcctccattattaaacttccatgtacctcaatggaaaatataaaaaaatggttcccaaaacatatatgaacacatttaataaaaacatagaactcatattcatacaacattaaacatattaatccgaaaataattatcacaaatttcagatttggaaaaaaaaaaggtttatgacaaatttgagctctaaaatcaataactttggctcttgataccaattgttaaaaacaatcacagattattagtattgaaagcaaatatttcactcaccaaccaacattactcatagtaatatatccaagatcaagtatttatttagagcatgaaattcataaatacacatacctcccaaaccatccatatgagccattttgctttaatgcctccaacaagaatcaccaacaagttctcaagatcggatccaagcccttagagccacaatgtggagctatccccttagtcttattaccatacaccttaaaaccactctaccatcaataacatatatatatatatatacatctcatatccttataaccctaaggggttattcactaata

SEQ ID NO: 335509 - DNA, 582 bp, Cannabis indica
aggtaggaatgtcggttggagcaaaaatattaaaattgatctcttcatcttgcactcacaactttaactcccccttttgaacatttattaatgctcgccctgtggctaagaatggtcttcccaaaataatgggaatagttgaatcttcctccatatcaagaattaggaagataaacttaccaaccttcacctgtacatcttcaattatcccacgaggatgggtcaaagaacgatttgccaattgtaaagtcactgttgtgggctttgcttttcccaatcctagccttttgaagataaacaagggcattagattaatgcttgctcccagatcacatagagctttagtttccactgaaccccctataaagcatggaatattgaaactggtcgaatctttaagcttgggcggtagtttcttctgcaaaatttcattgcactcctcagtgagtgccattgtctcgaattcttccaacttccttttcttagctaaaatttctttcatgaacttctggtaagttgacatttgttccaaggcctctgcaaatggaatgttaatgtgcagcttcctgaatatttcaagaa

SEQ ID NO: 335510 - DNA, 494 bp, Cannabis indica
atataattaaatttaaaaaaaatgaaaaaaactgaaattcgcttgcttttagcgtcggttgtacgctacatatggcgtcggttgctacgctacatatggcgtcggttcatataaaccctttagcgtcgccctgatcagcgtcggtagcaaattttgcgaaaactgacgttgaaagggcttaaaaaccgcctctaaaggggatttttgtagtagtgttgattaattaaaaagtaaatttgaagttccttcatgctttaagatttttattattattattttcctttttttccaatctatttttaaagtatttgaatgctttcactcatctcacaatgtatattcacaagaaagatacctgaattcatacggacaaatcttaatacatgtaagtcaagttgaacatttttttttattaatttaaggttttaatggcattacttaatatatcacaatactaacaattgttagtgttgggaattattttaccaggatct

SEQ ID NO: 335511 - DNA, 720 bp, Cannabis indica
tatcaaacacatattggtatttaatctttttgatatatttgcaattagctattaatttgcctattcttgtatattcgaatatatgattttaaatttctgtaggcttttatatcatggaacaaggtggggacgataagtggagtgcatagttgtagtatgatggtgatgatggtccatccgtactagaaggatctagtgttgatcctgaacaaccatccatggaagaaggtagtggtgctcctgaacaaccaacccagaaaaatcgcgggagaagcaaatgaaacgatataacaaaaatggttagcgagggcaaaaagttagaggttgagtacaacaactacgaacaacactagggaagggagcgacagtaaaagttacccaaattggagcatgggtgctaaataatattccacttcgagacattacggggcctagagggagttaggaccttaaaaactaattatgggaacacataaaggtaaaattaattctattattcgaggtctttactattgattataatttgtacttataactatactattgtcaatgtggaaggccgcgtttaatgtaccggacacaaataagaaattaacaattgctaaagttggagatatgtggaaagattggaaaaataccctaacagaaggtatttttacattcaaagatgtggctcccaatcttctcgagaagtcccccaaactttatgaaaaaataatt

SEQ ID NO: 335512 - DNA, 603 bp, Cannabis indica
tgacgtgataatcaacgatgtgatttacttacacttatataagtagaatgccttttctaaggcattagcaaattgagcttgtatggaatgtattggttatacatcagactgaggcgatattaatagtgtaaatgatatcataaacttatcataatatcttttcttagtcaatatcacttagttgatcttagataaatatgatctcaatcctgagatggttagactctaggctaatactatttaggttttttgacttgttcgttaccctcttacctataagactagctcatacttacatcttgggaacatagcagtataattgaatgggagcactaatcatagatatggaatctatagtttcaataaattcttaaaagtgaaatgagggtttccttagagcttggctaaacgagtttaaatggtggagtactcatttcagtaaatatattagtttactgtaatctcatttacaagtagctatgtgacgccctaatctacgaggacaccacgtgtacgattttataaactagttttacaaaagaactatatacgacaatgcctcacaaatataaaaccaaaatacacaaaaaatacagcccaaaa

SEQ ID NO: 335513 - DNA, 2222 bp, Cannabis indica
tgaaggcgccagggcagaattcagagctgttcagttggagttgggtgaagccaacaagaagctgtttgctgcccagaagaagataactgagctgactaaggatctcgaggtttttgaccgtcttgaggagaccatcgagaccttatttgctgaagtgaacagtcttcaggatgagaggacttctcttcgagcaattcttcatcgtttgaaggaggagaaggaagctaaggaggacgaggttttggcccaggtggcaaggttgaaagagaaggtcaatgccttggagacagccggtcttgagctcttctttgacttttggaaggctaatcctcaggccaactttgactacttgggtgatgctaaggacatgtaccttgagttctgcgcgtcccaagtggcctatggcgaaactgaggcggctgcttaaacctccggtcagactactgatgtacctcctgctcaaacaacatatatgttatccaaatttttacactctgacgtggcatcgcatgaatggtgacaagtggaatccacttggagaatctgctcgggaagcatagttcgagcaagatgcctcgctggcatccctagagcaaaccaattagcaatccacgcagagcaaccaacacttagcgaattcagctttcccattgtgagtcatcaacgaaatccctataacgtagggatcagattatagggatatggcatacacacgatcccactatcagtgtatccatcatcaatcccacaatctttgtattcagcattgatcccacgatctttctgtttatacgcatggtgacgagaggggaaactcttcctctccaagcttactagccctataaatagtgatgtatgttcactgggcaaggggtcgaaaataacttagctgagactataccctaaatatattatctaagaattatacattcagagatactgttgtaagagctataagaaaagaaacctttctccttgatcttaagtcaatacaaataacgaggattaggctattaccgaactgctcggggctgaaactctataaaattcatgtgtctttacatttctttattatatatcgattgttctaactatcttatcgcttactaaattcgactcgttgtcattagctaaaagcgaggtcaacattttggtgcttttgttgagagcaggatccagaatcgctctttattcaacatctaaccacaaatacgatggtgtgaacttgtagaggcctgactgatcgagcaaattcacagacggtggatcctgcattgcagaacctaggaaacacaagggttttaccggctgttaatcctggacagccgacgaacatggggaacagtgtaacaaatattatagatgaaatcgcgcctggtgttcaagagactaggaataacagttccgcacccaactagggcatcataacacaactgtgccgcctggaaccaacacccgtacaaccatcggagatgccactgagttacaaaatctccgtgacgctctcggactcatgcagggtcataacaataccctacatcatgatcaagttgaactccgcactgcggtaaatctcgtgttcgacgaacaaagccgtatgttcgctgaaaggagggatagagagatggaggcattaagggctcaccatgtagagatcgaaaatcgtagtccgcaagctaccgtgctaatacaaaaagcctactgaactgtaggtgagcaacagtcgaacgtcattcccctgggtgagacgaacgaagaaccagcgatgaatacttctcagactacaaatggtcagttgcccaatctccggtcacgagttccactcgtgggccaagcggtaagcggacagaccttgtctagtaattcatcaagaaaagtcatacctgatggttccgaccagataaatggtgccattccacccgtcaaccaagagaatcaatcgctgaggcagcctgcagacacttctgtattcgaaaggttgggagcaacccatgacataaggaatgatctaaatagaaggaggggagtagacaatcagaatgttacgacaatcttgcagcccagaacccgtactcaaattcccgctcagaaagatgctgatataattcaaattgaccagaatgccgaacaggttagcccagtcgtagagtctcagctagacgaactaaaaaatatgtttcacggcatggctggacaaagaaacaatgatcttgagctggacc

SEQ ID NO: 335514 - DNA, 1613 bp, Cannabis indica
ttagttaagtggggggtatttagtcatttacccttttgttttggggctgaattttaaggtggcagctggccacaatttggtgattaacctaagcatagtattgatcttgttttttttgagaattaagaaaatagaaaaaagagtgaatttgagagaaaccttttctctctttctcttgttcgaagcgctagaaaccagcagcttgtggggtgtttttcttgctgaaatctaagttaaatatcaattgttagtgacccaattcaaggtagaattcttggactcaatctcctttattttctttagcttcaagtaatgaaattttgcatgtatttggatgtttgagctctgtgtttgctgctggtgtttgagtttgctttatgaagtttgtttatggttatttaaggtgattcaagcaggttttgtagttaattagttagatttaaccaagtttgagttttgaactcaaaacttggagctttaatggtggattttaattctgtacttgggttgttgttttgttgctttagaaatgttctttgggttatttagagcaggtctggagagtctcatgtggtttggagttgttttggttgagaaatgaatttttaaaagtttcctgcactgaaccggaatttcggttcagagtggcatgtaggaaccggaattccggttggtttcttgggtttcctcccagaaccagaatttcggttgtagaaccggtctaccggttggggaaaatttgggaaccctagttcttcccatttttgtgttatttagggtattgccttgttatgtatcgatagggaaacttttagtttcaagtttaagtcccctgggaagtgatttagcgtgtcacttatcagtgttgtgattattatgatttaggagcctgtaattcgccgagcagatcgttccactcaggttgaccggcacacctgaattcggaatcgaggtaagattagtataatgccatgcatatgcttatacatgtttagcgtacatgtcagtttctatcagattaacaaattagatatatgttaggcaaattttatatagccgtcagattagcatatcagggcaacagtgaggtgtacatagagttgcaccgagatgccaacagatatatgctaggctatcagatagtatggattaactgctaccacatcggtacgactagagtaccgagtataggctggattcgcagttaatcatactttgtcatggacgtccctgattcagttagggttatggtcaggtgtatgggcgcttggttataacccgggatttagtatgtttattatattatgcttttcttactgagtctgtcgactcacagtgctatgtttatgtgtaggtaagggcaaggccaaagctgaggaaccgtgaggacgagcagatgaagattgtacatgtcggggcggttaggcctggagcgtacgatcctcgggacatcagggcttctgtagtgagtcgctgggcgacaaatattttgtaatgaacagtaaactttttgtaaaaaattttgtaaatgggatcccaaagtatgttgtatgaaatgatataagtatttaattaaataagaaaatttttaattaatcacgattttcataaac

SEQ ID NO: 335515 - DNA, 908 bp, Cannabis indica
gctggttctctcactgatcgaagatccacttctgggtactgctcctacgtttggggaaatctcgtatcttggcgaagcaagaagcaacaagtggtagctcgcagcagtgcagaagcagaatttcgtgccttagcacatggaatttgtgaaggaatgtggctgaaacgtcttcttgatgaactcagaatcaaacttgaaggcccaatagatgttctctgtgacaatcaatcagccatagcaatagcaaagaatccagttcatcatgataggaccaaacatgttgaaattgatcgtcacttcatcagtgaaaagattgaaaacaagatcatcaccttgaagcatattccctcgagacaacaagctgctgatatcttaaccaaagctctccatcgtcctaattttagggaactaagttcaaaattaggaatgtttagtatatatctagcttgagggggagtgtaggaaatcaagctagctgtaaattacatttaatgtattttccatttactctagtattactaggtgttcacattgtattatatataccctttgtatacactaaaagagatcatcagaaataaaaatattttttctctcatttgcttcacttacaattcttcactaatatagattaatgcacaattaagaatcaaaaggtctttctaggcttgtaatgttaggcttagggtaaagatagttgaaatggtcatttaggctttactataccataagcttctcccatgatgtcactaaaaatatttttcacacaatcccaatacccctttttctaattacatgagagatattatttttttttttgctaacacttaatgtttatcttatttttttttctagatttgacaatgattgtcagttttttttttcaagttgttgtcaatctaagattt

SEQ ID NO: 335516 - DNA, 553 bp, Cannabis indica
atagatattggacgaatgcttcaaagtcctccatgaagtacaatatgaaactcaatcccctaaagtgctctttcggagtgagctcgggtaagtttctaggcttcatcatcaatgcctaaggaattgaagccaatccagagaagattcaagccctcctggatatgaaatcgccaataaaaaccaaggaagttcaaagtttgacttgtcgaattgtcgcactcagcagatttgtttcaaaatcaacaaacaagtgtgttccgttcttgaacattctacgaggaaataaacaatttgagtggatggaggaatgtgaaaaggcttttcaagagctaaaaatgcaacacgcaaaacctcctgtgctctccaaacctctggacggagaagaacgtgggatatacctggctgacacggaacatgctgtaagtgtcgtactaatcagagaggagaataatatccaacacccggtctattacataagtaaaagactcattgaggttgaaggtcggtatccattgatagaaaagctcacctattgcctaattctagcaacaag

SEQ ID NO: 335517 - DNA, 709 bp, Cannabis indica
taaaataatttccaacaggaaagaccattgctcttgttttattgtggattaaggtagctttctatgatttttaatcttgttttaatctaagatcctgaattattatgtttgggaagcatgaacttggtgatgacgatgatgggttgcatgttaggtgaattggtgctaacttgggttgaatttgagtttgatttgttgtatgcttgttgttgaacttgggctgagagtatatggtgattctaggttggaatttcaggtgttaaatttagtgcttgttgctggaattgatttgaagagcttggctttatagttcttgagtatgagcttaggttttgttaatcttaagcatgatattgagtctttttgagcaatctgaattctgggattttgatgcatgtaatatgttaattaagcatctattatgtgcttgtaatcctaattgttaatttgaaagtttggttgagaatttggagtgattaggttgagatttcttgctaaaaattcgaagtttgcttgctggtttctgggttctgcaccctgatgccgcggcatgctctgagcatgccgcggcccactcctctgtatggacctgagaatttgtcccaggtgccgcggtatggtttgggcatgccgcggcccgctctcgtgtttttgggtagttttgagttgattttcgaaagttcgtaacttttgattccgaactccgatt

SEQ ID NO: 335518 - DNA, 604 bp, Cannabis indica
taaacaatacgtgaagagacaggcccatggacacaaccaacccaatctacccaataacctaaacaaccaggggttacaacatcttcttgttgaaggagaggacatcttggttatttcaggagggccacatatcacaggggagagcaataatgcccaaaagagatatgtgaaagagataaagaatgagcagttggccttcaccccgaaaccttcaaagaaggtgaaaactgaagaacctccaatcatattcacggaggaagacaagaaaaatgtgagatatcctaacgtcgatccattggtgattaccattcaactcgccaataaaaggataaagaaggtgttaatagacaacagaagctcagtaaacatcctttataaggaaatgctgaggaagatggggctcaaaaaagccgaattcaggccttgtatggtaaatctttgcagcttcactggagacagcattgctagtcttggcataatcatgctcgcactaaccttgggcaaggcacccctatccgccactattatgcaagacatcctagttgtcgacctgccactcgcttacaacgtattgttgggtcatccagcattgatcggactaggg

SEQ ID NO: 335519 - DNA, 1149 bp, Cannabis indica
agtttctcattcctgatcaatggggagattaaaggaaaattgatctcagagcggggattgaggcaaggagatcccctctcgccctttctgttcctcttttgtgcggaagcgttctctagtcttattcaatatgaagagagggcaggccggctaagtgggattcgatttggtcgccaaggtgtttcgatatctcatttgtttttcgcggatgatagtctcatatttattgatgcgaatgttgatagttgccatcaattccaacagctactgagtaagtacacggctgcctctggacagttggtcaattatcataaatccgaagcttgttttgggcgtaatgtcactgctgagatgcgggctctgctggctgggatattgggggttcgagaggtggaaaatcatggcaaatacttgggtttgccttcttttgtgggaagaaataaaagagagttccttgatgagattaagaacaaggtgtgggcaaagatgaaaggatggaagacttctatgttttcggtggcgggaaaggaagttcttatcaaagctattgtgcaagcaattcctacgtatactatgtcgtgttttaagctgccgaagaaaactatttctagccttcatcgtatggcctcgaggttttggtggggttcatcggataaggaaaagaaaattcattggtgtaaatggcgttatttgtgtcgaccaaaggacaaaggagggttaggctttcgggatttgggaatgttcaatcaagctctccttgccaagcaaatttggcgttgtttacgatttccacaattgctgtgtagtcgagttctgaaagcttcttacttcccccggaaaggagttctagaggctgggtgtggagccaatgcgtcttttgtgtggagaagtcttgtttggggtaaaaaattaattttaaaaggctatagatggcgtgtgggtaatggagaaagtgttcgggtcttggaggacccttggttgcctcgtcctgtgacatttaaggtgtatgatcagccttcgcttcctgcaaatctctatgttacggatctcaagatggctgatgggcaatgggatgaaggttttattcgttcgatatttaatcccactgatgccgatcttatcttaggtatcccttgttcggattgggac

SEQ ID NO: 335520 - DNA, 1275 bp, Cannabis indica
tgaccttccccaagcggtgtgggattgcacagcttacccggtatttccccttacggatcacgggactacttgcgggagctgtatctcgagttgttgaataaatttcgaggacgaaatttctataaggaggggatacttgtaatatcccaaaaaatatagcgatattttaattggacatattttattaaatatgtgattaagtggatattagagtaggattataatcctacttaaactaaatacgagtcaattagggaaataagaataaataaagcgtaatttactaattacggagattatattggaatatgtgggtatcgtagatactataatttcaataaaatatttttgggcttggcaactatggaacttgacggggaggtctgaaatgtcacgacaataaaagatgaattgaattggattcttataccaagactagttttgagttttgggttgtcgatatggtggattagctagaattacttaaatgcccctaaatttgtaaatggtataagttttgttaagaagggtaaaatggtcatttcttaggttagtttattttgtcttttagtgtttaataagtttagaatattagatttaaaagtaaagcttggctgaatagtgttggctgctattttattttttaaaaaacttggaaaataagaaataaagcaaagaaaatgaagcttttattcctctctccttcgagcaacgtaggagctgagcgaaaccaggagtttttcatcaattctctgtggtttctagtaggtttcttccactcaagttcaacctaggatgattaaggtaagtccttgccatgtgaattaagaattttcaagttttaagatgattttgggttagggtttttgagattttggtggctgtgggattaaattgattagggattgtgttttagacctattttggaatgtgttgaagtttgaattgattgatattcatggctgtttgattttgaagttggaattttgttgatttaagggcttaaatttggttctaatatggtaaaatgaattggagatttaattgatatgttttagtgctttggaaatgttgtattgatgatattgtactgttctagagcttttgggttgctttggtggtgtttggattgattttgtaggaagagaactcaaaaattgcagccctgcgagaaccagtcggccggttggttctggtgcagcagaactggtcgaccggtttgcctacaggggaattttttttagtttttcctcagggccggttttagggctcggg

SEQ ID NO: 335521 - DNA, 1842 bp, Cannabis indica
aaagagttttatttagggcataaaacccaacaacatcttcaagagggaacaggagctgacctacatcaaagcccaggctgccgccggaaggactcttcgtctggaggcgggtccaggtcgggtgtcttctaggcctaaaccgctggccctagtccccaacacaggagctcctgacgccagtacgtccggctctggtatgtcccctttaactattcatcatgtcccctctatccgagagtatacccgatgtagacctatagaatttgatgagcacctttttacgtttaggatgccctccactcggtgggaggataatgccaaagacttctatttttcccacttgggtcatttcttaggccgatcccggatgggctctggacctcctgcacccattccctttgatcatacagcctacttgtcctccagctggtttcttccctcggacagctttctcggggatgacgaagttagcaatgtagttcaagactttgctagggctgagttagagagtcagggtaggactagctttatcgctttaatgttgggtgcatgccatcttatagttattctaacactttgtttatttctttgtagcagcagccaagccaatggaagatcttctggcgactctcgccgaggcctacagcctggactcttctctacctcctgctcctacccaactgatgacccctgggaggtcatcttccagtgccccttaggcacaatcgtcttgatagacaaggaaggggaggccgaggaggaggagggcgagattgtggcttcccttgaccgcaagcggaagggtaagatggtcgaggtcgagtcttccaagaggcccaggaggagggacaccccggccgttagcttcgactcagggattcctcccgaagcggaagagtacaccgtgccgcatggcattactctcaccccggtccccgcagatgaagagaggcaactactccgaatcgccaaacacaactacgccctggacgagttcagtcggggacatgctgaggtggaagccctgaagaaggtcttgtgggaggagcaacagaatactttgcgcgaggaggccttcagaaatccctgggacctgaacatggatcccttgacggattggttcaaccgcttcgtcggtcctactctcgccccctttgcttctgagataactagccagtttgtctcccatctgacccaattctcagccaaaagatacgcagcctgtgcctccgcgaactctgtttatcaggttcaggatatcagcgctgccatggctgcgctgagttcttgcaattcattcctctctttttgcttatattttgtcttaaggcatctgatctcattcttgcttcttttttagatcaatgtagagaccagccgcctctcaaagaccctaattgggggcatggacgaggccgtgaagagtctgcgagacttgtcggctgagaggaaagcattccgggaggaggcccagcagagggaggctaaggcggaggcggggcatcaggaggagctaaaggctctgggcgaagctatggccaaggcaaagcgcgagttgcgggaagccaaggaagctatggatgagctgactgctaagttaaaatccatggaggagctgcaccaagcggatttacagtcgacgaccaacctgaccgtggaggtgaaggagctaagggactttaaagatcaagccttgaagaaggctaaaagagatgagctcctagccctcgtcgtctgcaagcattgcatcaagcgcttcgacgatggtgtttatgttggaaattattttaccaggatcttagatctactcacaagtatgtattaacatcctaaatgtgaact

SEQ ID NO: 335522 - DNA, 500 bp, Cannabis indica
tatttttcttctattgttggcccttgaacttagtaactgttcaaagattgctgaattgtatgtttataatttgagatcaatgtcaagatagaaaaacaggtcttctaattatgaagatgctaataagttgtaaattgttattggagtaatgaatttcattgattaaccaaaaaaaaaatataaaaatatttcctaataatagttattattcatagatgtattcttttaaagtaattcattcattttgataagtcaactgtcttaagtaagtattatatatgttaaatttattttataagatatatatatagaacacttcttaatgggtattatccatgaatgattactaaacaaatttaattataaatattaattttaaaaatatcaaaccatcgaattttgatctaataacgaataatgaaatcacaaatttaaatttctatgcttaatttaactacttaattaaaaaaaataatcaaaaaaatatctctttttacact

SEQ ID NO: 335523 - DNA, 466 bp, Cannabis indica
ttttgccccattgatattttgtcctttagtggacttagtaaatgagtttaatattgtatttgttatttgttggttgaagtaaagattaattttatgtatttttatcatttattaaaagttagaaaaagttgaggaaaatcaaagattaagaaaaataatttttgaaatgcatgattagtggattctaagcgagtttggtattttagctcaaaattatgatttttatggaaaattaaggaattggttgctgtagagattgttcgtgcatgggtttggtttatgcagttattttatacttgtttaagtagattaaatcaagttttgatgcttgtgggtgagttttagccaagcttgagttttgaactcaaagcttggaggtcacatggtgaattgtgtacttttgcttgaagtttggttttgatgctttaaaaatgtttagtggggcaattagaacaggtctggaagg

SEQ ID NO: 335524 - DNA, 821 bp, Cannabis indica
atagcaagcctctcaatatgatctaaaggctgcacctgacaaacattatcaaaccaactgccaaacacagtagcttcaccccctccaactatccctcccagccccctgtccagacaacccttagtaaaagcacaactaaccattatatgaaaaattatctcatcctcccgatgacacatcggacacaatccactcacatggacccttttagaccgcagagacacaagagtagggagacaattagtaagaccccgccaaagaaaattcttcaccttagggggaaatttcaagttccaaaacatcctctaaaaacccgaattatcttgagtattccacctaccattgcttacttgtaaagtgtgataagcacttttgacagaataattcccatgcgtctccaacatccaaaaccaagcatcctcaaccgaagacggagacaacggaatacaacggatcaaatcaatatctctttgaacaaataaatcatgaagaatttcctcatcccactcaaaagagcccactcttaataaattattgaccttacagtcatggagagccacatgagaagaggtaacatatggatgttccttacaaggaagccatggttgaatgagcaccggtatagaaagaccgtctccaactcgccatctcgcaccagtatcatatttcatcatattagcaatgtaagattttctaacatcccctcttaagatgatggttattttcttgcccaccaatttcggacaactcgatcacaagtaatttttttttaactcactatcttcgaatcacaggtttctctttagctatacttttcggat

SEQ ID NO: 335525 - DNA, 494 bp, Cannabis indica
aagagataaagaacgagcagtctacctgtaccccagaaccttccaagaaggtgaaaactgaggaacctcccattgtattcacggaggaagacgagaaaaacgtgaggtatcctcatgtcgatccattggtgattaccattaaaatcgtcaataaaaggatcaagagggtgttaatagacaatgggagctcagtaaatattctttttaaggagaatctacggaaaatggggctcaaataggccaaatgaaggccttgtatggtgaacctttgcggattgaccgaagacagcatcactagccttggtataatcgagctcgcattaaccttaggcgaggcacctttatctgctaatgttatgcaagacttcttagttgtcgacctgccctcagcttaaaacatattgttgggtcgtccaacactgatcggactaggggcagtcagttcaatcaagcacctatctttgaaattccaaacactagatggcgtgggagtg

SEQ ID NO: 335526 - DNA, 682 bp, Cannabis indica
taaatcacatcaatcgtaacacaggtaagtgacacgctaaatcactttccgggcacttaaacttgagattaaaagtttccctatcgataaataacatgctaataccctaaatatctcaaaaatgggaaaaactagggttcccaaaattgccccaaccggtagacaggttccccaaccggaattccggttcctacaggcccctctgaattggaattacggttcagtgcaggaaagaccaaaaattgtttaactcttccaaatcaaccccaaacaacacaataacttgccgacctgctatatagaccacaaagaacatatcgcatgcaacaaaactaactaatatgctcagaaacacaaaccaccatcaaagctccaagtttgagttcaaaactcaaaacttggttaaatcaaactaacaaccattaaaacctgcttgaatccacatatctaaacataattaagcgtcagaaaacaacactaaacactaacagcaactacaacaacaaaaaccacaaagcatgcataaatctattttcttaaaattcaagaaaatcaaaaggacaaagtcaaaagcttacctagagcttaagcactcctaaatcttgtagaaactttctggaattgagaggaaatgggagcaaaccctagctggtctagggggttcgaaaaatgagagagagag

SEQ ID NO: 335527 - DNA, 589 bp, Cannabis indica
aaggttgtatttgattcctttagagagaattggaaattgtaatatgaacctttgattgatagtggatgaatttaccctggttcggggaacccaagcactagtcggctgagatgtgttctcagtgcagatgaagcttgtaaattgatgtgtgatttactgcttaaagcttaattcttgttcataactcatatcttgaaatcgatcaatttaaagatgtacaacttggtaacatgaatcattaaaatctactagttgcacttttaagaatgatgacacaaaactatggcatcttagtctgggccatgtaagtgagagaggaatctcagagcttgacaaacagcggttactcaaaggaaaactgaccacaaagttgcccttctgtgaagaatgtgtatttggcaaaagctgcaaagtgaaattcacaacaggccagcatacaacaaaaaaaacccaataccttcactcagatttgtgggatgcatcaagaaccaaaaccttaggaggagcaagctacttcatgagtatcattgatgactactcaagaaaggtgtaggtattcttgttaaaaagcaaagacctggcttttgag

SEQ ID NO: 335528 - DNA, 1165 bp, Cannabis indica
gacgtagtacacaggatgctgaactttgtcttcttcctggactagggctgcactgacagcgttctcagagacggccaagtacaataacaaatcctctctgtgaactggcttcgatagaatcgctagtttagccatgtgctcttttagttctctgaatgcctccttgcattcttcagtccattcaaatttttgacatttctttataatgttgaaaaagggatgcacttgtaggttgatcgggaaatgaatcggcttaaagcagcgaccttaccgaccaagctttgcacatctttgtgcttcttgggggaaggcatgtttattaaagcttgaattttttcggggtttgcctcagttcccctttggctgacgatgaatcccaaaaatttccctgacttgaccctgaaagtgcacttctttgggttaagtttcattccatatctccggactacttcgaagcattctgcgacattgtctgcgtggctcacgcatgcgttggatttgactagcatatcgtccacataaaattccatgttgcgtcctaggaggcctttgaacatccggttcaccattctttgatatgttacaccagcgttttttaatccgaaaggcataaccaggtagcagtatacccccttatcggtcctgaagctagtgcactcttgatctgcaatgtgcatctttatctggttgtaaccagagtaggcatccatgaaggataatagcttgaacccagaggtggcatccaccatttgatcaatccggggtaaggggaagcaatcttttggacaggcctgagatcggtgaagtctacacacacccgccatgtcccgtttggttttggtaccaatgccgaattggctagccattccgggtagtacacatcttggatcaggccattggttagcagattgcctacttctttttctagggcgtccgcctttactggatcaaggggacgccgcttctgcagtactggcagcatatccggattaacgttcaggacttgggtaatcacatgagggcttatgctggtcatgtctccttggcaccacacgaaaacatctgtggccgcccttaatgcttcaataattttgtctctctcctctgttggaaatattttatcaggatctagatttactaccatgtatgtttcattaacatccta

SEQ ID NO: 335529 - DNA, 635 bp, Cannabis indica
ttatcctaatttttgcactctgatgtggcatcacatgatgaggacacttggaatcaactctgggtaatcgctcgctagatatagtatgaataggatacctcatatgcatgctcgaggcaaagcaatcagcaatccgcacagagcgacaaacacttagcgaattcaactttcgcatcatgagtcatcaaggaaatccctataacttggggatcaggttatagagatatggcaagctatccaaattccacaatcagtgtattctgtatttactatgcaatctttctgcttatatccattgtaacgagaagggaaatacttcctctcctagcgcatagccctataaatagtgatgcatgttcactgggcaaagggtcgaaagatgttacttgagagatattgtctaaaaatttatattcaaagattccattgtaagagctataagaaaaggaacctttctccttattcttgaattaatacaaataactaggattaggctattaccgaactgctcggggttgaacctctataaaattcctgtgtctttgcattgctttaccatatttcaatgtaatctctatcttttaaatatcaataaagaaacataagtatttttatcactttgtgtgtcatttggt

SEQ ID NO: 335530 - DNA, 573 bp, Cannabis indica
tgaatgctctaataaaaatattgtctaaatcatcacgcattgttcataagatgaaactagtcccatagctaccaaataacaattctataaagtcaaaatctctgtaactattctaattcacgaaacccctatacaaaaccaattgtttctaacttaaaacgaaattaaaccttaacttaagctttccctcttcaaagatttgttatcccgctactaccagagcttaaatcgctaggttttgagttgaaaatcaaagaaaaagaatagagggggatgagagtttcgttgaactgagagaggagggtttcgttcctactgctcttctgatataaacttaaaacatatatataaacatatcacatacgttttataataataatatgttattaataataatataatattattaataatattaataaaaactttattgttgatagttatcttatcatttcttagtcattaagaaatctatatttttagggtatttggtcaactctgagtacccaaaaatatccaggtatttctaaaataaacttatcctaataatcccatcaatatttctaattaaaa

SEQ ID NO: 335531 - DNA, 770 bp, Cannabis indica
ctccatttgacttgttatcattttttgttggagatagttctgcattttctaattccttattatcaacgatggggaatactctgattcatcttaattttctaccatctcttcatcttcagattttgagtccaaaaggagttccatcgtttctattatctcttctacttaaatttctggtgggctctttaattccactactaacttattttttgtcacctcaaaatagtcaggcctttttgtttcctcacagtcctgttcagttgtaggatcaatggaatcggtagtatctttcttactcttatcactaagtttgtaccgtacggtcttgatgcatgttttctccacaccattgacttttgcagtataagccttctcaaaaaagaaactatggaatttcattgctaactctcgtatcaacattgtgtacctagttgtctcatcaacattctttatggtactatgccaaatgctatcgatataataaagaaattcggggacgtgagacaatgtcacccttaatactaaaaacgtctcttgtcaccagatcaaagctccccattttcttactattttattgatctctccattcatagcaataatctccctcaaagctctaactattttatctcccttgcccgaaacatggtcaatctcaagcgataagatgctcttgatttctctaagttcgttcttgagtcggctaagcaggtaagtactccaatgagcaccactttgaaattaaccaaagatgagaatggagtaaaggtaga

SEQ ID NO: 335532 - DNA, 547 bp, Cannabis indica
cattgtggttggaactctgtgatggagagtataagtgcgggagtgccgattctagcttggcccatgggggcagagcagcctttaaatgcgaaaatggtggcggaagagatgaaggttgggttgagagttaagagttgtgatggatcattgaatggggttgtgaagagtgaggaggtgagtaaaatggtgaaggagttaatggagggagagaagggtaaagaggtgaggaagaatgtagaggaaattgcagttatggggcataaggctgtggaggaaggtgggtcttcgtgggaagcgttagactcgcttctcaaggaggcatgcaaaatgcaaatgcaataattgaaatttgaaaccaaaatgtaattcatatcttatttgagattctctgtcttgtctttatcaatttatttgtgaggtagcatgtgatgctttagcaaaatgggctagagaaaatagtcagtgtaatggctacattttttcgaggattcccaactttttattgcaatgaacctctcttagttctttcttaaaaaaaaaaaaaaaa

SEQ ID NO: 335533 - DNA, 491 bp, Cannabis indica
caatccaactattcacttatgaaataagtgatattagtttcgctcagcccaactattcacttataaagtaagtgatatgaattacactcaacccaaatattcacttacaaattaagtgataagggctacgcctaacccatctaatcatttataaactcaagttttcaaaattatgttcaatcataactaaatataacatttattcaacaatgttacgctgaaaccaaacttgacgtactcagtcaagccgctccaaagtctaagtttcagtgtcactcactaagacttagactatgggatatagtatatggatgaatgttaaatttttatcaagtgaacaacataaaacatcagcaaaatgcaaaatgaacaatattaacaccaaattaaaataataagtcataccttcgcaaaggcaacgcccatacatcgaagcatcataaaattcaaaaaggaaattgctaagaggatgttcgtgttgggttttgtgc

SEQ ID NO: 335534 - DNA, 1213 bp, Cannabis indica
caacattggggaactcctaaatagtagaaatgaagctcaaaaaatgagaaggaaggctgcacggtacatcatagtagagggagttacatatagacgaggattctccatgccattgcttagatgtgttaaacaagaggaagctgcacgacttttgtttaaggtacatgatgaattttgtggaaaccacgctaccgggcagagtttctccacagtggcacatccccaagcaaatggtcaagttgaagcagtcaacaagacattgaaagacaccctaaagaaaagacttgacgatgctaaaggaaactggctggaggaacttcctgaagtactatggtcgtaccgaacaactgagaaaacggcaacgggacagactccatttgccatggcatatggatatgaagctatactacctgtagaactcgagccaccatcccacagaagattgacatatagccaagaggccaatcatgtactccgtgcagagtcacttgataaaattgaagagaagtgaaccgcagcaaacttaaaactgatagcccatcagcaaaaagtagctcggtattttaacaaacaagtgaaagctcggaaattctttgtgggagatatggtcctaagaagagtatttttaaacaccaaagacagtacggcaggtgtgctcggacctaattgggaaggaccttatcaagtggtcgaagttctagaatcaggggcatacaagttgggtaagtatgatgaaaaaacgcaactcgttctggtaccaaggtattggaatgggaaacatttaagaaaatactaccaatagaagtaccaagtcagacgaccatatcaagtacaaaacaaaagaacatttgcttttaagtgaatggccttctgggcggaccacgcccaaaggtttggataaagtttttaagtactcaggtcggatgaccaccattgaaagtacaatttttaaattcatgcaaattgttttatttcatgataagctaaagatcagatcagataagcataatagctttgatgtaagttactccggtaacagacatattttcgatcagtaaatgaataaagatgtttatttcaaaattcaaattgagtcggatccattagcatgatattaattaaccatccagtgcgtacaaaaggtttggtcgaacccaaaaccccaagaaagtatacttgtaaaaataaataaaaaagtgaccaagagtcataa

SEQ ID NO: 335535 - DNA, 435 bp, Cannabis indica
gtacaagaagccccctcccatgaggaaggaaatgactaagagggtcacctctaaactctacctattttacaatgattttggccatgataccagtgagtgaaagaacttaaagatggaaattgagttcttgatcagaaagaacaatctctatctacgtcgttatgtgtgatatgaccaaacacatgcacaaggtgaccaaatcagagacgtaataccaccgccaaggcaagtcacctagaggtcaaatcaatcaaagctatggagcactacgctcgaactctctatcacaagcaaaaaagtgaaatcctagctttagaggaaatagatcccaaatagcttaagcttggagagcgtaccatctcattcatagaaggagatgcttgttggaatttattttaccaggatcttagatctactcacaagtatgttgattaa

SEQ ID NO: 335536 - DNA, 774 bp, Cannabis indica
ccaagagaaaaaaactattgaagaggttaaggtgtctagtagattaggcatgcttatatgttacactctagcttttctagccaccttggctttttaccttttttttcccaaaagagctacagcttgagaatgctcttgctcaatttggctctggctcttcatttcttcaagaggatttttgagtaaccatatttttatttatttaatcttttactccaaaaaacatagaaaagtatggaaaatgcacaaaagggtgtgtgttgaattaaagcattctcaattttgaaatgtacgaagccattttttttattgtaacaagattggtcattctgttttttgggggaaattattacatagataggaataggatgaatgtcacctgtgataatgttcatgtacttatcaaggattgtcttttctgtatttatttttgctaaattatatttggcatataattcccaatgattttggaattttttgtttgatttcaggaagcattgttgaatttagtaggagacagtgaacttttcaagaccaggaattcatttcattttatttttatcacgcattcatgtagattgatctataaacttgtttatagaagaatttgaatatcttacatattcatccatagtgaagtaaattctgagaaaatttgtgtgctacgctgatataaggatgagaacttgtgtattgttttattgattatagttaaaagggttatttgcggtaaaacccctaaagtagagaggtttttgcaactaacccccaatt

SEQ ID NO: 335537 - DNA, 525 bp, Cannabis indica
ggggctcctacccctcctgcatcaggttttagcaggggaggtagtggttcggccatggaccagaagaggagaacatccactgcatccggtggctcgagtcagaacaagaggttccgagggaaccagagtagaggtagccgtcagggtggtgcagagacccggttttcttatcctgagtgccccagttgcaaaaggcaccatcagggtgagtgcagaggtcagggatgctttcagtgtggcatgcccggacactacaagagggattgtccccagctcagatcagaggcacctagggctccggcgagacccactccagctcgagtgttcgccatcacgcaggctgatgcagatgccagcccctcagttgtaacaggtcagctctcggttaataactcatttactcagtgctgtttgattctggggccacacattcctatgtggcagccagaatctttagtaagttgggtagaccgtatgatagttatgaatcagggtttggaaccctattacctggcggagagttag

SEQ ID NO: 335538 - DNA, 716 bp, Cannabis indica
tcagggtaactcagttggatccaatggtggtcaggcagttcagatccccctaaatgtttgtggtcgaggcagaggcagaggtcctggaggcagggcacgcggtcggggtgatgttaacccgccacaggctgcccaagatttggaaaatatgtttgcagaaatgcaagccagaattaatgagcaagatgaagaaatcagacgctctagaaatgcaggtagctcctgcaatccctgctccagaaatgcaggtagctcttggccttgctgtgcaggcaggaccagtcgttgcagtgaatcgaatggaaccattgtatgaaaggttctgcaagcaggcacctccagtctttctgggaggtcccgatgtgatgaaggtcgaatagtggctaacgggtattattagaattttgaattttatgggcttcaccggcaatgatagagtggcctgtgccacattccagttttaagaagacgccctagtatggtgggacatggtgtccctaacttgtgatgttaccacgatgacctgggaaaagttccaagaattgttcttcaatgtgaaatactataatgaaagcagtaagaagtgcaaaaagaaaggaatttactcagctgactcagaaagaaaatatgagtgttacttaaatacacaaacacagtttgaattgattggcaaagattgttgggttttgtgcccttaataaaactcaatttcaata

SEQ ID NO: 335539 - DNA, 607 bp, Cannabis indica
tgatgaattaaacaaagtgcgagattttattctgaaattattaatgttcagtacaaatagatcataatttcctcttcccgacttttacaccattcttaaagttcttcatgaacttcctacttcttttagctttaccaagacaacctaaaaacttatagtaaaatatggagtgttagtaaccttatttctcagtatatagtttagaaaagcaagctgtaaaaagagaagaatacatcttctcactatgtttctcaactcaagctcaacaaaggataaagaaaatattaaaagaagcaaccacaaccaggggctaagggatctcagaaagtcaagtgagagggagtcattgcttacagtgggcacttatattggagttgacgttatttatgttggcacattaatttttgaattacaatttagtgttcaaatttttttgaacaatactttcttgatacctacttttaaagtaattcagtttcgcttccgcttttagttcaataatgattttcttttcgtcttgccaattatagtgttgacattatgtttgactccgaataattggaaactatttttactctgatatttttttttcaaattatcattgact

SEQ ID NO: 335540 - DNA, 588 bp, Cannabis indica
atttaaaatatgttaaatatcaaaatatctgattttataattaaataatatataaatattaaagaaattaataaatttttaaatttgaccataatttaaaaaataaaataatccatttttaaacttaaacctcaaaatatcataaaataataatattctattaaaaataaatattattaatttaaaaaatgatatttaagtttaaatatattaaaaataatattttattttaattttagggtttgaaaattggaaaaatccgaaattgggaaaaaatcccacaaaattcaaaaattgggtgcgtcttgcagctaggctacaagtgccgccccaggaggctgcaaaactggccttacgcgcgcggaagtgagggtgacgctgagaaaactcggcgctagcagcatctggttgggcgggattgcagggtcacatgggcatgtgtagcgtgcatgaccgaggcttcagacaatacctgtttgaaggacgcgcgcggatggggttccttgtccgagtgcctagtgcactcgatgcacccactcaacaaccatgcatccagaatttccaaaattcataacttcctcaattttt

SEQ ID NO: 335541 - DNA, 1063 bp, Cannabis indica
gaagagcatgagttgcatctcagagtagttttgcaatggttacgagataataaactctatgctaaatttaaaaagtgtgaattttggttatcctgtgtctcgtttctggggcacatagttgataaatatgggatcaaggtggatccggcaaaaattgaagctgttcgggattggccaacaccaaaatcagctatggaggtcagaagtgttttgggtttagcggggtattatcgtcgaatctttgaggatttttcaaagattgttgtacccttaatggagctgactcgaaagaacttgaagtttgtttggactgatcggtgtgagaaaagttttttggagttaaagcagcgcttgattactactccagtactaactcttccttcagataagggaaaatttgtggtttattctgatgcctcgagacagggtctcggttgtgtgcttatgcaggctggaaaggtaatagcctatgcttctcggcagttaaaggagtacgagcaaaggtaccctactcacgatctagaactcgcagcagtggtatttgcgctaaagatttggcagcatacctatatggtgagaaatgtgagatatacactgatcacaagagtctaaaatacttctttacccaaaaggacttgaatatgagacagaggcgttggctagagttggtgaaggattatgactgtgagatcctttatcaccctggtatggacaacgtagttgctgatgccttaagtagaaaagattagagtcagttgagcactatgaagcaaatctcccaatagctagcaaatgagatgacctaagccaagatttagttggttgtagggcagttggctaatattactctgcaatccactcttctagagcgaatcaaggaagtacaaatgcaagattcggaattggtgaaaacccaagctagggttttggctgggaaggctagtaatttctcagcggatgaaacgggaacgttaagattcgggaatcgtgtttatgtgcccatagatgagagtatcaagaaagagattacgaatgagtcccatacgactctttattcagttca

SEQ ID NO: 335542 - DNA, 606 bp, Cannabis indica
ttcctgcattgaaccggaattcttgttctgagggacctgtaggaactggaattctagttggtccccaggaaaccccacataacaggaattctagttaggaaccggtctaccggttggggcagttttgggaaacctagtttttcccatctttgagatatttagggcatttccatgttattcatcgatagggaaacttttagtttcaagttttaagtccccgaaaagtgatttggcgcgtcacttacctatgttatgattgttgtgacgtaggagcctataattcgtcgagcagttgttccactcaggttcaccggcacacctaaattcggaatcaaggtaagattagtataatgttattcatatatttatacatgtttagcgtacatgttagttgccgtcagactaggcaaatctatagtaatcagattagcatgtcagggcatcggtgaggtgtacatagagttgcaccgagatgccaacagacatatgctaggctatgagatagtatgagttatctgctacgtaattggtacgactagagtactgagtatagggtggattcccagttagtcatactttgtcgagaacgttcctgattcagttagg

SEQ ID NO: 335543 - DNA, 1109 bp, Cannabis indica
aacaggcaccataacaaccaaatcaaactacttaaaagactaaagacaaaaagaaaacaatagataagtattacatccaaacaagagataatcggaaattgttgtgctccaaataaaaatatatcaaatcaataagattacaactctatgacaaacaaaagacaaaatatgtattaaataatgttataacactaaataaaatatacacataaagtagaaaatagagatgaagagagggattacaactcaaaacaataagctacacatgaaacacaatatataaatagcatatataatatatatgagatgtgagagcaatctcaacaccatctacaccacaagtgtataataggggaatcaccaaacttgaacaaggtcttacaccagggccgaccctgaaatttagtgggccatagaaaaaaatttatttttggcccttatttagaaaaaaatgtagcatttttcaaaatcagaaaaaaaaaatggtataattttcaaagcgaattttttttgggcccctcggctaggtgggccctaggcacaggcctagcctgcctatgcccaggaccgggcctgagtataaggttgagagagaaaccttttttcataatctctgagagtttgtgaagattcttataatcttgtaaacattgatatcaatgaagatatgactgctcctgttctgattgagatttagtgcattgcacatggctcgaactcgttaaacatggtgttattcttttttgtgttactgcttaattcattacttgaattttgagatctcttattttattatttttttattgtgttgcatgtttgttggtccggtatattgaatcgtaagtcattgattgtttccgtttcacacaacaataatattatattgattttgaaaagttcaaaaacctaataaaaatattaaattaataaaaaatattaagtttacttaaaaaatctaaattattcctaaaaaaataacatttttaaattttatttataacacatattctaaaaaatcaaactaaaattattaaaaatctaataaataatttaaaaaattaagattttgtgatgagaaaaccaagccgatttctagcacatacaaaaaa

SEQ ID NO: 335544 - DNA, 509 bp, Cannabis indica
catatttgtaaataataataagttttgccagaaaagtccccggcgctggaaaaatcgttgtaaaagtcatcggtgccgaaaaagtcaccgttgttagaaaagttaccgaaaaagtcaccgtcgcctgaaaaagttactgaaaaagtcaccagaatctcaaatataaacaaaaatagaactgttataattgaaatataaccggttttgtaacacaaagaataaaaataaataaaacaaaataactcaaactaattataattaaattagaatcggttctataacataatgaatggaaataaattacagaaaataactcaaaccggttataattgaaatataaccagttttgtaacataaagaataaaaaaaataaaacaaaataactcaaactaattataattaaattagaaccggttttataacaatgttataatgaataaaaaaaataacacgaaataactcaaaccggttataactaaaatatagccggttatatagacataatgaat

SEQ ID NO: 335545 - DNA, 542 bp, Cannabis indica
ttgtggtgatacaagatcacaacagtactattactatacataatataaatatgtatatatatataatatattaaaatctagttccaatatatgaatgcatgcataacaaaaaattgctacaagagagtaaaataattataatataaaaaaaagacaggatatatagttagaccataaaatcacaaatgatttgcagagttaagagaggtaaatatttaatgtgttctaactcggtcgcacctgtcggccaagttatttcttctttttctttttatctttctaatatattattttaggaaagcgacctttttcaaattaaaaagaaggcttatatataatgtaaaataaccaattaatttgtttatcccgtgattcataaggaaaataccaggtaagttgtgtaaacccacactgcctggagaaggtcaagtagaatgattcttagactatgtaggtatgagactacacagttgaagaaagcttaaatagattaattaatactctctataccaacaaggtgtatcttgtttttcggtagccca

SEQ ID NO: 335546 - DNA, 657 bp, Cannabis indica
ataaaagaataaagtcaagaattacctagaactcaagaacacctaatccttgaagaatcttgcttgaaatgcagaaaatcacacccaaaccctagctgctctaagggggccgtaaaagagagagtgagtttgagagagaaatgcttttctcttgaattttccaagttcctattttttttttaaaaaaaaattaaaatgaaatgaatagatgatgctttactaatatattactaacatcatataattccgaaaatcaaattattaaataaaaccaagtccaccaatggacaaaatataaatggggcaaaatgactattttgcccctcccacactaacacaacctaaaaggatactaaggggtattttgggaaattttaaaatctcgaccaatcctgacattcttaatgtctaaactattgtcccgatatactaaaaatactaagatgtgattacaatagccatataccgcgttccaaaaattatgaaatttctatatgtgacacaaaaatgcattctgaattcaaataaatcatcataaataattaattcaatattaataattaatttccataataaagccctaattatctgctaatttccaaattaaagctaagcggtctttacaaagaaagtcctcgactttgttgtcaagaacat

SEQ ID NO: 335547 - DNA, 710 bp, Cannabis indica
agtatactgtttttattttttagcttttttttgtttgttttagagtgttgtgttacggttgttttccataatttatttttttaacgttaattttactgttcttgctccattttgttgaaattaataattgtttttttgggtgttctcgtggtgctgtgatggatctatccatagatgtggaagataaggctataaaatacatttattcttccttctatatggttattttgtggattttttttagttttcctaaaaatacatttgacgagctcactagaaaaaaagttttgaggtgtgtggttcttttatgtttttctaagtgcttatatttgcttattttttacatttatttttgtgttgttttagtagtttttttgttctgattttttcagattggacttgccaatataactgctattgatttggtattgaggttgtgcagaatattttttagttttcttaatcatattttccttttttttgtttgatttgtttaagtgttgttttgcagttgttttgccatgattatttatttgacgtcgatttcattatttttttttaatctcaccgtaattaatggtttttttttcaattattctagtgttcttgtggtgattatgtccgtgggtgtggaagatggtgttggattaaaaatcctttgtgggcacatatgtataatgtatatgctattataaagtgtgatacaaaat

SEQ ID NO: 335548 - DNA, 639 bp, Cannabis indica
attgtactgcatagtacgttgtatgtaatacaatagtattgttatcgattgattaatattgagatatagttaatattgttatataatgaaaagactaattggttgagtaatgataatgtaataatattatgcatgtgatatatgggttcacctgattaggtgatgcgattttccaggcgacgtactggacgtaagtacgggcatcagtgatatttgatgagtaccgagtgtaggtacaggcttacctgattaggtgatgcgatttttcctggcaacgtactgggtgtaagtacgggcctcagtgatctatgataaataccaagtgtaggtacgagcttgtctaattagacgatgcgatatattggtgccagattgtggcacgggctcacttaattaggtgatgcaattatatgatatatgggtgcaggtttttggcacatgctcacctgattaggtgatgcagttaggcgacaaatgggtgacaggctatgacacgaccttgcctgattaggcgatccaatacaagattatcaaattaaagcatcgacttgcctgattaggcaacgtgatgttatgaagatggttgccttatgaggtaaaggtaaagaaaagcttgatcaaccatgaggtgacagtctt

SEQ ID NO: 335549 - DNA, 665 bp, Cannabis indica
tggaaatcgtgattaattaaaatttagctttttaattaaaacttatatattactttaaaaatatttcgggatcccgattacaaaatactttacgaaagtttactaatcctttacaaaatatatgtcgcccagcgattgactacaaaagcgctgctgtccggaggatcgtacgctccaggcctaactgtcccgacatgtacaatcttcatcggctcgtcctcacggttcctcagctttggccttgcccttacctacacataaacatagcactgtgagtcgacagactcagtaagaaaagcataaataataaacatacataaatcccgggttatgatcagacgcccatacccctgatctcaaccctaaaccccgtgtcccacacggtactgagtctcgaacgttggtacgacagtagttttaacagagtaacaacctatactcggtacactggtcatactccagctgctagtcataatctagccttaccgatgtgttacagtatcaagctatactcagtacactggtcatacttcagctggtagtcatactccagccttaccgatgtgatacagtcaaaccgtacagtaccatcgaccatatatcagcctatactcggtacacaggtcatactgcagctgctagtcatactctagccttaccgatgt

SEQ ID NO: 335550 - DNA, 1330 bp, Cannabis indica
taactctcagattggtagcttcatattgccatgctttcttgatcggcataacatcgagatctacttccttctcacatttgcctacttgatcgactgtgtcctcaagacctcaagtgtctcgagctcgaacttccttcgtcttgtactagccttcttcttcggaagaggatagatacacgtcctctatttaggtacgtgtatacaccttccctctctaatcaagaaggacgctgagggtgtctcggtggcagcccacttatcctaggttaagtcctagggtttctcttgttatcacgagatatttcttgttccctaggtcggggctgtctcgtgtcctcattcctacgagaagcctctggtacatcattacgttcattcccttagttcataaatccttgggatctttgaagaacgtctcgatgttgctcttgattattttgttgttcatcaactggaacatccctagtacccccaggttgttcctcctgagtgttttggggatttccttgatttacttcctatcttctggttcttgaacctcgaggtctgcctcgtggtctcctcaccccaagatcaggttgattctgagtattagttccatgagtcgccctaatcgttgtagcctctctttccaactcagcgtttcgttggttagattcagctaagcattgttggagttgtctattttctaattccactaatggtacatacctagtttgatcatatgcatcctcacttttaggtatatatcctgtagaattattggtttattcattccttctttctgggttttgatttttaccaccatagtttctccttaaacgtgacgtttcagtagtataggctctttgagaacccattggctctttcccaggataatgtgtagttttctcaggacgatttccatcgttttgattattcttagccatggatggatttatatttttaaggagaaatttttctgggttttatcactaaggctctcaatgaaagcattaaactgttaatgcaaatttttgttaacaaaaattaatgagcctttacgtaataaatatatcacagaaataataaatgattaaataactccagatatttttacgtggttttgcatttaaatatgcatactccacgagtctatcttatttatgatattttctgaatacaagatccaatacttaattgttaatctttctctctcaaaattattcgtcccttgttctgtggaacatacccctatttataggaatataggttgggagttattttcttgggatctgtaaagtcctttttggcaagttagttgacaaaataatttttccatttatggtaa

SEQ ID NO: 335551 - DNA, 817 bp, Cannabis indica
tcttttagggaaagacccaaaaaatagcttgctatttttactgaaatggcctgccatttttcaggcagttttttcatttagttgattttcttgtatttccatgatatttaggactttgtcatgctatttatcgatagggaaacttctagtttcaagtttagattcccgaaattgttttagaaagttgtttacctattttacgtgattgtgactagggcctttgttcagtgtgagattttctattcaggtcgatcgacacacttgaatttaaaaacgaggtaagattagcatagaatatatatatgtgtatatttgtatgtatgttatatacatgctgttatatgattcatatgttaccaatactagtacggtagcggtactaagtgcatgtggaacaacacatgatgtttaagagtgtaatctggtgttaccaacactagtgcatgtggtataatacttagttgtactcagggtacggttcaaatcctaccaacactagtacaatagcaatatatagtgcatgtggtacagaggtcgtacctttgttaagaatgttcttaatcatttgtgaagccttgtagataggtgtatgggcacctaaatacaagtcggtaatatattgtatgttatatgcttttcttactgagtttatcgactcacagttattgcttgaatgtgtaggtaaaggaaatgttaaggctgagcagcaatgagtccagagcttagagatggttgtacatgtccagacagaacgacttgaagagttcagtctcaagacaactcaagtttccttttgtagtcgatgtgcgacatgttt

SEQ ID NO: 335552 - DNA, 511 bp, Cannabis indica
ttcataaaatattaacaaaaattaaaccgatagttcgtaaaattaaaataaatattctaaaagaagtttgtagtagcatcgtcctcatcactagcatctccaggaacatccgacccaggaacatccggcatctgtgggtagtatggcggcatttgcgaacttgtcatcatctgagatgtctgctgcccatgtagtgtcgacatcatttgagatgtctgctgcccttgttgtgtcggcaacatctgagatgtctgctgcccttgttgtgtcggcatcatctgagaagtctgttgtcctagatgtgtcggcatcatttgagatgtctgctcccatggttgtgtcggcatcgtctgcgatgtgttctgatattgctgcccttgtgtcgacatcatctgaacattttgcggcatctgtgacatttgtggcatccgaggctctgacacatgagacgtctgaggcgactgcatcatcatattcaacaatacttgcgaattgtttggcgactgaaaca

SEQ ID NO: 335553 - DNA, 371 bp, Cannabis indica
ttaagccatttaataataatatttacaataaaactttatttttgttttacaaaaatgagacttctttttacacaaattagaattctcttcttgtataataattttttaataattaattatttttaaatgatatgaaattatttttttaataactagaagaactaagtataagtttttctatttgagtttgaggttacttcgtaaagtgggggagcttgattttgttttttttgactctagtttggttttctgagtaaatatctccttataaaaaaaaaagataattagcaatttttcccactgaactttcgacaatattaattttggcccttaaaatatacggcttgttaagaatcccccttgaactttta

SEQ ID NO: 335554 - DNA, 772 bp, Cannabis indica
agaattcacacttttgaatttagcataaaacttatggtctcgtaatcgtcgcaaaactgatctgagatgcaactcatgttctttatctgattcagattacaccaagatgtcattgataaacacgatcacacatctattcaggtaatcctggaacgtccgattcatataatccatatcaaatatactatgtattcttggcccatcattcaccctgatggtgattcttgcatttcggacattcaagatatgaattgaaagaggatccgtgaccttgacggccacctcaatttccccgatgctttctatttattacctcctgatactccgaaagcctcagccttgcgtttgtgatcagggttgccactgttggtccccttactgacgttaccactagcaggcggatttgatgccgtgacggcatcctttgcggtcttctcttttactacatattgctcagcctcctcagcaatcaaggctagctctatcactttcttgtacaaagtgtcatgtgaagtgataaccttcaagtcccgactgattgtggcattcagtcccctcttcatccactgctcagcctttaatatgtcaatacctcccagaaaattcagaggttgcagcttaacgaactgctcaaacactgagtctctatgcggcataacaaacccctagttacccaccactggcacaagtgcgagaggtaacacttgatctacaagggcagtcggtgccgattgccttaatcgtcgcaactcttcttcttgacaaagtatga

SEQ ID NO: 335555 - DNA, 696 bp, Cannabis indica
aaatattattgtgggattcgtatatgattgtaattaactgccacactatgtcactataaatagggggagaatgtgctgaaaaatggacgaaaaatccttgagaaaaagtcccctagttggtatcagaataatctgaataagattgacttgtggactatgcagagttaactgcaaaccacgtaaaaacttgatgttgttcttactttattattttttctttgttttcaactaatttctatgttgatcctatcacgaaataggcttattattgttaacaaaaatctacgttaacacaagtaaattctttaacttattaattcctccctctactacaaaaacaccctttagaggcactttttaagtactttcaacaacgattttggtgaaatttactactgacggtgattaaggtaatgctgtagggtctaaaataagtgacgccatagcgttacatattgcgtcagttatttgctaggaaccgacgccatagtggtacatatgacgtcagttcctagaaaacaactgatgccatatacacccataacaaccgacggcaaatatctaatgatttttttcagtttatttaattttatttcatttatttaaattatatatttattgatttatatattatattatttaatttaaatttaaattagatatttactttttaaaaggtaaattaaatattattta

SEQ ID NO: 335556 - DNA, 648 bp, Cannabis indica
cttttctctggagctttctagcaagtatgaagtgcttctcttcttcttcgttgagtttggtccctctaatgggggatttcgtccaccctacactatttagtggtggtttgtcctactctcttcattacaactatccacatttgcttaatcctcccttctatcagtgcattaaatgttatagggattattattactccatttcacatctaataaatcttacccagagctttaattgctccaaaccctttctctcttcacctctcagtcgttttcttcatcatttccttttgtcctctcctcatttactaccgattttccaaatcttcctcagaaagcctctcttggttattgtaaattggaggcggacggctggcttcccgaaacccttcagctcttcttcatcattgtggcctccatggatgagagagtagggatgtgactagggcggttccaaggagagttcttcgtggcttctggttttttgtatatatatatccaggctcaggtattgtttttttcatccctttcctccgttaatttccctctttgctgatatctatgaagttctttatgaaaatggatgaatttctcaactctgtctctaatgctttagctcttccctctaatgaatcaactatttttacctat

SEQ ID NO: 335557 - DNA, 757 bp, Cannabis indica
cattggcttggctgcttcaaaaaaacaaacaaactaagtgtctgaatgatcatgagaaggtatgcacacgaaaacaaagcagtaaagctagtcctaccctgtctgtctaacccagccctagcaaagtctgcactacaatactgggttcatcatccccaagaaagctgtccgaggggagaaaccagctagaagacagataagctgaatgatctaggggaataggtgcaagaggtccggaccccatccgcgaccggcctagaaaatgacctaagttagaaaaataaaagcccttggcatgatcaccccaccgggtaggaggcattctaaatctaagaagatgctcgtcaaatcctataggcctacaccgggaatactcttgggtagaaggaacgtgatagaccgttaagggagacttaccatattcagatgtgctggcatcaagagcccctgtattgggaaccggacagcaacctaggctgggaaggcgtccgttctttacccgcctccagtcgaagggtcctcctggcagtggcctgagccttgatataggctaactcttgttctctcctgaagagatacttctgataccggtcctccgccgaggatataatgtctgcccggagcaccttttcagcgtccggggtacaatgtttgggcagaggaccttggagaggttgaagttgtccactaattgactcccagagatgagcttggccttccgacaattctccattgtgaccaagtcccccacgttaag

SEQ ID NO: 335558 - DNA, 565 bp, Cannabis indica
gcatgaaaaaaatgaaaaaaaatggatttggtgcgcatgatatgcattgcataccatccgcacgcgcaccagggaggatttgtgtaaagaccgcttagcttaaatttggagattagcagataattagggtttaatgataaaaattatttattaattctaaattattaatttattaagatttatttaaattcagaatgcattttatatgtcatatatagaaatttcataattttacattttcagtgaccggtaacattggaacgcggtgtttggctataagaatcacttcttagtatttttactatagcgggacattagtttagacattgggaatgtcaggaattgtcgagattttagaattttccaaaattggcactctgacgtggcatcacgagaatggtgacacgtggactctatttagagcatctgatcggatcaacatgccgagcaggatgcctcgctggcatgtccataatggaatactcaactagccatgcagaatgagcaacacttaacgaattcaactaaacgcatcgtgagtcaccagctcaatccctataactca

SEQ ID NO: 335559 - DNA, 848 bp, Cannabis indica
tgtgggcatgacactctttcacaaaggatttgaatatggtgaagaacaatgaaggaggtgaaatcaccatggaaggaactctctcatctactagttgtctaacatagaaaattagatttgatttggttgaaggcatcaagtggatgagtgagagcatcatgttccttttatagtgtttcaactagggcttaaggctgaattatatggattaaaaaagaataaaatattgggcaaaaatcacttaatggccatacatgaaaacttccaatctatagttacaatttcgccactttttttaaccacttattctttttttcaataataccatattttccaattcaattctataaatgctaaaaaaatttatttaataattataattaattatcaaataaaattaccatttatattatttattaattagaccatacaaagtctcttaattaataaattgaccccaaaatctcttttcttcacaattaagcccttgcttagtgaaaatccttaaataagacatagtctaattttagaattataattgattaattaaatcaattaactgagtctgcaagcagtgttatctcaactaatgaggcgaccatgggcctatataaccgagctttccataagtagatctcaccaagtaaattctctaattattaattccgccttgcgccactataaatttggaattgaatagcactcttaattatctagaacgctctatatgtactacaatatagatacgttatgattatctattgttacaatcctaatagtcaaagatcctttatagatgatctacactgaatagggacaaatttactgctctacccttcaatgtattt

SEQ ID NO: 335560 - DNA, 945 bp, Cannabis indica
gaaaaaacgaaaaaaaatgcaagtggtacggacagtatgcattgcatactctcctcgcgcgctcacagtggtgatctgccgagaaaacttggcacaaggctcccttgcatgatttgcgcgcgcggataggggtttaagacacccctaggcgtgtcgctcggacaatgacatgtccgaacacgcacctgaccgagggacactcggttccgcgcgtgtgggcttgagtgatccacctatctttttccaaatcttcaaaaaatcataactaattcaaataaaattcgaaattgagttctgtaaaaaaagaaattgcttaattttttccaaactatccaataaacataatttgagtaacaaaaattcaattatttttcacaaaaattccccaacatcaattaatcatcatataacacatagattaacatgaaaccatccaaatctcaaacaaatcgttttaattccaaatttcttgcaagcaaatcaattaccatggctctgaggccagttgttggaatttattttactaggatcttagatctactcactagtatgttatttaacatcctaaatatgaactttccaaaacgataataaacacatataaagttaagaaaaccttacattggtggtagcagaataatatgtctccttccactcagatctctaacccttgtatcctttctgtcgcagagtattatcaagatctgagtccgaatgtccttctctttgatttggattcttcacgatcttccaaactatgattgaggtaccacttgctgtgtgtgggcactactctatcactagggtatttcgaaattggaagaggaaaagagagagagaggggttcggctatagagagaaaatgaatggctctgttttctgaaaggcagtttcctaaattactgaataactgcttattttggtgtgagccatcaatttctattt

SEQ ID NO: 335561 - DNA, 946 bp, Cannabis indica
attttgcactttttattctagctagatctacatataattggattattcattttttttggataatttgtatatgatagagtcgtcaaagttattatttttcatgtaagatggtaagatatagtgtaaataattaatttaatatataaaatctacttatgatatattgtgcaactgaaaaattttgctacctctttcttatgactgagttggagattctacaaaatataaggtctatatgactacatcaatatcatagtaaataaaatttgtacaaccataaggtctatataattgcaaaaatatcacaatatatgaaatttgagaaattctattagtaagaaattaatacaacaccagtgagatcaagccctccttgtttctcaaaagcctcaccaaatatcgcttcactgcttttacctggtatatattgcttgaagtcccctacttttctattcgacccaatcaaaggaaccgaactgaagttgatttgagtccaaaattgcacaacccgaatctgcaaattataataaaccaaagcacaaaacagaggcgtacctgggagaaaacggagaccggaaccagagccctcacctatggcagacgatgacgacgatgagggctttggggacttcaaattcgctccaatgactcctattcataccgcctcctctatttccaccaatctgaagaccaactcctccactgatttattcaccaacgatgattggggcgacttcgtaaccacccattttaatcagatcaatggtggatttgagttctccaatggaacaggtgttcattcgtcttttagtccttctcgaaaccaaaaccccttgtacctgtttgggaattcagtggatggtaataaatctatgatgtctcgggtttaatcggtgcctgtaacggccaacaaaaaaaattagagggtatatgattctgttatata

SEQ ID NO: 335562 - DNA, 493 bp, Cannabis indica
ttaatttaaataaatttaatttaggttttaaaaaaatgaatacttaatttaaatttaaattaaataatatttaatataaattaataaatatataatttaaatgaattaaatttcttgatttataataagtttttaactgaaaaaaataattattattgatttggcatcaatttttaggcctataacgtcggttatatgtgcatatagcatcagttatttgtatataaccgacgccatagtgtacatatggcgtctgttcttaataactgacgccatagggtaacatttagcatctgttgttttcaaccctacatgctacctgaatcagcgtcggtagcgaatttcgttaaaaccaacattgaaagaccttaaaaattgcctctagagctcaaatttgtagtagcggctgtaaatctttgtaacccgagtgagtatcagaccagatttgtttgaataaaaattgtgatagtataaggtagagtctaaactagag

SEQ ID NO: 335563 - DNA, 715 bp, Cannabis indica
aaacctaactcctctgttaaccccttaagccatataacctctttgatggcttttgtagcaaccatgtactcaacttctgttgatgacaaggctactactttctgtaggttagatttccaactgatacagtccccaagagcagtgaacacaaaccatgttaggctcattctagtgtctaggtttgctacaaaatctgagttcacgaaaccagtgatttcttccttgaaccagttctctttactgaacataattccagtgttcagagtacctttcaagtacctcattgtccattttagtgcttctccatgtttagggtcagggtttaaaatgtacttattgaccacactcatagcatgagctaagtcggttcttgaacacaccatggagtacatgagactcccaacacaacttgcctagggaattttgctcatcttggctctttatgcatctgtttttggtaactgagatgcagacaactcgaagtcttgagcaagtggtcttgcaactggtctgaacttgaccatgccaaacttattcaataatttctgtaggtaggcagcttgagaaagtattatcatgccaggttttggtgtaaagcccgcttagttaatttggaaattatcagttgtttatgtttaattatgaaattatttatagatgtttaaataatttattactgttatttacggaattcagaaatgcatgattatgtcat

SEQ ID NO: 335564 - DNA, 553 bp, Cannabis indica
agatcgtctccacagggattgcaagcaaaaatatgttgtgaaaccaactaattacaacttacagtaaaaaaataacatgaaaatgagtgaggaaagattcaaaattaaaataacagtaattaaacttgctaaaattaatgctattgttgctagaaaaatgctttcaaaaaggaaagaaactacaatatggtaaaagtggcttgaatagctaattactcctatactggttttttcccagttactacaacattactttagcattcctgccagagataacaaagtttcctatgtgtttgtgagaattttccaaaactcgcaatttaagttctaacacctagtttcatatattcctttatcaaaccagattagagaacactaattatgcatcaatttttaagtcatgcaaggtagatgaattattcctattccacttacaaagaaaaacctaaatctaggttttcacttgctccattcaagttgaactactaaatctagcccttccggaacaagatctagcttagcaaataattattcatggccaagaaacaacaat

SEQ ID NO: 335565 - DNA, 527 bp, Cannabis indica
ttacgttccaaagcttgattgcagtttactttttgtaagcaaattgagtagtgatcttaattgtgaagttaagtttattgctaagttttgtgtttttcaggatgtggaatcggggaagatgattggctatgttgagttcagtaagggcttgtatctgctaaaaatcgacaaccccatgtttaaccatggaaatcgttgttgtttctcccaaggtcaatctctttcctcagtaaatcagtccaataaaatcagtactatcatgttatgacattactgtctaggtcatccaaattttgtatatcttaaacacttattcccatccctatttgtcaatataaatcctcagtctctcaggtgtgatatttgtcaattctctaagcattctcgtcactctttcattccaagacctcatcaagacatcaaccctctcatccattctcacttattcacggggatatatgaggaccatccaaatttaaaatatcagtggggcacgttagtttttattactagttgatgatcacagc

SEQ ID NO: 335566 - DNA, 449 bp, Cannabis indica
ctaggacatatatttattcttgattatagtgttgtcaacacagtggaatataatcatggattatatgtttaaaagtttaagtcccatgatttgtcagtacacttgatttagactgacatgataatcagcgataaggtatactcaccttgaataagtgttatctcctttctagggcattggcaaagtatgctagtatcagatgtatggagaatacattggattggacaaatattgaacttggttaggatatcataaacttactgttatatttttctaagtcaatatcaccggtttatcttaggtctatagatcataatcttgagatggttaggttcaatctcaattgtattatttacgttcttagagtggttcgttaaagctcatacaactgaacacatacatcttgggaacatgatagtataattaaatgggagcgttaatcatagata

SEQ ID NO: 335567 - DNA, 1206 bp, Cannabis indica
tccgtcagcatcgactggctgcccagcctcgttgtactccccgaagttgtggggttccacctcttctctcactctgcctcggaaggactgcccggacgcgcatcgtccaactcctcaacctcctggacctcagcgtccccctcacaatcctcctccattgggaaggccgaatcctattcggtgctgggcagagtggcgagccaggccacttgaggatcagaagcgtcaaccagacgcatgattttctttgtacgagccgtcatcctatggctgggtacaaggtcagaagaatgtccttcgctagaaggaggactagaacaaagacgaggatgatcctcgtgtagaagttgaagcaaatcctagtcgatctgatgcccgagttcccaagactcacctgagttcatctacaaaagacaacacacaagatgagtaggccacgttcgtccaactcattcaattgtagcagtcttttctctcctgcagctttcaagtccacgttgagggtcttcatagcccaatatgccttatgctctaattctaccggtagatggcaagcttttccaaacaccaactgatacggtgacatcacgatcggtgttttaaacgctgttctataagcccacagtgcatcatctagctttcgtgaccagtctttccttgatctatgcactgttatctccaatatcatctttatttcctagttagaaatttcaacttggccattgctctgtggatggtaggatagagcagttctatggcgaacgccatatcttgagaggagtgcttaaaactatttattacagaagtaactcccttcatcgcttatgattgctcggggagtaccaaaccgagtaaatatattcttttgaagggaggtaagaactttttaccgtcattggttggagttcctgcagcttcaacccatttcgagacataatccacatcaaataagatgtacaaattgctaaaagacgaaggaaaaggaccaataaaatctatcccccacacatcgaacaattccacttccaagattcccgtaaaaggcatttcgtttctccttgagatatttcctgttcgctcacaacgatcacatgactttacaaagccactagcatccttgaaaagagtaggccaaaagaatccgctttgcaacactttagcagcagttcttgtgccactgaaatgtcccccgcatggtaaagcatg

SEQ ID NO: 335568 - DNA, 572 bp, Cannabis indica
gtctgggtcaggatctcggtccagatctaggtccagcatttcgatcccagtctgggtcttggtccgagtccaggttcttatccggatccctatctaggtccatgtctgtgtttgagatcaagtcccagatttaggtccaggtccgcgtctcaattccggtctaggtacgatcgtgtccgggcccgtgttcttgtctcagtttgggtctgaggccaggtctgtgttcggttctatgtctgggttccagtcctggtaacggtcctagtcttgttcaagtgtcctagtgcggcgattcttattcaggttccaatttaggctcctaggtctaggtttgggtttggttcttcgtctgggttctagtcctagtctgagtcccagatttcgacacagactactggtctgttccaggccatgttacccgaatcccgagtcaagatctggatcactgtcacggggtctcgatctagttctcgttcaggtcccatatcaaatttctgagtttgggtccgggataaggaatggggtgcggttctaggtcccgaccctagttctgtgtccctagtctggttcca

SEQ ID NO: 335569 - DNA, 391 bp, Cannabis indica
cgcgtgagccttgttcacgcaccctacaatccgcccgtgtgaccctacattccgacgagcctgatcctgccagcgccgaggtttctcggcgcctcttcctgctccgcgcgcgtattggatgatttgcagcctctggaggctgcacgtgcagcctcctgggcagccaccttcccaacccgattttgtggaaatttttttcccaaaattagatttttttccaatttaaaatatttccaattatggtcagatttaaaaatttgttaatttctttaatatttatatattatttaattataagattagatattttgatatttaatatattttaaattaaaagataactttatctttttatttgaaatatgatattaaaattatcttatatgacaaa

SEQ ID NO: 335570 - DNA, 520 bp, Cannabis indica
aaataagaacgacttacgtgttttaacataataaaaacttttacggtgccaaatcatcccaaattcttggaatttagtcgtatttaataataggattaaacttgttcaatcattgcattaattacttttgtccatttcttcagcctagtatattgacaaaattaaccattgcaattaattcttctttaatttctttccataaaattcacgatttatttaattataatatatagtatagtacatatatacgtgtgcatattgtaataatatatacattccattaatccaagcttataactaacaatacagaatatcaaagaattagtatatattcattaaaaagccattaattaatttcctatataaagttagcttaatgataattaatttttaatttataaattacatacagtaaaacctctatctaagaatactctattcaagaataacctctaatttgttataaaaaaatcaagtcccaatttgggccaattataaataagaataacctctaaattgt

SEQ ID NO: 335571 - DNA, 875 bp, Cannabis indica
tcacagatctgatattctaaaacctaaatctatccctaaatctaacaaaatctatctttaacactaaaatcacaaacaaaatcaataaaaaaaataaaaacggtggtgatgctttggtggtggtgcgccgtgggtatcgtgggtccgtggtggtgcttcggtggtggtgtgtcgtgggtcagtgggggagcgtcgtgggccggtgggtctcctctgtgcgtgtgtggccggcgtttgggacgatttggggtttcggctggggttgggacggaacagagagaatagagggatggaaggagagagaatgggtgttagattttgagaggggtagttttgggatttaggtaaagtaagcctattctaacaattacccatagtttaaatttttctaaccaattaacctttaaattatgcataaaaaatcaaatttcccataatatatcactatactcgaatacgacttattacaaatactcgtaatcagagttttgtacttatgctagtacttaaacattccttctctcacgacgttgtgtgtaagactcaatttcaatcaaacaaattaaaataaggctaattaggatttttgccccctgaactttgacatgtaccaaatcatgctccctgaacttttaagatcgttaaaaatgccccctgaactattgaaattgttggatttaagaacttttgtcaaatttcattcagttttactatttcaaagattgtttatgtattaaattatgctcccaaactttgatatctaccaaatcatgtcccttgaactttgacatgtactaaattatgccctctgaactatcattcatgttagacttttttactaaaattggaaaaaaaatccttaaatccaacaatct

SEQ ID NO: 335572 - DNA, 1180 bp, Cannabis indica
ggttgctggtgcttaccctcttctcgcactatagccgcactaatcgcatcttccgagatagccagatagaggagtaacgtttctccagttattactttcgccaaaactggaggcatcgctaaatgccttctaatgttctgaaaggcctcttcacactcttctgtccacttgaatttcttgttgcctcgcaatacattggagaatggcaaacacttaacagttgacctcgaaatgaatctgttaagtgcagccatccttcccgttaaggcttgtacttctttaggctttgttggtgatgacatgtctatcaatgccttaattttttcagggtttgcttcgatacccctcgcgttgactatgaatcccaaatattttcctaaggaaactccaaaggaacacttttttgggtttagcttcatattatacttctttaatattttgaagcatttcgcgagatccgtggtatgattcccaattttcattgactttactaacatatcatcaatgtaaacctccatgtttcgtccgatctgatttgcaaacatctcattcaccaactgttgatatgttgccccaacattctttagctcaaacggcatgaccttgtagcagtaaagtcccatgttagttacgaagctcctatgttcctgatctgggacatgcatttttattttgttatatccaaaatatgcatccataaacgacataagctcatgcccggcagttgcatccactaactggtcaatcctgggtagtgggaaacagtcttttgggcacgccttattcagatcagaaagtcaatacaagttctccaagtttcgttaggttttgggacaagaacaagattggctatccatgaggggtaaaacacctcgcgtataaaatcatttactagtaacttgtccacttcctgttttagcgacccttggtcggtttttctatgttgtagctctatgtgatagcaattgagagctagcatctgatcacctcgcaccactcccacaccttttagtgtttgaaacttcagggataggtgcttgatcgaactaattgcccctagtacgatcaatgctggacgaccctataatatattgtaagccgatggcaggtcgacaactaaaaagtcttgcataactgtagcggataggggtgcctctcccaagattaatgcgagctcgat

SEQ ID NO: 335573 - DNA, 596 bp, Cannabis indica
atctctaaaatgcccttctttttgacagtagaagcatttctttcctgacttgaattgagacttagattgaccactgaacttggacttgttatgatggttcttggaacctttcttgtctgatcttcctttggtgaatagaccttccccatttccctctcctgattcatcactcttcttttgaatctctttagaatttagggcagactttacatctgtcattgttagtgattctttgccatacaaaatagtatccacaaagtgttcaaaagatttaggtagagaggataggagaatgataccttggtcttcttcatcgatcttgacaccaatgttgtttaattccaagatgatcttgttgaattcatcaagatgtttccttagttctttactttcatccatcttcaatgtgtacagcttcttcttgagatacagtttgtttgccaaggattttttcaggtaaattccagcaagcttctcccacaaaccatcagcagtttcttcttcagaaacctcccttaggacttcatcaccaaggctgagtagaatggcactatgagccttgatttgaatttcctttttcttcttctggtcttcca

SEQ ID NO: 335574 - DNA, 715 bp, Cannabis indica
tcatttattctttcagttttctttggtgttcatttggtttgtttggttagaattgctgcttgaatcctgtcttatactgtttgattagttttttaaagaacttaaagaagaatatgagtggaaaaaggtagaggtgtgagcttagttgagcgtaaaagtcatcgaatttgagtgaaagcacgagtgaattgagtgaaattgtttttttttgagtgaaacacgtgagggagtgtggtgaggtctctctttatctgttctaacttatttttgcagaattcaatcatatcaaaagctccagaagaaaatactggtaatgaaactacaccacctacggttccaaatttacaacttcaatctttgatgggggagatgaggaggatgatgcgagaggagtgtgaacaaatacatgcaaggttagatagagtagaagagggaacccaccggaggcaacagaggaatagggttcaccaaagggatgataatgaattcgatgtggatgagataatttttgaagaagagtttgatgggatactagcaggtaaccataggaggtatggttgggatagagaagctaggaaccaggtagataattatttgggaaatataaagatgaaaattccctcttttcaagggaagagtgatcctgaagcatacttggagtgggagaagaagatggaattggtgtttgattgtcacaactattctgaaacgaaaa

SEQ ID NO: 335575 - DNA, 611 bp, Cannabis indica
ttgataacagctccggtgttagctttgccatcagatcaagagaaatttgttgtttattatgatgcgtcgagacagggtctgggatgtgttctgatgcaagctgacaaagtcatagcctatgcctctcgtaaactgaaggattataagcaacactacccaactcatgacctagagctggctgctatgggttttgctctaaagatatggcggcactatctttatggtgaaaaatgcgagatttatactgaccataaaagtctcaagtactttttcacccaaaaagatttaaatatgaggcaaaggaggtggctggaactggttaaggactacgattgcaagattctatatcaccctgggaaagccaatgttgtggctgatgcactaagtagaagaggtcccaggaagttttgcaccacagttgatagcccctcaactaccttctaagatggttactgcagggattgagtttgtagctgccctgtcagcccgttgtccaaaaaatgaaatataattacaagtttaaagaccgcttagtcggtcgtgatgtcttagaaaaggccctgaggccgaataagatatatataaaaaaaaaggagataaaaagaagtgtt

SEQ ID NO: 335576 - DNA, 908 bp, Cannabis indica
ttgttggttttttatataaatactttgcttgttcattatctatggctattgcactatcaaagtcttcttctccagttgtaaaaaatgccagagaaaaacttgtgtcgatcctcaatgggtaagaggaattttaagaaacacccccaagccttacctcaccagttccaagcaaacgcaaatttcttggtgaaacttcgaagagaaggatgtccaaacgtccttgtcctgtggttgaaattcagactcagattttgagttggacaatgaatttttacatatgttcaagcttgataaggtattttttagttgtttttgtgttgttttaagagttttcttgtaatttatcttatttactcctacatttctatgggatgtattactttcatatgtaatgtcttttttcttctttttatcttgtctttgtgtgtttgttttgtttgaatgtagtattttgttgtttaacagttatttttgtgttgtttattattgttttgtttatatgtagaggaagggtaaatcccagttaaaaatgttgaatcagatgatatttgtaaaaaaggttgtagaggtgtgttgttttttaatttttgtgttactgattatttatgcttcatttatttttggattgttttcctgttgttttagtgttgtttttagtagttttaatattccttctataggattggactcccaagtacagttgtttaaaatatttttttacagaatatcagtaattaaacattttaattgacatacaacaacatcaaaaaaatagtagaaaacaactcgtcgtttgttcttttattttttgtggtcctgttatgatttggttgcctacttattattcatatccccaatttacaataaaatgtaggttattaagcaagaacgactctagaacaacgttg

SEQ ID NO: 335577 - DNA, 1112 bp, Cannabis indica
agcaatgtagattcgaatacacccgttgtgactgaagtccattaagtttaaaagacggaattagttgactatcttagaaccttctagcaagtactaggtcaccactactcttaagctattggacattagagatagaaagaaattttgaagatttagaaaagaaaatactacttccctaatagatatttgatatgttaatttcttgatattggtttggtagtaagcacatttattgtcattatatattagagagtattactataaaacatcagtggtagctagcaccactacgaggtggcgtcttgcaataattttgcgatatgacattttaggtggtgctaggcatactaatattgttttctcactgtatttgttttttcttttcctttgcaggcattattggacttcaatcatccgtttaagcctttttttagataatatgcatagtttgcataataaattgcttgaatgtatcttgaacatagtataggcttgaatctttgttgaccttttcttattctgggtgtttaaggttactagaaaatgagagataatgttaatggtatattagtgtactaagtcaatggttaaaactcaagatgtaggcaaacaaagacttgatttagttgataattaagaggtaatgagtacacaatctaaacaaatacaatagtgaaattggtaatgagtaatataatgatacctgcactatgaaattagacctaaatattatacacaatgacattaaaaaacagttgatcccagtatagatctaattgatttagaaaaattgacacatggtttttattattttgtgtttggtaaagatatcatcatgtataaaccccaattgcaaataaaaattaagtaaatatttcaaacacaaaaaagtttttttttggggggggatattggcggtaggggtgtttataaaatacctaatttaatttaatctacgcgatctaattcaattcaatttgtaaagtgtagatattcgtacttatttgattggattggaaaatccaaaattcgtacttgtggcgaattgaatgttgataggcatataaaagtaaccgatctaatttaatctatatatatttatatattttttt

SEQ ID NO: 335578 - DNA, 435 bp, Cannabis indica
taggtttaggtatgcttagggtatgttttctaaggttgtttagagttgattttaagccgtggatatcagttttgagctatggtgtgagaattttgtaagcttgagttttgaaactcaagtttaggtctttaatggcataatttgatttagtggttttttctgtgaattgttggttggaaaatgttgtaaatacattgtacaggtatactggaatgtttggttaagattggttggattttgaggtcatggggagaattttttgggttcccagcacagaaccagaattccggttctgggggacctgtagcaaccagtcgaccggttggtgacccagaactggacttccagttgggggagtttttggaaccctagtatttcccatttttgagatatttagggcatttccatgttattttgttgtgttttgtgccctaa

SEQ ID NO: 335579 - DNA, 570 bp, Cannabis indica
aggatcttctctcccagtatacatcttccatgttggcattttgaacttgtggggcagtggcaggagattgatttctggtgagaagggagttccgcgagcacggcctaactcaagatcattattatgctgtccggccatgccatgaaacatattcttcaactcgtcaagctgggcctgtacggctgggctgacttgatttgctttttggtcagtttggattacatcagcgtctttctgagtggggatttgagtacgggctctgggctgcacgatcgttgtagtattctgctcgtctgttccccttcttcttcttagattgtcctttaggtcataggtcgttccaagcctatcgaacacagaagagcctggttgccttagcgattgattcgcttggttgacaggcagaatgactccattattctgattggatccgtcaggtatgtctcctcctgatgaattcccgaacaaggtctgcccgtctacctcttggcccacgagtggaactcgtgactggggattggacggttgaccattggttgtctgggaggcattcattgtcgggtcatcctc

SEQ ID NO: 335580 - DNA, 638 bp, Cannabis indica
aatacatttaatcacaaaatcttgtttactttccactttgttgacaacacaataaacaagaatatcagtgtgataagggtttggatgaatttattaatcaaataagtaaataaatgttcacatgaaccaaataacacattaaacaagtaatgaaattaaatttgtttctttattgataattgaatagaaaaaattacattgaaatagagttttatttagggcacaaagcccaacacccagctagaggggaagtcactccatggcccatagtaagtggttgtttattgacctactcggggtttgtccttggtggtcctctcgtgtttccaagagtctgcacgttggaatctgtcaccatctggtcgcccttatcagcaaggcctctacgattttgtaccaccattctgtatgcctatcaaaacttaagataaaaaacttgtgtttttactctcagtgaaagaaccaaaatattgacctcgctttttagctaacgacaatgactcaattaataagtgattaataatataattaaaagagaacaaaaatgataaagtaaaaagaacacaaaatttaaagaggttcagccccgtgagcgtggtaatagcctattccccttgtattgtattaacttaagagaa

SEQ ID NO: 335581 - DNA, 648 bp, Cannabis indica
ttggctggttacgctgaagatgttcccataagagcaaaagagttatgtcatatactcatagcagaaggttttatatcgcgaagaagaggttctgtggaaactttggaggatgtggcatatgattggttaaatgagttggcggagaggagcatgattcaggtaaaacaaatgagttcaaccggaggaaggataaaatcattttgcattcatgatctcatgcgagatttgtgcgcgtctaaagctcaagaagaaaactttctacattttactgatcggaggaataataaaggggaagagccaatagaaacaaaggtacgaagagtttccatctatgataatggaaatattgacggtagtgattttattcatatgtttagaaacatagatggcactctcaggtgccttgctctacatggtggaagaattgagtataatgaaacaagagtattgagacatgtatgcaatcactttttgaagcttagagttttgattattggtcatcagcctatggattacatttctactttgaagttgcctaaagaaattgggaatctgatccatctaaggttattaagtattcgcaaatggtggattgaaaagattccatcttcttttggcaatttaagatgcctgcagactttgagagta

SEQ ID NO: 335582 - DNA, 783 bp, Cannabis indica
atgggagatctacactttctgccgtataataactcgtagggagccattcctatcatacattgatacctattattgtacgagaattctatcaacggtaggtacttactccaggatccttcaaaatccataacacaggctcgtaacatatcctccagtatctgaattgtcctttcggactgtccatcagtctgaggatggaaagttatactgaattttagtttggtacccatagcccgttgtaaactgtgccaaaattttgaaatgaaattcgcatctctatccgaaactatagactttggcacaccatgcagtcttactatttctttaacatacaaatctgcatattgatccactgaaaaggttgtcttaactgttagaaaatgcacagactttgtgaatcgatctaccacaacccaaatcgaatcaaacaaacccgtggttctgggtaacccaaccacaaagtccatcgtgatatcttcccacttctattattgtagggttaaaggctgaaacaaccctaccggtctttgatgttcagccttgatctgctgacaggttaggcattttgatacgaattctaccacattcttcttcattctactcaaccagaagtagggtttaagatcttgatacatcttggtggtgtcgcgatacagggaatatgtagtggtatgagcctcttcgagaattttatttctaagttccatgctatttggaacacaaaccttggtcttgaataacagcttccactatcttacactgtaaagtctctggcttgatcag

SEQ ID NO: 335583 - DNA, 809 bp, Cannabis indica
agcatacaataatatatatatattcatgactatgtttaggcacccataaacctatccacaaggcttattagatgatttaagagcgctcttaacagtgggtgccactgaccatgatatcacccactaccggcactatgattgcactgcgggaccgacactatgttcgtgtcgctatgatagcatcaatagtacccaaaagtataattggccatgatataactcttaaccagtacaatgcctgtgctgctgaaccgtcacaatggttgttgtgtcactatgatagcgccaattaatactttctggggtgagtaccactcttaaccagtacgatgactgtactgccaaattaacataattgttacgccgctatgatatcaccctaatcatatacaatcataacacaatatgtatatatcacacatacatgcattcacagatataatatgttctatactattcttacctcgtttttgaattcaagtaagttgcccaacctaaacggaaaagctcgtgctggatggatgccctcagccacattcacataactaggtaaataacacgccaaaaaccctaacccgtgaaactcaaactcctataaacgttctgctattggtaactactaaaacaatatcccaaaaaccaagaaaataaccaaccaaggcactagaaataacacaaattgatagcacgaaaaagtttgggaaaccggctaaccggtttatatcaggtaacccaaaataattcaaaatcatgcccaaatcatgtccaaacctcaccaaaactttcggaacacctataacaacctcaaa

SEQ ID NO: 335584 - DNA, 790 bp, Cannabis indica
aaggtagaccatttctgtagaaaaagtctgccgtttttcactttataaaaataaagagtccccaaatcgactcaaaactaccccaaaccttaccacaagcgccagaatacctaaaatcatcataataaaccatttgcaagtggttaaactagatataacacaaaattagtcaatttaccatacttgaaccaagtttgagttcataaactcaaactatctcaacactacaatcaacctttaaatcaaactcaaataagcctaaaacaacttaactcaatttcagaaaacatcccacaacttttagggttcagacaaaactactactcaacatttgcatgcttgaaccttttcaaaactaagaaaaataaaagggaaaagcattagggttcttaccttaaattttcactacttgaattcagctagaactcctcaaaattgttcaacaaaaattcttggtttgctgctgggttcgaaaaagggtgagggagaagaagccaaaaattagtttttctttctttcttttcttttaatttgtggtgacgcagatttttgttatccaattttgagcctcactgtaataattccacatagaaaaagtaaaagctatagaaaaataatatatgaacacatggttttttatgtggttttgcatttaaaattctgcatagtccacgagtcaatcttattcaaatttctgagtatttttttagggcctccttcatatgagtttttttcgtccctttttgagatggtttgccactatttacaagtacatagtggacagttaatt

SEQ ID NO: 335585 - DNA, 1510 bp, Cannabis indica
actcgaagaagttgggctagaacggagacgaggatgatcctcgtgcaagagttgaagtagatcctggtcgatttggtgttcgcttccccaaaactcacctgggttcatctacaaaagacaacacacaagatgagtgtttggtcgggatatcaaacattaaaacaagaaaatatgcctaccaggagtactcaacagattaaagaataagaatattcagcgaaaagtcaaaactcaggaagtttgaaattttctcgagttagggcaaaaaatttcatgaagcctagaataagcaagatgaaagacagtcattggacagttcaaatagatagcattacggacggtgaaatcgcatgaaccatgacaaaggaaaatcgctgagtttctaaacatagggtttcctacatatcttctacaacaaagtcaaaggtgcattcaagaaactgtgcaaagtaagcataaagggaatcgagaacttactcaaggatcagatgtctggattcagcttatgcaaagacaaacgagcagttttgatgaaggcacttcagcaaacttgaagccaaacacctctcttttcgctctgaacttacttagcaaggagggttggtgaaaatgagtttttgtacaaatgctcactggtatttataggaaaactacgtaatcatttcaaaagaacctcaaacgcctcggatcccccttgaagtgaatatgggaaatcaaaagtaatcaagtgtagccgtgaaccgtggtgagagaaaatttgatttcgaaatattaattgtcagagcattattagcaaaaaactgaagggatgcccagtcagcctcacatcgactcgcgaacagacgcgcttgacacatgacacccattcaaacacaatgaaacctcagatgaagtctacacccaacttcggaagtcccgtaaagacttggggcccaaatgttatcccaatttttgctctctgacgtggcctcacatcatggtgacacgtggaatcgactccgagtatctgctcacaagatatagtcctaataggatacctcatatgcatgctcgaagcaaagcaatcagcaatccgcatagcgcgaccaacacttagcaaatttagctttcgcatcatgagtcatgacagaaatttatataacttggggatcagattgtaaagatatggcaagctgtccaaatcccacgatcagtgtattttgtatttactatgcaatcattctgcttatatccattgtaacgagaagggaaatacttcctgtccaagcccatagccctttaaatagtgatgcatgttcactgggcaaagggtcgaaagattttacttgagagatattgtctaagaatttatactcaaagatattattgtaagagctataagaaaaggaacctttctccttgttcttgaattaatacaaataacgaggattaggctattaccgaactgctcggggctgaactacttgttgcttactaaattagactcactgtgtcttcatattgctttatt

SEQ ID NO: 335586 - DNA, 733 bp, Cannabis indica
aaagagccacaggtagatgaggaagggttccaaaaggtgagtaagggtaagaaagtgatggtgaacactgagaaagaggagactactgtgcaaaacatgtttgggactctaggagatgaaggggaaataaggtacaatacaagaggggagggagatccctcatcctcaaatggataggttcctatgttggaacgtaagggggattaatagccagcaaaagcataatgagattaagcaattgatcttttcgaagaaagctgggtttgttagtctcctagaaactaaggttcaaaacaagaatatgggaaccttatatactagtctattttcgggttggtgctttacaaacaataatccttggttggataaaggaagaataatagttgcttggcagcctagtgtttattctgtggatattagatattgctctagccaattaatacattgctatgttcagtcaaagcagcaagtgggaaaattttttgtgtctctagtatatgcttttaatgatgaaaggaagagagaggatttatggggtgagctagaggaattggcacaaaaaatagatgaaccatggataataatgggggatttcaatgagatcttaaatgctaatgagagggttggaaagagagctcaaagactaccatctcaaagatttcgagacagtatggagaattgtaagctggctgatttgaagttttcaggttctttcttcacatggaacaataaa

SEQ ID NO: 335587 - DNA, 737 bp, Cannabis indica
ttgatatttatcattaattattatagtataataatatgaataaatattattattattattattattattattattattattattattattattattatagtatacgtatgatatatatcatagtgtacgtatatcacgtaactagaaggccgaatattatggaatgagaatcgttccacttttagttcaaatcaatctattttattcttgttagagatcgactcctatagtttagaagtcgtgcgaaaggaagaatagagagtgcgggtgatcgggagtaaaacaacgagtaagaattcgacgtactttttcgtttttcgggttggccacaatctgggtagattggttgtttaggatttcttatttatgatctaagaaagatatcagatggtgtagaaagaaaaagagattactgtttcgggtttcaccattattgaagcttcaaagatacgttcttgaaacggacccgaatttgaatgtgtttaagttgttttggatgtcaaaggaggttgtgtttaagtttatgggaccccaatgatcagttttgacgtgaagaaacggtgtaaagagctccgaaacgaaaaatcacagttttggctccatatttggcggtgtaccgtgtttggagaagacaatctcaaaccagccatttcaagacgaaatatcagtggtatttggcttctttgaggtctggaatccttgggaacattttccaatcgaaaagacgcatcgaaacg

SEQ ID NO: 335588 - DNA, 1159 bp, Cannabis indica
cgagtacccttgtaccgcttaaaaaagtctggcaaaagtaataataaagtaaaagctaggcattgggagcaatagggggagttggagtggtagattcatctgcgactttgctggcagcctcgtccaggacttcctcagtgtcggcagcatcagcatccttggggaaaagatttcctccacctccttgagtctgcgtggctgacatggctcgaaaagcctcagccatctcagccgactctgccccaaggatcaagaagtcgaagtcttaaatcttggaaagagttgtgtagatgtaatcaaagaccgcctggtcgtactgattctttccattctccttctcgacctctaagtcgcgagacacctcctcaatcttcgccttggagttcctggcttcgagctcgacttgcttacgaaattcctcgtgctctttgtccttgtcagccgcttcctattttagctttttgacgctcttctgaagctaggcattttacctctttaggagctcgacttccttggagccagcgacaaaggccttcaagagcatggtcatggactgtgaagccaattccagagagcgaggtataagctcctcagaaggagtcttctctaccttggacatgaactcctcgcccacaaacttttcctgcataactaggaaatcgcgagctcgaacagctggatcgatcacgactttcttccccttgtcctgcgtaggcttagctatcttcttggaggaatccgcggcaggggtggccatgacgacgctttttctcttctgaggaacgacaggagatgtcgtcgctgttccagtctttggcttgcggttgagaaccggtgcggacttcaggaaagtcatctctgcaaggacaagaaaagataagtacaaataacaataagtttaagtgcactattttatacatgtgatatgttacttgatgttggccgagaagtctgcttggaaaggcgtttgtctatccattctttttgcttctcagacggctccttgtacactgactccctttgaaggctcgcgttctctggaataagcttgcgttcctgcagctttaaggttgtgcacagtagtcgccagtcacgatcttgaacagggaggcttccgagaattttagcggtttctgtgctagtcgcgtctagtccaggt

SEQ ID NO: 335589 - DNA, 1053 bp, Cannabis indica
aggtagacgccatcaccaagttgacagcccaagtggaggccctaacgaagttgatgactgctcaggtgaaacaggctcaagttacttgtgagctatgtgggggccctcacacatatgacacatgcccggtggatgtgaatagtttaccaatggatcaagcaaaagccattgggaactattctcaaaacaataattatgggcacaaccaacaggggttctaccagcagagaaatcagccccaacaaaaccaacaacaactgcaacaacaaagtcctagtggaggcttaaatatccaagctgacttattgctccaattcatgatggagactaaagcctctattaaaactctagaaactcagatggaacaattggctactcaagtggcaaaacaagctcaaggaaattcacctagcactagtgaggcaaaaggaaaagagcaatgtaaagcaatttccttgaggagtggaaagagttatgagggacctagtggcaagcaaccagttgaagatgtggttcaggatcaacaggcacagacacaggcaccaaaggaaaagaacactactgagggtcttgcaccgaaagaagcttcgcctccgatcagcatagatcaccatattaaaattccttaccctcaaagactccgcaagaacaacctcgacaagcagttttcaaaatttcttgaaatattcaggaaactgcacattaacattccatttgcggaggccttggagcaaatgccaacttacctgaagttcatgaaagaaattttagctaagaaaaggaagttggaagaattcgagacagtggcactcactgaggagtgcagtgcaattttgcagaagaaactaccgcccaagcttaaagatccgggtagtttcaatattccatgctctatagggggttcggtggaaactaaagctctatgtgatctgggagcaagcattaatctaatgcccttgtctgtcttcaaaaggctaggattgggaaaagcaaagcccacaacagtgactttacaactggcggatcgttctttgactcatcctcgtgggataa

SEQ ID NO: 335590 - DNA, 740 bp, Cannabis indica
gcacccaagcccgtgataaatctagaaaaacacaaaacaacgatgttatgataatggacttgaatcgaatcggagcccagccgataagagtttagtgcaagtatgatttttaattcttaataataaacttgatattattctttcgacagggacggttattacttatgattttttatcaatcacatgaaagaaagatcattggacatcaatgggctgaacagagtatatgaatttttaaattggggttcgattgccatagaagcaggggttgacagtaaccgttgtcaagcactagtcactcgtatggctaggatgaccgaaccagataaatgggttaaagcccctacaacaatcggtatatgtagatttaaaatgaatataatttcagtatttataagtattcataatatttattattatttcttaacagttttacacatatttgttcgtgcaggaaaatgtttcatgggatgcttatactcatccaaccaagtacgcaaacggtggtatacttggattcaagcaatggcgacgtaccggatgatttgaaattcatcatttccacgtaagttctatatccaacatcctaatatgtaagcgtgttttaataccctgttataggcgacgattttaaaccatcaagaatttcacattagcgactgttttgaaccgtcgcctattatgcccgttttgcgactgtcgtatggcaacagttacagaaactgacgggaatactttaa

SEQ ID NO: 335591 - DNA, 1028 bp, Cannabis indica
agagggagtcatgtacagaagaggattctcgatgccattgctcagatgtatcactcaagacgaagctgcacgactcctatctgaagttcacgacggattctgtggaaatcacgccgccggacagagcttatccaagaaaattctaaggtaaggttacttctatccaacgatgactgaagattcgagagcttatgttaagaagtgcgataaatgccagagattttcaaagataccaagagctccgcccaacgagttaacacaaatgcaaagttcgtggcctttttaccatttggggaattgacctgatcggacaactacctaaaggtaaaggtggagtgcagtacgcagtggtagcggttgattacttcactaagtggactgaagccgaatcacttgcaaccattacgtcaaagaaagttcaagactttatagtgaagaacataatatgttggttcgaactaccgtacaaaatagtctcagataatggcaaacagttccacagccaatcctttactgatttctgtgcaaaccatggtatcatcaaaagtttctccacactggcgcatcctcaggcaaatggtcaagttgaagcagtcaacaaaaccttgaaggatacacagaagaaaaaacttaaagatgctaaaggaaattggccagaagagctccctgaagttctatggtcatatcgtacaacggaaaaaacggcaaccggacagacaccatttgcaatggcgtacggttatgaggctatgctgcccgtcgaactcgagccaccttcccacagaagattgacgtacgatcaaggtaccaatcacatactccttgtagaatcacttgataaaatcgaagaacgacgagcagctgcaaacaagtgaaagctcagaaattcttcgtgggagatatggtcctgagaagggtattcctaaacaccaaaaatagtacggcaggtgtagtaggacctaattggggaggaccatatcaagtggtcaaagttcttgactctggagcatacaaattaggtaagtatg

SEQ ID NO: 335592 - DNA, 1236 bp, Cannabis indica
accgggctcccaacgcgaagaggcctcccagcagccgcctgcgccttagtataagccttctcctgggcctttcggtagagatactctcggtacttctcttccgccgtagcaatgatctcctcccggaaggtcttctccgcgaccggaacccttacgttcgggaagataaccttggaaaggttggagtcctccaccgactggtgccccaagatcatcttggccttccggcaattctccgtcgtgaccaaccccccgacgtcaaggtccttcttgtcatatgtggcgaaggtcttggcccgttggaggaagagctgagtaggcgcagaccgctcataaggagggatcctaacccactccgtgagaagctccgggtgttccacagccaggaacccaaaggagaagaagaagtggtgacggtactccttgacgtatttttgctagttaaaggggaccggaccctcattaaaagggtgggcccggaagccataaaagtcgtcgttaagtttgtcccccttcttagggacagaaacgagttcataaaagtacaatatctctgccggactgggccagccccgggcaaagtagaaaataaataagcctgaaagcaggcggtaagcttttggaataagttggtatggcgcaaggccgacaaatacaaggaaattaatgaaataatcctgaaggggaagcatagtctcggtcatcaaatgcgtctggctccaagctctgaagcctccgtagttgtgattgggcgtctccacgtcgcggggcggccggtggtacgtcccggacatcgcaggcttgatgccagccaccaccacaatgtgctccacctgatgagggcaagttaaggtagagtgaagctcggccgcttcccaccccatggcacgaggcttatacccctcctgggcgacgggacccatcatcacctcttctagggtggccaggcgttttcctcccttcttggaagatttggaaccagatgtagacattttggttctgaaaaagatttaaaattccagcaatcaggccccataccaaaccctgtcaaaaaagggaatgggggtcccctaaccgctggaaagaggccccctccggacggttgtcaacaagaaagccttagaaggttttcatggacaaaagtcaggtgcaagaatcttacagatagtgacattacacatgagcaaagaaaagaaaagaaaaagtaagggtaaaagtcgagaaagacaaagtctt

SEQ ID NO: 335593 - DNA, 554 bp, Cannabis indica
tgcgactctaactcccaggtcgcctcttcaacactttaactagtggaatggtcttattccgcaacactttttcatccctatccaggatctggaccggttcctcgtatgacagatccgtctgaagttcgatatcttcatagcttaggatatgggtcgtatcagacacatacttttgaagcatcgagatgttgaatacgttgtgaactccagataaagtaagggatatggctagctgataagctacctaaccaaccctttccaaaatcttaaacggaccaataaatctgggactcaactttcccttctttccaaaccttcgaattcctttcattggggacacccgaaggaaaataaaatctccaatctagaattcaatatctctacattttggattaacgtaactcttctgcctactcagtgaggcaagcgtacgagctcaaatcttttcaatagcttcactcgttctttgagctgcatctgttgtgatattttgcacatgcaagtgcacgtatcgtttacaagtaatagactcatcaagagtgaggtcgatccca

SEQ ID NO: 335594 - DNA, 637 bp, Cannabis indica
aagatctgaaaagagttaggttaattttataatctgtcattcacattgcgaaagagagtagtaattagcattaataattgggtaattaaatcaacatgattcttttccctaatttctcatccttgattgaacaactttactgctttctttaattttcttgtttatcttaatttcaaactttattaaaattatttttatctgccaaatagaatcataaatctagtttagtggtattcagttcaattccctgtggttcgacctcatctgtgtgagtttactacttgagtacgtgcacttgcgtactgttcttaattttcgtaacaccaaaccatcaacgttggtagcaaggcaattggagagcttggtagtttgaatagcatataaaggcagagacaagactaaaaattttatgagagtagcacgacccgcctttgacagggtttttgcttttcgcctttgtaacttcgaagtgaggttatcaggataaaattgaagtatgcgtccttatatcttgatctaaataggggaaggcccagatacttgacgttctcttcagttgacccgaacatgcatagtgtaacgtcctaatgctaaggcacgctacagtactttttcaattattgtgcaatctttgcta

SEQ ID NO: 335595 - DNA, 779 bp, Cannabis indica
tgtaatgacctgggagaatttaagaatctatttgaagaaaagttttacagtattgatgtgagaacttcacacatggaggactttgtgaagcttactcaagggaaaatgtcagtggccgaatacactccctggagttttatcagttatctaagtttgttggtgatctggtgctcacagatttcaccaggaaacagaaatatgtgagaggactgaatgccacaatcaactgggacttgaagattaccacttcacatgacactttgtacaagaaagtggtggagctaaccttgattgctgaggaggctgagcaacatgttgcaaaagagcagactgtaaaggatgccgtcacggtatggaaccctcctgctagtggtaatgtcagtaaggggaccgacagtggcaaccctgatcacaaacggtaggctgaggcttccgaagcatcagggggtaacagaaagtttcggggaaacagaggtggctgccagggctgcgggccctcattccgatcatatcccgaatgcccaaaatgcaagaaacaccatccgggtgagtgtcgggccaagacatgtttccagtgtggcatggcgggccactttatcagagatttcccccaggccaagaaagaggagcctaagaagaatactgctcagaacccggggcaacttttcactataactcaggctgacgctgatgctaatccgtcagttgtgacaggtcagttgcctattaatggttgtttatatactgtgttatttgattcgggagctactcattcatat

SEQ ID NO: 335596 - DNA, 524 bp, Cannabis indica
aaatgagatttttgactttcaatgactctcctatcattaagccagcaatcaaggcttcatacttagcctcgttattggatgcgtcaaattggaatctcaaagcatagtgaaacttaaagccttctggtgatattaatattacccgtgcacccaaatcctgttcgttgatgcaacatccacatataacttccaggttttcgcgtctcgttgatcaggtggaatttcttctggagttatttctctatcaagaagttagctaaagcttggcccttgatagatgttcgaggatggtatgttatgtcgaactgccctagttcaatcgaccaatttatcaatcttccagaagcatctggttttgataaaacttctctcaagggctgattggttaacacttttatggggtgagcctggaaatatggccgtagtttacgagatgcatggactaggcacaacgagagtttttctagaggggaatatctagattctgcccctagtaaccttttacttacataataaataggttg

SEQ ID NO: 335597 - DNA, 814 bp, Cannabis indica
tttagtagttttatcaatcgtttgattctttttaagccttagacgcaattcataccaagtggtcatatatttaacatgttccatgctaatctcatgctctttaagtctttcaccaatatgcgcccaatcactaaagccttcatttgttaacatgcctctaccaatcccacttttaaaaactttgcaacaaaaacaaaatactctatctaactcttttgaataaacaagccaatctcgatcacacttctctccatttgataaaactctagtatacaaattagcagtgaatcgtctagaaaatttagttttagaaccactcataacagaataatctctttttggacccttcaacactaataaatcaatcatttttgaatcaagagcatcccaatttcttggatcaaatatatcaagcaaatgttcaaatgggtttgattgctctgcattgttatcatcattatcctctaaaacatcttcatttttaagtgaattattcaaatgatcatcatcactatttgtagtattatgattttgattttccatattatcatttttaaatgacacatcactattattttccacattaacattttcaataggcacatcacctctattttccacatcaacactttcattttgattctcaatactaacattttcattaggaaccatattttcaggaatttcaacatcaacaatgtcataattatgattttctaaagaaactaatggttcttttataataaatttatcaagagctcctttttgagattgagttaactcctcatttttttctttttcttacgtttttcat

SEQ ID NO: 335598 - DNA, 1479 bp, Cannabis indica
tgtttaaacaacatacttgtgagtagatctaagatcctggtaaaataaatattccaacaaaaacttgatgcttccagatggttagtcaaatgggcagtagagttgagtcagtacaaaatattcttttaaccccaaatagcagtcaaaggacaggtcatagcagactttgtagttgcaaagaaaaaagcagttcaaagcacaactcggagctagtacaagaatcctagccgaacaacaatgaagacatacctacctagaaattacacgtggatgagtcagctacaaatcaactttctggtgcagagattgcccttgtcacacatgaggggcgacatctgcatggagtactcaaatttggattcaaggcttccaataatgaagtagagtacaaagcccttattgttggcttaaaacttgcttgggagctacaacctgaacacattgagatgtgtagtgactcacaattggtagtgaatcatgtgtcaggagagtacgaggcccaagtggagaaaatgatagccgatttaagcaaaatacaggatctcctcgcacaattcaagggttacactcttaagcaaattccaagagaagaaaacacaactgtcgatgccttagtctgacttgcaagtagcaacatagctgataagactaatttagtcccaattcaattccttaaaaaacccagcatcacttgtgtcgaagaaattgaaatgattgacagaggtctaaactagatgacaccaatagcagcctacctcaataatggagaacttccgaattatagaaatgaagctcaaaaaatgggaaggaaggtagaagctacacgacttctgtctaaagtacatcatggattctgtggaaaccacgcagcctggaaaagcctatcgaagaaaatactaaggtaaggataattatagccgaccatgatgtaagattcaaagggtatgcaaagaaatgtgataaatgccaaagattttcaaagataccccgtgcaccgcccgatgagctaactcagatgcaagtgcttggccttttgctatttggggaattaacctaatttgataattgcctaaaggtaaagggggagtacaatatgcaatggtcgcagtagactattttataaagttgacggaagccgagccattggtaacaattacatctaagaaagtatttgactttgtggtgaaaaacacaatatgttgattcgaacttccccacaaaatagtctcagataatggccaacaatttgataactaattgcatactgatttctgcatgaatcatggaatgataaaaagtttctccgtagtggcacaccctcaagcaaatggtcaagtcaaagcaggccataaggaacttaaagatactttgacaaaacaacttgaagaagctaaagggaactggccgaagtaactaccaaaagtactatggtcataccgcacaactgaaaaaataacaactggacagactccatttgct

SEQ ID NO: 335599 - DNA, 932 bp, Cannabis indica
ctagacatcctagagaggagacatggatgcttgcttcgaactaagttcagagatgctaaaaagacaactaccatgtgcaattatagagaggcgcaacaaaatgcttgaaactcattggcatagtacacggtttgattggcttgtccatactgtatgcttggtacactaggctgagttttccatagttacatcgtaagctgcaagaggcacttttgttacaaaggaagcttgttggcaggggtgtggaagtattgcaggggccgttatattcttataactcacgatagtggtcaagagttgacgatcgagatggttcaaattgggataggcattgaatgcttcagtttccacgtgtgtgtgtcaagagggaggcacatggagaccaaggggcagatgctgcaattgtcagaggatgattgtacttagaggtgtttgaatgtaacttttatttgatccataggggaagcacatagacagttgagtgagatgtgttggcttagaaaagtgccagtgggcgtaagccatacaatgacattgttagagatgcaaagttatggaaagaaggcatcaaagaagccatcagtgctaagaagactgagcacaaacattacaatggtgctagagtttgagtggaggccagagggttgtgccggtagacttagtagtcatgtgagcttgcaaaggtcaagagaggtgctagagtttgcatgaatgctagagggttatatcattagaacttagtacatcgagggatccggaagggcgtgatgctagtgcgaatcagttggatggttgagtggacagtgcatgcacataaaaatcgataggggtgctatatgagatagttgactcaagagtcacatcctgcgggatgcacttttagatggcatggtgtgcatgaagagttgggcggtcaggcatttgcgtgtggg

SEQ ID NO: 335600 - DNA, 691 bp, Cannabis indica
tggacagtatgaaagaaaaaaaaaagggcttggacagtaaaaaagaaattattgccgtgtggcagtattattgtaaaatttggagaaaaaatagtatttttgtaagttttcctatatatataataataatagggggttttgcaataatatacttaaaattgattttatttacaaaaatacctttaagaaaattatttgcacaaataccgttgtgccacgtcagcatacataccgaaattcaaaataattaccgaaaatgaaaaaaaaaactagaaaaatcgcgtttccagaaattttcgctttctgatagttttaaaaaaagtaactgttgcccctgattttgcccaatatacgtggaccaatcagacaaggacacgtggatcgaacaagcttaacattcaaattacttgctaagtctttatgtaataaggcagcatccgggacatgcctcccggagaagacatagggagccccatacgctcccggaagcccaagtaatactaaggcatctcgcaaggtgtcaggcttcccctgagcaatcaagtcgcatttaatgccgcatgggaggaaacgtgttgggactgctacacgcaataaagtctgacggcacaacccccaatctgcagctacaaagtaatgatcatttaagtctatcgacggctacactgtgaagagtcacatcagtcaaaag

SEQ ID NO: 335601 - DNA, 675 bp, Cannabis indica
ctaatgaacgttcctccattaaaattttatgttgagctaaaacttttttggttgagctccaaatccaattctccctctaaagtcgttaaaatttgcaattaagttctgccttgtaaaatcgagctcgacgacttctactattttccaccaatatatgctaccatccctccaaatgcataattagtcttcaaaatagcctaataaattataattacactaattaataatttaaagaatcaatttaagaatagcaatacataaattagctatatttacaagacaaaatatcgacttatcaaatttccccacacttgactcttgttcatccttaagtaagttaattataaaatgaatgatacttaaataaaccggtctttatgaaaaataattttagtttcaaaaattgtgcatccacttataatttccaaaaaatccaaactcttcatcattaaaatttcaactcaagataattacttttcaaactcaatttttgtgtgtatgttcaattgactcatcatattactaacattcaaattaattcatgcatgccaacaatcagtatttatctcaaaataaatgtgtatttcaacgaaaatctactccataagcttaattatcaaatcattcttcactaatgtaattacacacaatttaaagatcaataagactttatag

SEQ ID NO: 335602 - DNA, 777 bp, Cannabis indica
aaaaaaaaagatttcattatatttggaaaaaaaaagtaaaaattggttttttatttttatttgaaaaaaataataatgtttaaaccaatctataattgccacgtgtcataatagatataaaattagcacttaacggataagggaccaactattgcactaaaaccataacggaaggcattattgccgtaaaaaaaattacataagcatttttttgcaacaaattaaactacttagggattaatgccgcaaatttccctatatatatgcatatatgtaatggaaagaagggaggcgtgaaggatttcaaagggggcggctgagtattggtctgctacagctacatctacagcaaaaaatgaagaaaaagaagaagaaaaagaaagaaaaaaaaaagagagttttatttgagtgttagtttttagtatttttattttgagattggcaaaaattaagaggaagaaaaagagaaattaggaagaggaacttagagtcttgtggcaactccaaatgggttttatttctatctttctctctttttcaactttgtaatttttgcccaatctattatgagttaattttctttttgttagaattttattttattgacttgaatttgtgatttgatattttattactatgttttagtaaattggttttgttcatttcaagtatgtttactgtgcaattgcttacttttgtttgattcaccattagtaggtactagctaatcttaattttggaaaaaataggattagtggaattgcttgaatgatgcat

SEQ ID NO: 335603 - DNA, 965 bp, Cannabis indica
ttatgcgggtgaggtcacttgtattgttgtcgcacattcaccacactgaaaagatcttctatctttcaaatgagcgacttgtcgaacaaccagatgtttggctctggaggtaatgctttcgatggtgaccaagaccaggaggatagcttcatcccgacctcgatctcagaagaggagactccaattgccggagatgcggagctgggcccgttgtcctccgcagatatagaaaggatggttcaggagttcgctgaaccagggaccatcgagattcgtgatagcgagtctacggtgtcagctcgtgaacaccttgttcattccaggcatgctcctgatgccgaagttgaggagatgggcgaggactgggaggctccagactgcgagtcagaggaagaggaggatgcagaagggagcgggactgactcagtggacaacactcaactggacgagcccttctcatgcgaggattcggtttcgcgagtcaccaagtccgacctaaccgcctttacaaggttaaatctgctacgcctcagtaccatgcgtcctcgtcctacccagagaccgcatctacctttcaccaatcctgtgataatacctatagagaatgtggttgtttctatacccattctccgctgtggggtatcgcttccttttcacccattcatcgctgctattcttaagcgatatgatgtatccccctttcaattaaccccaaacagttatgcatagccctcgggttttatgcgatgtacatggagtacgcacataaggagccatcgatggaggacttcaactacttttatgacataaagagcgtgggccttcacaacggcttctattgctccagtaaatgggctacttctgaaatcaacggggtggaaggcatggtttccaatatgggggattggaaatctaagtggttttacgtgtttaaagttccaggaattaggactgattttaatcgt

SEQ ID NO: 335604 - DNA, 1109 bp, Cannabis indica
cctacagtttggtaggcttttcgattagcacggtagcttgccgactacgattttcaatctctgtatgatcagcccttaacgcctccatctctctatctcgccactcaacaaacatacgcctttgttcttcgaacgtgagatttatggcagcgcggagttcttcctgatcatgatgtagggtattgttatgacactgcaatagtccaagagcgtcaaggagattttgtaactcagtagcatctccgatggttgtttgaacgttggtgtcaggcggaacggctgtgttatgaatgccctggttgggtgcggaactgttattcccagtgtcttgcacaccaggcgcgatttcatctatagcagttgttacaccgtgacccacgtttgccggctctccaggattaacagctggcggaacccttgtgtttcttgggttctgcgatgcaggatccaccgtctgtgaattggctggatccccttgacccctatgagtctgcaccaccatcgtatttgttgaagagctattcttgatccttctctcaatcaaagcaccaaaatgttgacttcgtttttagccaacgacaatgagtcttatttagtaagctataagtgatttataacaatcgatatatagtaaaacaattataaagacacaagaattttatagaggttcaacctcgagcagttcggtaatagcaagatacttaatttgatatttaatgaaattttggaaaattatttaagttgaaaattttgttattttgaaacaacttaaattagatatttttcagtaatttattttattatattttaatataatttcaaaattttataattatatataaatagatttttgaaattaatttttagaaattaaattaaagttgaaaattaattttttaattaattttggactaacttaaattaagtaattttcattattaaaatatatagattaaaatacatgattaattaaaaataaattattttaaataatgagctttaatcgaagagatatccaatctccattgttggtcttacaatggttaattgtttttaatataacctcgagacgctagacttcgtccctcttatggatggttattcgttga

SEQ ID NO: 335605 - DNA, 559 bp, Cannabis indica
ttggaaaagtggcatttttgagaaaataaagggaaagttgtcaaaattggaaaaatacccaagtggggcccattgccctatggccgaccactcattgagtattttccaattaatttttttattattttaatgcccaataaatcctaacctaaatctagtggttacctataaatagatagtgatggctcatacttaaaatagataaatttttgccttcagaaaaaaaaattgagccatctactttctgttgggttttgtgccctaaataaaagccatttcaatataatcagatttactaattaataaagatcagaaatctttttatgtggcacagttcacattatttatttcatgattataaattctattaggtccagaacatatgtatttgttcatgattatagtgttgtcagcacaatgaaatataatcatgattatatgttcaaaagtttaattccctgatgtgtcagttcactggatctagactggcatgataatcagcgataagtatgcttacaccttggataagtttatgtcctttccagggcattgacaaagt

SEQ ID NO: 335606 - DNA, 523 bp, Cannabis indica
tgggctgagcccgaatttttagtttatgggccgaaatacaatttagtttatgggtttaatcgggttcgggtccgccggcgaagagaaccagtcgtcgactggtgtgggtgagtcggacgagacgagtcgagtgggacggtgggtgtgtggccggccgtgggagggtgggagtgggactatgggagtggcgagtgggacggtgctcgggtgctgagtgactgtgtgtgtgtgtgtgtgtgtgatattacatttacagtaatgaagaaagatgaagattgaagaagaaaaaagataaatactaatagattagaatttagaatatgaatagcctagtattcattgattgtcgattgatacatttattaatttattgaaagttgaacatatttaaaaatttaaatgtaatttagttttacattccaatggaaatgataatgaatagtggaagtatggtggaatacgaaacgaatagaagagcaagagtcaggtaattattattaatgtattaattttttaataaaaa

SEQ ID NO: 335607 - DNA, 647 bp, Cannabis indica
cccctgccttctccctcttgcccttgccttcactgctctctctctctcatcgttgtcgataccgtcgatacccgtgttcttatcttcttcttcgtttggatttttcaaccccatcaagtcgcacaccctgatctgcccaggaaccatgggatcattgttcttctccctcatcggcgtcggcctgcgaacacagtgcatcctccttttcctctcctctcgacaacctgggaatcagaggcttgagcatgaaaatcctaaccccgcagctcgagttctctctgctcaatttctccctctcttgtctccttgccgaattcaatagcggaatcaccatccccaagctcctcttgcgagaagatgagatctatcacataagaggccagatctggatatgggtttggctaaatagaagagaagattatagaggtattggttgcttgattttttttttggtcattttttctttaggaaatagaatattgaacaatgatgaacatatgatgaaatgttgctatttatttgtgtataaatctgagtatagtctgtgtagttataaagaattggtttgaatgcaacaagtttgaatctgaaatttattggcttgtttgtaattttgggttttagatatttatggatttgtttggatt

SEQ ID NO: 335608 - DNA, 532 bp, Cannabis indica
aaataatgtatgaaattgaacataagtaatttaagatcaaagatagaagattaatatcatatgaaaaaaaaaacatgaaattgaaaataaaacaattaataattgcaaaaagaacatagacaatataagaatacacaccttattttttccgaaaacttctttccaaattgttttcaagcgtgagctacgctgcaagttggtcatcttccagtttaaaattttaggaatgttatttccaaccttaattgcaaaagatgaacctaaacttggaagaatttcaaagccccaaacttgaaaagctaacgggaatccacatatctcatatcccgtttttcggcgattcaaaacagtagaaagactgttaactgtgtcattgaaagaacgacgaccccaaggatacttttcaaacatttgttcatcatcaaccaacttcataacaaaattgtctacatgacattggccacgcttactttgtaaaatattctgcacaatgaaaacctttgtcaattttacaacatcatcatcatcatca

SEQ ID NO: 335609 - DNA, 598 bp, Cannabis indica
agagagagagagaaagaagaaggagattgcggcaccaattgttctacatcattgttttttttcttctctctaaactcatactttttattataattttgattataatatctagttcatagtagtttctttttagttaagggttattttaaaatccaagacatgaatctttaatttctctgatgaatgttaacttctagtttctattatatcgaattgcttctattcttctatatttaatgtcgtgattattattttaatcttatgtagatgatcactaaattaggtttttctttaatctattatcatcttagaattacttattcacctaatagtctatgattttgagtgtttgtgataaattgtaattcttaatattgtcaaaggtattttttaattgtgatgaagaatagaacttagattaaatgaataacgattaaaataaaaaattattaataataatataattatgtaaacatatatctataatgattcaatgttaacttaaaaaaatattaatttaattttctttaacatgaaattgaaaatattttatttttttaatttttattatacacataataaactatatatacataaa

SEQ ID NO: 335610 - DNA, 1277 bp, Cannabis indica
agtaattaataacaatagattcatcttttctagtttgcagatcccaaacaactattattctacttgaacacaacttgtaaacaactgtttacagaataaaacactgtagcaactatttatatgcgttaatgtttattttcatgcaaaccgttgttgtttttttttcagcttcaccaatatttcattattatttcaatttaatccggttttcatcaattaataacaaatttctattaatctacactaaaggatttgagtatgttcatgaaaaaattggtttaccttcaattctctttctgattcaatcatgggtgagtttctttgatttccagatctccttctattcggttcttcacctctgatcgcgatttcctttttcaatgattgttgtttttgagtttttttttgtacagcaatggaggttggctgatttttttttcctttccgtttttgtatttggattttcgggattcaacttgttttcctatgagatctacatttttttagatctgattttgctggttttggaagaaaaatggttgagaatgggttgttggggttggacggctgggtcacgaagaagaatgcggctgggtcatgagagatggaggtttccgtttccttggccggtatttttgtaattaacaactttttagttctacttttgtttattatcttttttggggtctataaatgtaaatttaatcctatttttggtttattataaaaaaaatctctattgataatgataattatctacttatatataaatataataatttatataatgataaacaaacaaacaaacaataataaatgtaactagatgaaataacttaatcttaatcaaaggatctttttgtttgaaaagatctattcgaaaatgactgaatttttaattgcaaaaacaaacaacaataaataattttaataattaatgtaataggagtgaatgaataatttaatattttttttatggagaaaaaaagatcacacgatgtaaattttttcacgataagttagacaatttttagaaccacatccccatgccaattgtaggagacttataacatatttggtattgttttctattttttgttgcgttaaattagtgtttttttaaagtaatattggacaaaagtgaattattttttaaaacagaaaataacattttgttgttttcaaaattcttagagcatgtttggtattgttttctgctttttgttttcaaaaatgagaacaaaaaatagtttttgaagtttttaaaacacaagtca

SEQ ID NO: 335611 - DNA, 661 bp, Cannabis indica
atagatatttaaataattatttatgctgttatattgaattctgaaatgtatttttttgtcatatagtgattttagtatgttagtattaggggacggttatttagacattgggaatgtcgggagtggtctggaatttataatttcctagaatacccctttagtcccctttatgttattttagcatggaggggcaaattggtcattttgccccattgttatttgtcctttagtggacttagtaattgtaaaatatgtgatttatatgagttatgttggctgaaataaggtttattattggcttttttttctctgattttattaaaagtaaaaagttagaaaatttagaaaaagaaaagctctctctcttcctctctatttggccctccttgagcagcaaggaagggggatttttcttggtgattcaagctcattttagcaagtttttgtgatctttaattgttggtaaggtttcttcatcttgctctttgagtttcttgagatttttgaagaaagtggataggttgcatgctagtttttgatgttcttgctgctgtaagttgctgttaatttctgtacttaaatcatgatttaaaatgttgattcaagcatgatagggttggtgattagttggttttatcaagagatgaaattttggctcaaa

SEQ ID NO: 335612 - DNA, 567 bp, Cannabis indica
ttaataatattatgagattctaacactctttcaaaatcctagctactttttacttataaatcttagatggttggatcataagtgacattttaactcacaacatatcacaaaagaatttttttaaactcgcagtttttagcccgacaatacttttggctcacagtagatcagaagcaactcttttttagcttttccttttaaatcgatcgcacttttgactcaatatcctcaaattataagcaactcaaattactcgtctttttagactagttcttaaatttaaattgagtactcattagagttttatttgactctgatacctttatagaacttaagattgtatggtaatgtacataaagttctatctcaaaatcaattggcaataaaaggaataacccatacatcttatatggaacacttcttaatgggtattacccatgaatgattactaaacaaatttaactataaatattaattttaaaaatatcaaactatcgaattttgatctaataatgaataatgaaatcacaaatttaccatttaaataacctaacttgcagcgacggc

SEQ ID NO: 335613 - DNA, 530 bp, Cannabis indica
cacttccattcaggtagggttaaaggctgtaacaaccctgctagtctctgatgttcagccttaatctgctgacacgttaggcatctcaatatgaactctaccaaattctttttcataccgctccaccagaagtatggtttaagatcctgatacatcttggtggtgtcgggatgtaaggaatatggggtagtatgagcctctacgaagatttcattcttgagttccatactatttggaacacaaaccctagctttaaacaatagcatcccgtggtctgacacagaaatatccctggcttgaccagctgaaacctcttctctgatttttactaactctggatcagtcatctgagcgactttaattctttctaacagatcagattgcagcgtcaagttgtgaagcctgcctacaacaaactcaatgctagatctgaccatgtcctatgctaactaaggtgaaatctgaatcatactagctacctacccgggacctttcctgctcagggcatcggccactacattggccttccc

SEQ ID NO: 335614 - DNA, 555 bp, Cannabis indica
tgtcgttgatgggaacggtgaccaccgatggtggtggcggtggtggccgacgaagtggtggtggtggtttttttgaagaaaaaaagagggtgattgatgggattgagaggattgagaggaatgagagggattgagttagagattgagagaatcagagaaggggggctgaaagaatttttttttctctgaaaatgaaaaaattttcatatgcaaatggggaagaagggggggggggccttcgtgcaactctggttcatatatacacttttaccggcgcatcaaaacgcgcatttcatgcgccggtaaaagtatccccacttgccacgtcaaaatccacgcgtttcatttacaacttttaccggcgcaatagtgcgccggtaaaagggtacaagcgccagaataaatgaaataaaaggcggcaaacttttcgcgcctgttggcgcttcatttcatcccttttaccggcgcatattcattattgcgccggcaaaaacatagtaataccggcgcaatattgcgccggcaaaaataaagcgaaaatgtaaatgggttttc

SEQ ID NO: 335615 - DNA, 763 bp, Cannabis indica
ttgttcggtcgtcgatggctgcttgctgagccttcaacatttccatatctttatccctccattcagcaaactgacgcgtttgctcttcaaacgtaaggttcactactgcgcggagctcttcttgatcatgatgcatagtattagtatgtccttgcataagcccaagagcattacggaggttctagatatcaatgtcattttttatggttgtctgggcatttgtcgctgaaggaatcccagtgctggggatatttagatcggctactgaacttgtgtttctagtctcttgcacaccagatataattccagccaaaggagacatcacaccttggcccacagttggtggttgcgtgtttggttgttcaggatttgtggctggtaggacccttccattcccaggagtttgcaaagcgggatctactgctggtggatctacctgatcgaccacgcctctgcgagtttgtaccaccatcatgtttatgattaaacttgaaatcaagagcaaatttacgatccacactctcaatgaaagcaccaaaatgttgacctcgcttttagtcaacgacaacgagtcttaattgtaagcgatgagtgatataacttagatataatatgaaaagataaataaagaacacaaagtttttgaagaggttcggccccgagcagttcggtaatagcctactccccttgatttgtattgacttaaaaaacaaagagtgcagtgattcctttcttacagcttttacaatgatatctctgagta

SEQ ID NO: 335616 - DNA, 740 bp, Cannabis indica
ttttaatctttttttatgctaatgtatgtacatataaaggtaaacactcattttgatatcttatgttttgctaaaatacatttttcattttttgaataataataaattagtaccttttgtagtttttacctaagtatggattttgacaaaaatattaggagtttttttatttttacagtttaaacaaatttttttcgtacttttatagaatttcacacataaactcatatagtaactaatagagtaatttaaatcgcaatcaaagttcgtatagcaactcacatataaattactggagaaaccatcggagcaacccaaaccgtaaattttcaaaaaaaaaaaaaaaatttaaaataacatataaagtaattttccaaaatattatattaattcaaacagttagcatgttttttatattttttttattccgtacctataactgtttgagcctaatttatggatattattataaattttttaaaatatactttatacatacttattttgtgccgtgtattttaaggaaatagaaccgcacttgtatactcaatcatcatatacatatgtactttgttatttaaaaaatcaatagaacaccctattattcatgggaatatgcctaataatagtacatgatccgatcatttaaactattttcaaattacagaggtgatttttattgaaaaccaatatatatatatatatatatatatgaaatattccctataaataattaaaat

SEQ ID NO: 335617 - DNA, 584 bp, Cannabis indica
tacatacttattttgtgccgtgtattttaaggaaatagaaccgcacttatatactcaatcatcatatacatatgtactttgttatttaaaaatcaatagaacaccctattattcatgggaatatgcctaataatagtacatgatccgatcatttaaactattttcaaattacagaggtgattttattgaaaaccatatatatatatatatatatatatatatgaaatattccctataaatattaaaaataaaataatacgataatatggcttatagtatgtataatttatattcactatttattttattaactttatgaatattgatattgatctagctgcaatttcatatataatattaggggtaggcatccgacctaattcaactttttttttccatcatctgatccaatccacttcagtaattggatttgaaaaaacattatccaatccaatctaattagacctcaaaattcaatccaggatcgattttttaattggatatccaatttcacacctaaatttcattattatcttaaaatatatataaaaaaaaatacgtaaaattaagtatcaccttttatt

SEQ ID NO: 335618 - DNA, 690 bp, Cannabis indica
aaaaaatataaaattgaaaattaatagtattattcgggttatttcgagttaagtcggtttaattgggcaggttactttattttcaacccgcccaatatacagattgggcgtttttttttcgtcgggttttcggtttttttttttgcagttttttttggtttggcttagtcgggttattcggtttaggcggtttacgaaaatatatgtacagccttaattgaggattagtttgccttttggaagccttctattatctgcaatgtgttaggatccaatctgtcattgcatattttggaaggttttacagaaagagtttggaagggaatgctagcttatggtatctttatcagacgcttttgctcacttgaagtgtaacgccctaaataattaggcacgctacccaaaatacttatggaatcttaatcccctaattcggtattactaattaaaatagcgcagaatttaaacttttaaattaaacgaagtgaaaataaaacttgtaatatatttaaacttttaaacggttgggatcccgaaaatattaataaactttattacaagtcatttttatttctagccgacctaagcggaaaatcagaattcaaaagttcaacactgatagacccttaacccgcttggtctgatatggcttgaacatgtacatcttcgccctgctcctgaaactcatgg

SEQ ID NO: 335619 - DNA, 1426 bp, Cannabis indica
ctttttaattttcctttctcgtctgacaggtttaaataaaaaagttatggtagtttgatccctttctcatcagaaaggtttgataaaaactttaaaatttaaaagttatgggtttgcattatataatgtatttctagaggaatcccagttaatcatacacaaatgtcccttaagtaattttaaagagtaaagctttgcaattacttaaataacagaaatgattctctttttattcataactgaagttaaaatattacatcagcaatgtgagttacatcatttatttattggtagtagggtcgcaaatgttccatgttctattagttcttcattagcaagccatttagccgagctaatttgtaaactccaattccaactattgctttgattacatatggaccctcctagttcaagttgaaaactcctgtagatgcatctctcgtgtttgtaaatactcgccttagcaccaagtctccaacattgaatagtcttttcttgactcttttgttgaagtatcttgtaactcggtgttgatatgctgcattagtgatttgcgactcagtttgtttttcatcaagcaaatccaaggataattttagaagttcttggttttcttcttgattataaaactcttgtctgtgagtcgatatgtttagtttaacaggtagcattacttccgagccgaatgctagcaagaaaggagtgtgtcccgttgccatcttctcggtacctttgtgagcctagagtacttgaggtagctcatcgacccacctgcctttggcaacgtctaacttcttcttgatagtatccttcaaggttttattaacagcttctacttgtccatttacctgaggcctggatactgatgagaagctcttacttattttgttcctctcgcagaactcaatgaacaagtcaccatcaaactgggttccgttatcagatactatcttcatgggaattccaaacctacagacaatgttcttgacgacaaagtcaaggactttcttgcagattatggaaacaagaggctcgacctcagtctatttagtgaagaagtcaactgctactaccgcgtacttggctcctcctcgcctagcgggtaatgccccaattagatcaattccccatatagcaaatgggtaaggcgaggtcatcatccttagtttcgttggcggcacgcgaggtatatgtgaaaacctttaacacttatcacattttttgacaaactcatgggtgtccttattgatcgttggccagtaatatccttgcctaatgatcttttagataggctttgccaacctgcatgatccccacaaaagccttcatgaatttctctgatgatatcgtttgctgctgtagggagaacacaccgaagtagaggcatcgaataacctcttctgtatagtttgccttcaattattgt

SEQ ID NO: 335620 - DNA, 1010 bp, Cannabis indica
ttggatagtatgggaaaaattaagcaatttatttttttacagaactaaattttgattttatttgaattagttatgattttttgaaaatttgaaaaaaatcttaaatcgggtggaccttccatgacactattgagtgggctttcattaaagaaatgtcaacaggtttacagtttccaacttctttcattgagctcattatgaattgtattaagactcctaaattctctcttatgttcaatggaactttacatggtttttttgaatccaagaaaggtcttaggcagggggatccaatgtctcctctattgattgttctaggcatggaatatttgtctagattaatgaggaagataggtgagaacgaagattttcaatttccaaataaatgcttagatctcaagctaaatcatttagcttttgctgatgatgttcttcttttttgcaaaggggaagtgaggatataaacctgatcttgcatctatcaggtttacaagacaggacattccttttacctacattgggatcccaatttgttcaaagaaaatatcttggaaggaatgtgaactcttggcagaaaagatgactgctagaattaaaagttggagctcgtggaatttgtcctttgtagggagaatcactctaatcaattctgtgcttatttctatccaagcttattggagccaaatgatgattatgccaaggaaggtactaaaaagtatagagtcaatataatatgtagagtatttctttggaaaggccaagcagtttttcaaggggctggagcagttgcatgggaagatgtgtgtcaaccaaaaataactgggggattagacattaaaaagctggaagagtggaacaaggcagccatgtttaagtacatttaggccattgcaaataaacaagaaagtttatggataagatgtgtccatagtgtgtacattaagagagatgattggtggagttactcggcttctatccacaccagttggtattggaagaggctggtagct

SEQ ID NO: 335621 - DNA, 639 bp, Cannabis indica
cactcaaaccggccaaatattttgtttttggctaaagtcagttggcacgattctcgcagcgagtttagccagacggtcaaactttgtcgtatactcagtaacagacattccctcggtttgaaccagttcggtgaactctttccgctttgcactgcgaacagcttcattgtaatacttggagttaaacaactccttaaactctgcccaggtcataaccgtgacgtcccgtgtgagggttatcaactcccaccacacgagagcgtcctcctgaaactagaaagtggcgcaggcactcgatcattaccaaccactcccataaaattaaggatacgcttaatcactgtgagccactgctcagccttcattacatcgggaccccctagaaacactggaggtgcctgcttctggaacctttcatacaacggctccatacggttaccaacaataggttgttctactggcaccgctggaactgctacggcctaagtaacttgttgaggaggcatggcaggaggaccctgctgcctcaatctctgaatctcttcatcctgttgatgaatctgatcttgcatttccgcaaatctttgctcccaatccggaggagcttgtggtggatttacaaggcgaccaccctgagct

SEQ ID NO: 335622 - DNA, 709 bp, Cannabis indica
ttttttttttaaaaaatgtgttctaatatctgattaatttgttatggtatattatcatttattttttttcaatttgataagctaagccttgattgctattatttttttctatgaggcacttcatgtcccatctacagtttctctagttcttttgaggaagctctaactaggtgaattttttaggatctgttgaaccttaatttttcccagctaaaaaggttacctctttaagatgtaatgggaagagctctctttagtccatttactaatagtatgctccctctatattagtagttctcattataagaggacggctacatctctgagggagagtgaaagttgtagctgattgaaaaagaaagagccggagtgactaaagatagaaaagccagcaaaaagaaaaatgggcaaattaataaaaaaaaaaaattatgagagagtgagccaatgttctcacatgaggtcactagcacacacataagaaaaatcttggttcaaaatcatgttaaaaattccttatttattattgtctttctcaaagtgtgtgtgaatatgtggattgcatgaagttgtcttatctttttattaagtatggctcattgtgaagctgaatgaattagttctttgctcaaatgaccattgctcacttgttaattaattaggccaaacattttttttttctctttacatgttgaacatgttaattctt

SEQ ID NO: 335623 - DNA, 765 bp, Cannabis indica
tcacaacagaaggactggctgcagcatgagcttgggtgatagcaaacacccgagcaggtacgggttttgcctctaacttcgtctcttctttctttgcctgagggcaatctttcttgaaatgcttcaccatgccacacagaaagcatgtcttctggttgcactctcccggatgatgtttcttacaatgtgggcactcagggtaagagtaaccctggcgtccacctctgccttggtttccacgaaatcgcttactttgccttgagccaccagatgcctcgataactttcctcttcttatcagtggtggaatcaccaccatccctaccataaacaggagtaggaagggtgggggtcctaccaacactcggagtcactcggggctcctgaaggaactttatcgcgcccgcggctctcacggctttctcaactgttttcgcataagttgttgcttcgttggttgtgatcaccaaatcatgcctaatcttcacattcaaaccagccaggtacttttctttcttactaaaatctgttggcacaatacccacgtcgagtttggccaaacaaccgaacttagtggtgtactaagtaactgacattctctcagtctgcactaactcagtgaattccttccgcttagcactgcggaaagcttcattataatatttgaaattaaacagctctcggaactcttcccaggtcaaaactgttgggttttgtgccctaaataaaacccatttcaatataataagatttactaattagtaaa

SEQ ID NO: 335624 - DNA, 966 bp, Cannabis indica
agatcctggtaaaataatatccaacacaaagtccatgacacaggctcgcaataaatcttcgagtatctggattgttctttctaattgaccatcagtcagagggtgaaaggttgtgctaaactttaacttggtacccatagcaatctgaagactcaaaacttcaatgtaaactttggatctctgtctgaaacaatggatttaggagctccatggagaggactttacatacagttcagcgtactgatccattgagtatgtaactttcactggcagaaagtgagctaattttgtaaatctatccactatgacctatactgaatcatacattcccgtggttctaggcaaactagtaacaaaatccatcgcaatgtcctcccacttccactcagtaaggagtaaaggttgcaataaccctgctagcctttgatgttcagccttgatttgctggcaggttaagcatttggacacgtagtccaccacatctcttttcatcccataccaccagaagtagggttttaaatcctgatacatcttggtggttcccggatgcagtgaataaggtgtggtgtgagcttcatcaagtatctctttcttaagctcatcaacactaggaacacacactcgagctttatacaacaacattccattatttaagactgaaaagtccttaagccgaccagccattacctcatctcgaatcttgactagttagagatcttctaattgtgccttcctgattctttctaatagatcaaattgaagtgtcaagttgtgcaactttccaactacaaactcaatccctgcattaaccatctcagaagctagttgaggagctataaaaactgtggtgcaaacttgcccgagacctcttctacttagtgcatcagccacaacattggctttctcgaggtgatatagaatctcgcaattgtaatccttaactagttccagccacctcctctgcct

SEQ ID NO: 335625 - DNA, 741 bp, Cannabis indica
ttttggtatttgaaattcctccaaaagttaagaatttgctttggagggctctcaccaattgtcttccaactctagtctctcttcaaactaagcgggttcatgtttacagtatttgctctttgtgtaattttgaacctgaaaccacttttcatattatggctggtttttacaaaagcttgtttggagggaggtttgggtctgcattttaatattggagatgaggattttggtggctggtttgaggatttctgtaacactcatttggctgataatattgagaagctgtcaatgattctttggagtgtttggggggcccgtaatgatttactttggaataataaggctacttgtgtggaaaaagttgtttcatcagcaattacgtaccttgaactttagaagtttgctcaaaacaacaatggaggagtttcatcttcttctggtcagcctcatgctggtgttgagcattggtttaaaccgtctttgggagagttgaaggttaattgtgatgctgctcttttctctagagagaggagtcatgggttggggtggattgctagagatcatgccggtttgtgttttgctgctgctgcagtcaaacttcgaggtgaaattgaccctgttgttgctgaggcgttgtcaatgaaagagactttgagttgggttaaatcatgctgggaagaaggcagggctgctgaggatttttgtcctacagcggtgattatggagtcggattgtctcttg

SEQ ID NO: 335626 - DNA, 736 bp, Cannabis indica
aaaatttcctggcttcaaagtcgctgaagtgcctttcatacaactgctggttggatagatgttgctcgaacctagacactcgaatcttgagaagtttctgattcctttatgcttatctttgcatgtatacatttcgaatgcaactttcactgtgttgtagaaaatgcttaggaaaccctagggttagaaacttctgcgattcttcttcatcatgtcttcatgtgggtatacaacaataaatctcgtttctgaactgcattgcatccgcatttcatcttgcttattctaagcttcatgaacttttttgccctaactgaagaaaattttctgacttcttgaattctgacttttctttagacatagaagtcctttaatctgttgagtactcctggttggcatatttgcttatttatcgttcgatattccgaccaacactcatctcgtgtgttgtcttttgtagatgaactcaggtgagtcttgggaattcggacatcagattcaccaggatttgcttcaacttctgcacgaggatcaccctcgtcttcgttctagccctccttctagtgaaggaaattcttctgaacttggacccagccataggatgatggctcgtacaaagaaaactacacgtctggctgacgctaatgatcctcaagttgctcagcttgccactctacccagcgccgaataggattcggtcgtcccgatggaggaggatcgtgagggggacgttgag

SEQ ID NO: 335627 - DNA, 1410 bp, Cannabis indica
agggagccatttcacctgcttggccatctcctcccatgttcggtaaagggaaagctgttatgtctgaagtgagagcaatgtctggtgatgatggactttcgagtcttgtttgggaagtcaccttgcatactactttgtcttgtttttgagcttcttgactattatgccttatgtttctgatgtctgttttttctaaccatgttgtttttcattctgtatagacatgtttcggcaaattcttgacactttgaagaagagaataggcggaagctctagcgcctctcctctggccaagaagtctaaaggcggtgaagggtcctgttctaaggaaaagaggcatgttggggaggttattgatctttctaaggagctgactactgcaaacccctctaccccaaaagttgccaagtccaaggagtcttcgggaggaagcttggtcagaagtgaacccgaataggtgcgggcacccactcaacctttgccggtgcttccagaggccaagaagggcaatgagatgctggcccactacatgaaccggctggttcctgaggtcagtgagcaactagctggtgctgacaatgactcttctttggagctgctggtgggcggtgttttgaaggaattcaccatggtaagtcttccttgatattcttctttaagtctctttactttgctcaaatactcaagttttttctttgagcaggcgcgtctgaagctggcctacacctactctcgagctacgtctgcttcttccaagaacgcaactttgtccaacaccatgaggacggaggtggacttggctaggaagaatgttgaagacgccagggtgaaactcagagctattcggttggagttgggtgaagccaacaaaaaacttgtcactacccagaagaagataactgagctgactaaggatctcgagctttctgaccgtcttgaagagaccatcgacaccttatctgctgaagtgaacagtcttcaggatgagaggacttctctttgagcagttcttcattggttgaaggaggagaaggaagctaaggaggaggagcttacggccgaggtgacgaagctgaaagagaaggtcaatgccattgagacaaccggtcttgagctcttctttattttttggaaggctaatcctcaggccaactttgactacttgggtgatgctaaggacatgtatatcgagttctgctcttcccaagttgcctatggtgaaacagaagcggctgcttctacctccggccagactgctgatgtacctcccgttcaaacaacagatcctccatctcctagtggcctagaagacccgaaccaagagcttgggactccagctgctcaaacagttcttcttttatctttttatttttatgtatcttattcagcctcaggaccttttctaagaca

SEQ ID NO: 335628 - DNA, 509 bp, Cannabis indica
tttgtaaatttttatatttttataagtgacataaattaaatgattattttttagtagcataagtacctaatatttgtaataaaactgtaattttcgttcagatttgtcagtacatactctgttagtgtcatactgaaagattcttgttttaaatgggcataagcaacacactcaaagatccttaagtgatcatttaagtgatcatacagagcatgatttcatgtccaagctttaatggggcttttgaattttatggctgatgaagggcttctgttgatcaagtagcaggtgctacaactgcttctacccaaaaacttttaggcgaccctaagtacaataacatacatcttaccctttctagcactgtcatgttcattctttctgccaagccattctgctgtggggttttggtacagttaaatgtgtccctatacccatgtgattagtggttaaaaatacacttttatttattttaaatgataaaataaattgagttttaattgatattt

SEQ ID NO: 335629 - DNA, 1387 bp, Cannabis indica
ttttatttgtccaataattaattaatactattttattgatttaacattcttaaaacgtaaatttgttttaataatgtacatagcttaagattatttaacaccgcggtttttgtttcctagttttttataaaactaggtaacgtaaccgcgcgttgcgcggtcctttcaataattgaccaaaaaatatataattttgttaatgtaattaattttgtataattttaaagtaaaaaatttatatcataaatagcaagacagaatataaattataatcttctattatttgacaattttttttttaaataaagctttgttttcatttttaaatgcaattaaagattaatttaaattttaaagttttgacaaaatattaattaattcaagaatcttccttgcattcattcaaaaatgtacaattaattaagcaatactaagttaattatattttgcggcataaacctctaattgtttagattgatgccgatagtctaatagatacccttaaataaaaattacgacataagaagcactcagtttttgaaactatattagtattgtttctaattgatatgccaattcattctaaaaattaatcccatgtgatgatgctttagtgttcaaaccatgaatttagacttcgatgatagaatccaatccaatatcaaccaatgggtccctctgatttcatcagataattgttatagaaggctctcgtcatcgatgatgaaaaccaaccccagaaacacaaagacctcccaccagcctcttgatgacaaacctcgtttcgcgtaacatatatatgatattattttgttttttggtttgggttgcgatgttttttcagttctgctagctctggcgataactattaatattgaaaatggtttttcaatgtgatggggtgctatttgaaaaagttatagttttattgtttaaattcttagggacagttttgtcccatgtggatcgtaataagaattctgtagctcatggtttgacaaaacatgtcattcggttagacgatgagctatcctggttcaagaagattccaccgtcgattgtgatttgttactttattaatcatgtgtgactctgttcaccacgtcaaaataaataaataaatatataataaatctataaatcagttttcagctttctatttattcttttaatataaattaagatgacaaaagtattattttacattaaaaattaatagaaaaattatttaacaatcattttaatacactaaggcacattaatattatattagtttattaacaattaattaatacataggaatgttacatgttaaaatttaaggtaaataccattttggaccctgtgttttacaaaagttacagattggaccctgtgttttgttaaa

SEQ ID NO: 335630 - DNA, 871 bp, Cannabis indica
caatgataagtttgtggtggtactactatgcatcaaaccaagggctgggatgcgtgctgatgcaaaatgacaaagtagtagcgtatgcctcaagacaacttaagcagtctgaacaaaggtacccaacacatgatctggagttggcagtagtagtttttgcgctaaaaatatggaggcactatctctacggggagaaatgtgaaatttatactgaacacagaagcctgaagtaattctttacgcaaaaggaactcaacatgaagcagaggcgatggctagagcttgttaaggactatgattgtgaaatctactaccatccggggaaggccaacgtagtagcagacgcgctaagtagacgcagttatgccagcttggtaatactagcttaaatagaaatgctactacaacaagaactccaaagaattcgtatagagatcattactcaaaaactagctaacctaaccattgtctcaacactgctacaaatgatgcatagattgttgataagttcttacagaagaaaagagcgagcttgccaaagaaggaggcaacgaatttctccgaaggtaccgacgtcatgctaaggtataagagaagagtgtgcgtagccgatgacatagagcttaaaagaaagatcatgatggaagcacacactacaccctacttaatgcatccagggtcaaccaaaatgtacaatgacttaaaaaccttgtattggtggccagggatgaagaaggatgtgactgaattcgtagctagatgtctcacatgtcaacaagttaaggttaaacatcagagaccagcagggatgttacaacccttggaaatcccaaaatggatgtgggaagatatagccatggattttgtgaca

SEQ ID NO: 335631 - DNA, 568 bp, Cannabis indica
tattttataattttgacaattaaaaataaatatccggatgtaatatatcaatgtttaagaaagcttcataattctttcttttgtgaaaaaaaaattagataaatatttatatatatataatatatatagaatcttatatatgaatatggataaaaaaaaatacatatacacacaataatagcacttaattagagatgctcttagagagaaattgtaatctctatattgtgcaattattttatttgagattttcattttcatatctttagttgtcgttaagtgcttaagtactaaaacattcctaatatcaatacaaaataaaaaaataatttatttttattaaaaaagaaagatatacatatcaaataagtcaattagaggtgtttgttataaaaaaaaatgaatgcttatcgcaaaattagctaaataaagtcatactcaattatttacaataattaatatagaagaaagtaaatttaaagtctaataaaaagtaaactaagaaaaaacaaaagaatcacaaactaagtacacgtgcaaatggacgtatattagttttatgttaagt

SEQ ID NO: 335632 - DNA, 658 bp, Cannabis indica
aactaacaaagataattggagatttataattatataaaaattttgaaaaaacagagttaatattttacacacactttacaacttccatttatggctttgatttatgggaaccacaatacaaaagattttattgaggacatgctttcggagacttaccttccttaagaacctatccttaagaggtaatttaaggtctcttgcctcatctcagttcagagttccagctgccacaacacaatttcttcatctttagctacacaaattaattgcctcatctttagtggctgcaagaagaaccacgaactatcagaaacattgcctccccctgacttagcgggcttcgatgacggtggaggagccatttccttctccagcgcctgaaattgcaaatcaaaaacaaacaaaaaaatgaaatcataaacgctgaagagagggaaacacgagtgagagagagagagaagttccaaaaggcatacctttatttttacgggcgtcgagcttgattttgtggtcagattcgaccaccattactgagatttggtcagattcggggtgttgggttctcggactggaggaaggtgggtcgccggggttcttggactggaagaaggtgacggttggggttctcggactggaggggctttggggttcgaactgg

SEQ ID NO: 335633 - DNA, 490 bp, Cannabis indica
tgaccaaggtagaatgtgtggcaagatgccaacaccaagtcaacgtgccaacgcttctatcatgccccattcgatactgtctgaacaatctccctcatcacccaaggactgtcatacgtccacggaccaatcctcaaggcaccatgctccacgcatattggcaggtcctcgagacaagccaccaaactatttgcatcatcagacctctgtcgctctccagcatggtgcatccgtcccatgcgcatatgcaaaatagcccacaaaggactacccgtgtcatctcgtgttgagactcgtggccaagatgcactacaacgtctctcggaggtttggtccacatcccgtgtaagcggcataccgacaagctaatggaaacgtactcgctaacctcaggcggcattcttagatgcgctacaaggtcagcccgatagtgtccatgagtattccaactcatgaagacatatgagtctcctcgtggtcctcatatgcc

SEQ ID NO: 335634 - DNA, 1637 bp, Cannabis indica
cccggtccagatctgggtctgggtcctagtcagattccggttcctagactcaaacctagacttggactcggacccaggtctggggtacaggtcttagtgtgggtcagggtctttgtcccagtccgggtttgggtttgagtttgggtatgggtcccatatccaaacactgactacgggttaggtccaagccccaggtccagatttgggtcacggtctcgggtccctatatagttccacttcaggtcccaggtctcggttcgggtcctaggtcagggtccaagtctggggtcgggtcgtcggtctcaatcctagttctcatgcctgtgtcccaggtccaagtcccccatccaagtccgagtcctaggtctcaatctgagtcctaggtcgtcggtctcaatcctagttctcatgcgtgtgtcggggctcaagtcttggtctgagttcgggttcggtatccgatcttgttttgggtccaaatctgggtttgagtctaggtccaggtttgggtccgagtctcgagttttgagttccgatctgggtctgggttctgaggcacatgtctaagtccccaatccaggtctgggtcctaggtcccgattttgggtaccatgtctaagtttgggttctgatcacggtcctagtcttgttcgagtatcctcatctggaagttcttgttcaggttccaatttcaagtctcgcgtctgggttagggtccgagttttggtcctagtttgggttagggtcctggtttgagtcctagatctagatccctatcacgtgtctcggtccggttctggttctggttcaggtcttgggtaccatgtctaagtttgggttcgggaccgtgactagggtgcacttctaggtctcggccccaattctgtgtcccgagtctggttccatgtttgggtctgattttgggtcaaggttcggcaccgagtctaggtcttgattaggattcaggtccgggtcccagttcggatctaggtctgggtgggaaactgggtcctggtccggttacagtttcgggtctaggtcgaggtccaagttctggttccggtccagttctcgagtctcgatctacttccgatttttgttccattttcaggtcacagggtatggctttcgatcaaggtttgggtttgggaatgagttcaggtccgggtccgggtttgcatcttggtctgggttcgggtttggggctgggtctaagatccagacaccgactatggattcggtccaagccccgggtcctgatccggaccctgatctcgcgtgctggtctggttccatttttggtgtcgggtcacgagctgagtcctaggttgaagtcccggtttggggtcaagtcttgggtcccagtcctagttacgttgcccaggtcccaatctcgattctggttccaagtcccgattctagtctaggtttgtgtcccagtgtaagttcggatttggatcctagttgcggttcgagtttggatctcggtcttgttttttatttgggtttgggttagagtttgggtcctggtccttgtcttggtcgtagtcctagttcggttcagttctagttgaaattccgagtttgagtttgggttcgagtttgggtcggggtttgagttggggtgagggttcgagtcc

SEQ ID NO: 335635 - DNA, 970 bp, Cannabis indica
agctttacaatattaaatatcatatacgttataaagtaatgtttaattggaacttttttttagacatttgactaagtacttggcaattaacatgtgcatgtatgacacttatattttttttccctaagaatgaatcaccttttttttattcttttcttctttccataacttttttttattgaattaatgacacgtttattatataattaaaataaattaataaaaaatgtaacgaaataaatgagtattgctatttaaatattaaaaattatggtcactatatttactaataaaaatcaaatcaatggtgagataatcattaatttcctagcattttttactttaatttattaaaattaagaaatagagaacttgattaaaagaaagggaatactttctcccaccaatattctaatgaatgccgttagagataatgtcttctaattaattttatttatttattaaaaattaaatatataataacaattttatcctttaatatatgtcttacaaaataaatatcatatgttatagtgttatactcatatttcgagcagcaatataatgctaacacatgtaatatagctggaatatgaatcatctcgaattatggaataataaatacattagtcctaactaataagcactccacgataagtggacatatataaacccacacatgtgggtctcaacatcaatgcacaaccaaaaagtatataagaacaatagaatttaactttgttcacgacagaccttacttaccaaccaacttgagcaagagatttaactctaatcgaggatgagtttgagaaagggatataactctactcaacgctcaaaacttaagcaagagatttaaaattcaagaaaaagatataactctactcaaaattaaaaaatacaggcaaaaagttttaaccttacaaaagtcccaaaatcgagcaggagacataactctactcgactacca

SEQ ID NO: 335636 - DNA, 634 bp, Cannabis indica
ctcagaatcgcaaatggaactagaaccgaactagatctaagacaaggaccaagacctaaacccaaacctgaacccagatcaaaacccagacagagacctaaacctgaactgagactaggactcgaacccgaacctagaccgggacccaaatccacacaataaccgagacctggacccacagtcaggatagggacctgggaaacagaactaggaccgggacctagtatacgacccagacccgaacttgaacctaggacccagctcatgacccgggacaagaaatggattcagactcggaccagagattgggatccggatctggacccagggcttggacaaaacccgtcgtcggtgtctggctttgggacccagccctggatccaaaccctgacaaggaccctaacccacacccgtacctaaacccagtcccaaacgcaaaagtggacccgaaaccgtaccctatgacccaaaattggaaccaaaacaggaagttcaccaggactggaactaggacttggacttagaatcgtaactgaaattggacctatatttagaaccgtaacgggagcaggacttggactccaaattagacctagacccgaattgggagacggacccggatccccacccaaac

SEQ ID NO: 335637 - DNA, 505 bp, Cannabis indica
aagacattccattcctagtcttctacaatggacaattcgatgatcgaatgaattatgaaaattatgaagccagtggacattacatttcagccaattgtaactatgaagatttgcaacagaaactcaaagatgtcctggagtgcaaccaagaaaacactgttttgcaactgaaatatcaagtgaaggaaggataccaaccattgaggataaaggatgatcaaagcctgcatttctacatacaactcaaactgaaggaccccgacttcacaacatacccattgtgtgtgaatgtcatccacaacccaacaacaaccatcaatgcatcattcttgggaaatgacaattcattaattacacatacaagcgccttccaaccgatcgaatacaatgcagcaacaacagaagactcaacaaatcaacaacatacaattgaagctacagtaccggaatttgggggagaaaattttgacttcatggactatgcaaaacttgtggcagaggagat

SEQ ID NO: 335638 - DNA, 744 bp, Cannabis indica
catttctttttattttgccaatttttgaattcaatattgtttctttgtcgtttgttttttgatataggccttacaatgtttacgaggatggtgcgaaaaaaatttccccggggttcagattaggtgtagaatatgttgaagataaaacctggttttatcatttgtcttgctgtgacatgtttatcaatgactcggtaatattttttttccttttaaaattttttatagttgttttatcattgattttaagtttagttactgttattaagtttttgtaatatttgttcacttttttttgtgtttctttattgtgttgtttcagcatatgaacactatcttctattatctttgaaaaaagggaaatattcttctgctgtaacagtgaatttcgcaacaactgactgccttttcgatgattccattcaatccttataccaccaattctacaaatccaaggcaatgaaaacaaagatgtctcacatccatgctgctcacccaatagcgcattatataataggctttcaaattccttgttctaaggcttggtatgaagccgatcatgtcctattcatcataaatcttaagaaagaaagccattgggtttttggccatcttgatttgaatgaggggattatatttccttataattcttcgaggactgccaaaatgaattctgcagtaaataatgcaatgaaggcttattctgttttgctccctttgtttttgatctccttggattttgga

SEQ ID NO: 335639 - DNA, 1022 bp, Cannabis indica
tatggggacactggtgttgtatgggacactgtaagccaaatggttgagaaagcatatactgataggagatagttgattgggatgacttcaagtcttaagagtaagactgggtgttatcaagtttgtcaaaaattagcgagtcatcaaaggatgcagggttgattttgggagatggacttgtgacacagttttgagagctgacacaagcaggagccagagggcaaattagctcagaggagcaagtatgtagtgggtcaatggggccttttgcatgaagctgtgggtgtgtggtagggccagagggccaatgttgagaacttcgagaagagattttgtgcaagagtgcacttggtgctgcagtgggtgcagttggcttgcatgggacgcaccaaattttatcctgcgatcagagtgtcttgctcgatcgccatcaggaggatggtgcgccatggggttggcgtgtgaagtttccggagggacttgtctagaggcacttggcttcagtggaagcttgttctgtaggtgctgttggaaacggctggtttgcgaacctcaccccgaggggtgcaccacacttagtccttgtcaaaaggagtatgcattggacgatgggcgagcaagctactatcagaggatgtgttagcttcatggtcagtgttgcattggctacttggttgactggagggacgttgtgatggactcagaagagttcatgttgggggaagtattctagtgcggaggcactactccatgggtggttctgaatagcgacagtggcacagggtctttgatcaagtccaagagtgggcgagcgagatcgtcaccaagagggtggttctattgaggtagagagacaagtgcagacttacgattcaggagaagcttggagtaagcttaggagtcgagataaagaagattggcctacgctccgtcgatgagggcatcgacatgtcgaagtgggggagagtgtaacgtgcgtgctaagatggtatgttacaagctaagtgatgcccacaagttgg

SEQ ID NO: 335640 - DNA, 739 bp, Cannabis indica
tctatctcatctttcaataggcgtcattcattggtcgtgtgcccaatatccttatggaatttacaatacctgttaggatctctttttctcctcactttcctcatgggctcaggcttgccgaaggcaaccttttgctcatgtgcgaggtaaatattctcccaagtttcattaagctcattataaatagtatacactggcacatacttatcgtgcttcttctatttttttttatcctttgacagttccttagaaccgtcctttctcttcgaaccagaagccccgagttatcatttctcgtggaaacaatacttgttgaaacgttgctgggtttgcttctcgagcttgttttcaaaaaattcatttcctttcgggctttttttttccgaacaaatactcgagccttttggttgaactcagtgatgtttcttactcaatgaccatgtaagtcgtcccacagctcgccccttacggttgatggatcagtagagatccccgcctgaagggctgtaagttgtgtactgtcatccaaattcctaaccctagctgcagccatgctaaaacgacttaagtatgccttaagtgtctcaccaggctaatgctttatatcggttagttaggcctttttgggtcgtctatccctagcatcttggaacagtttcttgaaatccctggacagctgctcccaagaaattattgatgttgggttttgtgccctaaataaaatccattacaatctgat

SEQ ID NO: 335641 - DNA, 554 bp, Cannabis indica
caaagattgcacaataattgaaaaagcactgtagcgtattagggcgttacaaccagtgtgggttttggcttcatttggcgcaagtggcagggggagattatgcttgctggtatagtgtatctcccgagcaactgctccatcgaaatggctgaagcatgggcgatccttgaagcgctcaagaggacaccaatcacagcagctgctgccatagaaatccagtcggattgcaagaaagtggtgactgcgttacagaaccaagacaactattttagtgctgtgagcactattttgcatcagatcaaggctaggatggaagacttacagggctctaaaattgttcatgtacatagagaaaacaatgaaagtgccaatatgttggctaagagatatttagtagttaaaacttctccattttttgctcatagttttcctagctggttagccaatttttgtaaggctgacttgcccaacttgatgtaatcttggttctttgttaataataagatttcccttcaaaaaaaaaaataattagcctaatacaaatatttaaataa

SEQ ID NO: 335642 - DNA, 748 bp, Cannabis indica
ttggtcatttgacctttattttccatgtttaataaaattgatattttgagataatgaaaagagaaaatctgggttttctctctctccctcacccgaactctttctccctctctagcctcttgaaagtttcaagttcttatggtgaatttgcttgagtttcgcttgaaaattgaagtggaatattggggaaattattgtgcttaaccttgcaagaatttgaggattaccggcacctggtcaggagcacccgagaatttggaatctctgcctttccaggacaacaggtaagacagtggttagcacgtagtatgcgcggtggcgcttatgttgaaaatgatatatgtgagtaaatggtaatcaggattatggttaataccctaacatgagcggttaatagcctagggttattaccctagtgatatgagttatataaatgctatgccatgctatgtgtatgaatatattgagatttaaggattatgtgttcaaggcataatcaggttggactcggtaactagaaccgagaggaaccattctaagaccttattgtaaatagatgtgtgagagcaacacgtaggtttatgccacgtaaacataaataaacatgtgagcgcagcatgcaggtctgtgtcacacagacagatttgaatgacattgttgtttatattatatgatgagcatattattggtatgttttatactatcttgctgggcttggctcacgggtgctctactgtgcaggaaaggg

SEQ ID NO: 335643 - DNA, 874 bp, Cannabis indica
agaaaccaaaaccgtaaatttagaaaaaaaaattaaaaaaaatagtatatggggtaattcccctaaaaattaatccttaaccttcttgagatttatttagaaaaaattgattcgggtaattccataaatatgggaaaaatgaagttgtttagataaatatagtaagaaaatttaataaaaaatataatggtatttaaaataaaaacttaatatatatggaattgtataaatgatattaaaatttccttcatatttttttttttcaaaaaaaataaaaaaaatgaaactacagtgattgccgaagttgtcaccggagccggaaaaggcatcaaagtttactgccagagccgaaaaagtcgtcggagttgctgctggcaccggaaatgtcaccagaattggcattatcattagaaaaatgaagaaaccagtttcttggtgatttttcgagtaatttttccggcgataatgccaattccgatgacttttctaaagtttgctgttggtgccgaaaatattgccgaagtagttgccagtatcagaaaagtcgttagaattggcattgtacaccataaaaagacttaaaaaaaaatactatataaattagtcaaacttaaaagtaccatatttaacataagaacttttaaaatcacagtgtaattgtaatttctttttaataaaaatcccatatcaaccttagctcgcgataaatataccaagcttaggttgaggagctagtgtaacaaccaacaccaaacaaccaacattcaaactaacaataaagcttattaccttctcatacaaccctctcttctaagcaaaaccattcccatatactaaaccaacaactactcatcaacatcactatttcaattac

SEQ ID NO: 335644 - DNA, 644 bp, Cannabis indica
tttgctgtcggtaccgaaaaagttgctagagtagctgacagtgtcggaaaattcgtcggagttgctgctgatgccataatagtcgtcaaaattggcattgtcataggaaaaatcacaaagaaattggtttcttcatcaagaaactgattttttcatcaataaaccagtttcttggtaattttttcgacaactatgcctattccgacgacttttctaaagtttgctgttggtgccggaaaagttgccgaagtagctgccagtgttagaaaagtcgttagaattggcattgacaccgaaaaaatcaccaagaaagtagtttctttgtattttttcagtgatttttcggcgacaatgccaattccgacaaatttttcaccgtcggtagcaactctgacgacttttcttgcagcgatagctactctaataatttttctggtaccgacagcaaactctggtaacttttctagcaccagtgacaaataaaactacctaaacaaataaaaatattaaatatgaaatttgacaatttaatttacatatatatgatatataaaataccataaaaagacctaaaaaaatactatataaattagtcaaacttaaaagtgccatatttaacagaagaacttttaaaatcccatagt

SEQ ID NO: 335645 - DNA, 767 bp, Cannabis indica
gcccacaaatgaaataaataaaaaatttaacatacttcgaagtctaaaacagtaagacttttgttttgctggtatttatttttgtcagtaaacaatatgaagtgtggataaatatctccatacaattaagttggttatcctcacaaacctacttgtccaacgtctctcatacaatgtaacaatcgtacgagcgtatgaaactaattagtgaactgcaaggatcgtgctacaaaatttattagtggacagggaagagaggcagtagttctagactagtactctgttttgattacaggcataactaatgataggacaagttaaaattatgattttttaggtgccaattcaattgactaacaccaaaacttctaacatgagagagtaattttatgagtcaaatgaggcatacaaatttgggactcagttttaaagggacgccacagacccttttacttgtagagtaggagctcattttgagttgtggttctcaataaaaacatcaaaatattagtgtaaaaatctaaacacagattcttgagtcatacccgctcgctagattagcgagaatgaattataagttaagtatatttatgagagacacaaagaatttatagcagttcactcactgttacgggtgtttataaaataactaatccaatccaatccacacgatccaattcaatccaattcgcaaaatgcgtatatccacacttgtgtggatttgattggattggaaaatcaaaaattcgtacttgtgcgaattggat

SEQ ID NO: 335646 - DNA, 873 bp, Cannabis indica
gcagagagacagctgaagttctcgggagccttcctgtacaagatcgcgactagaggttattgtgtacgactgctaaactgcgagaacactaactgatccctgagaacgcaagtctctggagagagccggtgcataaggaaccttctgaaaaacaacaagagaaaattgataagagtctttccaagcaaactcctcgaccatcatcaggtagtttatcacatacataaactagggcgttagaatttcatccttattaatattaacacttattttttgctgtaactacagaaatgactttcttgaagtccgctcctgctcttaaccgcaagctgaagcctgggacaatagtaacttcccctatcgcttctcaaaagaggaaaagcgatgtggtggttactcctgtcgcagattcttccaagaggcctgctaagggtattcaagagaaagggaagaaagtcgtgatcgacccagcagttcgagctcgccatgtgctgtaccttcaggagagatttgtcagcgatgagttccagtcgaagattgacaagactcctactaaggagctgctgcctcgctccgcggagctagcttcacagtttatggccatgttctcgaaggcttttgctaccgggtccaaggaggttgaactcgcgaagaaacatattactcagcttcaagaagacaataagaagctgaagcaagatgcgtcttctaaggacaaggagctcgaggaacttcgcaaggccaaggagcaagtcgagctcgaggccaagaatgctcagacgaagatcgaagagatgtctcacgacttggaaactgagaaggagaatggaaaaaagcagtatgaccagggggtctcggactacatctacacca

SEQ ID NO: 335647 - DNA, 528 bp, Cannabis indica
ggccaaatcttcgtgagcaattgaatcgaacgaagcccaatttatgcaaacaactcaattccaatcaaaagcaagaggatccaatccaattgcgaatcaataagttagaaacaaattcaagaaatatcaagatgggaaactgcctgattatgactcagatgaggagcacaaacctttccatccaaacattatgagcgttgaatttccccaaggatttaaaaaccctcacgtttcatcatatgatgggactacagatctagtcgctcacctcaacaactttaatacaataatgcgagccagtaatgtcacgaataacttacgttgtattttattccccacctcactgactggggaagcgagcagctggttcaataaattcacccatcattcgattacctcttgggaacaactgtctaaagatttcaaaagataattttaggcattaagagataggcgacctaaagcgtcttccctcactaatgtgaagcagtagccaggcgagtcactcaaggcatacttgagtcgatt

SEQ ID NO: 335648 - DNA, 850 bp, Cannabis indica
tataatattttgattgattaaataaatgttgtgtgttacaagtgtgtcacatattttaatctagtgggggattgttatattattttataatatgataagtatagattaaaatatgacgaatatattattatgttaataatatatattatgtgtatggtaaataaatgtgtaacttatgattttagcctacacttttgtaacctacatagtaacttggagacgagttaaaatttgatgtcacttgtaactcttgtgttgatcacacattattagattaataaaagagttgttacacaatttgatttaagggattcaaatgttatgaaatatagttgttacaaactatattaatactcatttatatgagagaaataaggtgttgtgtattttgaattctaagtgtgatcacctacacactatataaattaaagagtctaatgtgctcatttgggaaggagaaattttctatcaagaaagcacattgctagaaaatcctaaggcttgataattctcaaagttatttcttagagagttcccttagtgcttagagattagggaaataagcttttggacaaaagtgtaataccttgttcaagtcatggtgatccccactattctacactcaagattatgagtgagtgtatttatatttatatctattttatataaaatgtatctatataactgaattcttagtttatgagaaatttatgggtgattttttatttatatttaataaaataataaaatattatttatatataataaaataataaaataaaaaataaaacaaatcccattaatatttgaactgatatttgatgttaattatttgagagtcacaaccctc

SEQ ID NO: 335649 - DNA, 1222 bp, Cannabis indica
tatttttgtatttattttaaataggtttatactaatatattatcaaactaaatatgtatattttttatttatatgtatttttttttttcaaatatgacaaaatagagaaaaaaataatgaaaaaccttaaataataatattattttttcataaactaccgaagtaaattatattttaaattttattcttaacttatactccgcggaaaacccataaaattttaccaacgttgatgcaaaatttaaatagccaatacatatatttacaattaaaaaattattaaaattattgttaacgcagattttcgttaactaaatatataagccttttacgtaataaatatactacaaagtttaataataataataataataataataataataataataataataataataataataataaatgaacacaagatattttacgtgatttttagttaaaatctacatactccacgagtccttattagggatgttgatttaaatatagagtacaattctcttaataaatgtataataaagtttttctctctattttgtcgtctcttttttcctggattctgttcctatttatatgtgtataggatgatagttattttcattgagatctaattatttacaactgctcttgaaatgtggacattccccatgttttatttttatgcacatgggataatatttaataactactgaaccgttcttttgtatttgtccttaaacggttatgctgactatgaaggttatttctcgctaaatgtgagttttccttcctcacagtctttataggaaaaaaatattaagtacagatatgcttcttcttgcagtgctcttcgtattataatgatactaacgaggtggcttgtaataccctggaattatgaaatggattagcaaaaccctaattagataattataaataattaaggaattatattattatatagttcaatatctgtgaatttatatgattaattacatggtaagaccccgttggtgaaccaggggcattttagtaattatgatccgagaagggtaaaatgatgaaattaatttaattacctgcttaatagaactatattattatatagtatgtctgtgttgtcttttcagatgtgttctgacatgttaacgcggtatagtcacaaccgggaatttcaggccgaactggggtcgggcccgaaatgcaaattagattgatttaattggtattttat

SEQ ID NO: 335650 - DNA, 584 bp, Cannabis indica
ttttatgtgtttatttttatcgttttagaaattcatattaggatactaaaaacatacttgttagtaaatctagatcctggtaaaagatactccaacaactggccttagagccaggttaattgatttactttcaagtaatatggatttaagacgatgtatgtgtgatttggaagtgattcatgttgatctatgtgtttattggtgattggttgatgtttgtgaaatttttacgtagataattggatcttcgttctagaattataatttttttggatagtatggaaaaaattaagaaattcacttttttacagaacttaatttccatttaatttgaattagttatgaatttttgaaatttgaaaaaaatcataaggttggtgacacaccccatgcgcgcgcggggatcaggtgtcacccgtgttcaaacaggggctgtctgaagcagcacgaccagcgtgtctgaagcccctccatacgtgcgcggaaatcttgcattgcaggatctgtgtgcgtgaaacctcggcagtaacctccccatgcaaattttttcaatttttttttattttttcatgcttcttcatgga

SEQ ID NO: 335651 - DNA, 1489 bp, Cannabis indica
agtaatatattgtaagttgatggcaggacgacaaccagaaaatcttgcataattgtggcggatagaggtgcctcacccaaggtcaatgcgagttcaattataccttgacaggcgatactttcgccagtgaatctgcatagatttaccatgcaaggccttaatttggccttttcgagccgcatcttcatcaatgtttccctgtttcactgaacacccgttatctatcaacaccctctttatccttttattggcgagttggatagtaatcactaatggatcgacgtgagggtacctcatgttcttctcatcttcctccgaaaatataattggaggctctttagtttttaccttcatggaaggttctggagcaaatactgactgcacgtttttcatttccttcacgtacctcttttgggcataactgtaacgccctaacaattaggcatgctacccgaggtgattaagaaatgttaatcctttaaacggaattactagtaagataaccgcaggaaaatttaaacattaaacgaaaacagaatgaaaataaaacttgtaataactttaactttacaaccaaaatgacatgttttgggatcccaaaatattttataaaatattacctgtcctttccactagtcgacctaagcgacaaaatcagagttacaaaagcacatcactggtagaccgcaacccgcttggtctagtgtggcccgaacatgtacatacatcgcccagctttagcacttatggctgatgagagacagatttatcctatcctgcacagtagagcacccgtgagtcaagaccagcaagacaatataattatcaataatcatcattaacacatcacataaatattaatgccatttcatatctgtctgtatgacacagacccgcgtgttacactcacacgcctatttatctctatgtggcataaacctacgtgttacgctcacacgtctatttacaataaggccttagaatggttcatctcagttctagttaccgagtccaacctaattatgccttgaacgcatatatataacatggcatagcacattcacattaataatcactagggaaataatcctagaccattaaaccgctcatgttagggtgataagcctaatcctagtttccaaatatcaacatatataattttcaatataggcgccaccttgcattctttacgtgctaactacgatcatacctgatgtcccgcaaacatggagattccaaatccctgggtgctcctcacaaagtgccgctaatcttagtcataatttttgggatttgtaagtataggattaatccctgaatccatttccacaacttataaatttggcattcaaattacagataatcacatagagctcggaacgagctttccaacaatataaagaacgtctcaaacatagtcccgagtcaaaaggtttggcgaaagcaaaaaaaaataataataaattgccattatcatggtcacaaccag

SEQ ID NO: 335652 - DNA, 2069 bp, Cannabis indica
aatcacgtaatacgcctatgttagttagggtgttacaatttcgacctcgaaatctaacatgaacaactttggatattgagctctcatgccggattctaactcccaagtggcttcctccaccctgccttttctccagagtactttgactaaagctatggtcttgtctgaaaccttttccttcttgtctagaatttgaactggctgttcttaaaatgacaaccacggttgtagctcaagaattttcttaacttagtacatgagcagggtctcaaacatacttccttaacatagagacatggaatatgttgtgaactactgaaagagctggaggcaaagctaatcgatatgccacttgtccaaccttcttgagaatctcgaaaggtcttgtaaatctagggcataacttgcctcttttcccgaaacgcttgactggcttcattggagacattcgtaagaacacatgatcccctactttaaaatctacatttttgttttttgggttcgcataactctttttcctgctctgagaggcaagcattgtggctttaattttcttaatttcttcattagtccgctgtactgattcaagacctaagtatttcttctctcatgactcatcccagtgaatgagagatctacactttctgccgtataacaattcataaggagccatccctgttgtactttgataactgttattgtacgagaactctatcaacaataagtatttactccaggagccctcgaaatccataacacagacttccagcatatcttccagtatctgaattgtccttttggactatccatcagtctaaggatggaaagttgtaccgaacttcagtttggtacccatagcttactgtaaactctgtgaaaatttggaggtaaactttggatctctatccaaaactatagacttcggtacaccatgtagtcttactatttccttgacgtacaaatccgcatactgatccacagaatatgttgtcttaactggtagaaaatgtgcagacttcatgaatcgatctgccacaatcaaattgaatcaaataaacctgtggttctaggtaacccaaccacaaagtccatcgtcatatcttcccatttccacttaggcagtgttaaaggctgcaacaaacatgctggtctctgatgttgtgtcttgatctgcagcatcgcgatacaaattctacgatattcttcttcattccgctccaccaaaagtagggtttaagatcttgatacatctttgtggtgccgggatggaaggaatatggagtggtatgagcctcttcaagaacttcatttctaaatttcgtactacttggaacacaaacccttctcttgaataacagcatcccactagctgacactgtaaaatctctggctagaccaaatgaaacctcttctctaatcttcactgactctagattagttaactgagcagctttaattcattctaacagatcagattgcagtgtcaagttatgaagtttgcctacaactatcttaatgcttgatctgaccatgtcttctgctaacttagttgaaatctgaaccatactagttacttgcctggaacccttcctgctcagggcatcagccaccacattggccttcccgggatgctaaaggatctgacaatcataatccttaaccaactctaacccacgcctctgtctcatattcaagtctttctgggtaaagaaatatttgaggctcttatggtccgtataaatttcacatctctctccgtatagataatgccgccaaattttcagagcaaatactaccgcggcaagttctaggtcatgaattcggtaccgctgctcatattctttcaactgacgagaggcataggcgataacccgatcgacctacatcagtacacaccccagaccctgtttggatgcatcacaataaacaacaaacttcactttatcagaaggtagggctaatactagagctgtgattaatctctatttcagctcctgaaaacttgcttcacacttgtccgtccacacaaaacgctgattctttttagtaagttcggttaagggtattga

SEQ ID NO: 335653 - DNA, 833 bp, Cannabis indica
taaagaacgtcccaaacggagtcccgagtcaaaagttatggcaaaaacaaaaacttaaaaaaataacaatctgccataatcatggtcgcgaccatggtcgcgaccactgggtttaaaaacccagaaaacccagatttcagcttcgaaaatatgccaaactcacccccaattcaacccaaacatgcatatatctcaaaatcaccaaatagagctgctagcataaatcagaggatcaaaaacacatatctcatgcatcaaatccaacaataaacttcataatttcagattacaaatctttgaacatcatgcttcattcaagaacataattcaacaaaacttcatacttgtaaccttaaatctctaggcatgaatcaaccttattttccagcaaccaaaacataacaaacacatggattcaagctagaaaacatttcaagaatcccatctatagctcacactaaacccaatccaacttaacaaaactcaagctcttgaacaagagcttcatctctaacagctcaaataaattccagccatgaaaacatcattttaaacatgaaattccaacctagaaataccatacaatctctgcccaagctcaacaacaaatcatacaataaatagaagctcaatttcacaagattaacatcaattcactcaacatgcaacaagaacattcaaaactcaaagaacatgctttttaccctacaatttcagcaagaattcagtatttagtttcaattaattcagcaagaaactaccttgattccttgcacaagctttaacccaatctccaacacaatcaaatcatccaaccaacactcttaattcaa

SEQ ID NO: 335654 - DNA, 966 bp, Cannabis indica
ttcctttttattttctagaaaatttggcaacataacgtctgtataatgaataaacgcaaaaatcataacctgcataaatatttgtacaaaaatatatttggcactcagtaccccagaatagtccagaaaaaatatgcagattaagttttaaatttttcaaacaatttgcaaatcataaaaatttagaatatgtctaatattatacatcacaactaaaaatcaagttcaataatcatgttcagtctttaactctcccaagtcgttaaactttgtccaaaagacgatctcaagctctcaagtcacgagctctaattatttagtctaatcttagatattactctcacctatacaattaaatggttaaataattatcatcattgcattctatattcaaaaccgagtccaacgacatataatatggctatatttaaaatttaaagtttcaaagcctcacctaagtggtgcacattaactatcgttggcggtaaaaatttgtgtagcgaaaacgtcgctaaaaaataggggaagtgtatatcaaaacgaccaccttgattattagatcacatccataccgaccgtttgtcaaaacagtacacgatgttgccgaaaaattgccggaaaggggcagagctacaaaaatgtcactggaaaaagtagtgagctgggtcaaatagtttagtgtaggttattctgctcgacgagctgagtttagtggtgaagacggctcgtcaaacggacaccggaggtgaccgaaaaaatcgttcaaagttggaaccaccaaactttgacttgcgatcccgagctaacgacggcgaaaggagcggcgcggcttgggggttgaggtcgccggtaccagggggttcgagtggtctggcgcgtggggctggtcggtggtcggaggtgggtcaccggagtctggctatgatggagctttgtggtttctttttgtgtttttgaagagagaga

SEQ ID NO: 335655 - DNA, 2149 bp, Cannabis indica
atgtcatttttgtaatttttgcttggcgacaatgaaaaatgcgatggatgactagtttgatcacatgggtaagtttagaaccatatttcttagcgggaaatttattggagaaaataaaataccggggttaagcggggttatggaatttgactattttacccctagttttaaaaatggctaagtaattggtttaagggcaatttagtaaaatgtcaatgggggataggtggctgcctaggttagtgacacctagctttatttttttgcaagattaattaagtaatcttttatcatttgaggaaaaatcaaggaaaaggaaaattaaagaaaaacctaaaaataaagaactttctctctttctctctttcggctgaagcaaaccaggggggattcatcttcaagctggtgttttctgggtattaaccaaggtttttgtgaacctaaagcaaaggtaaaaccctagaacccatgaatttgtattttggagctttttctttagtttgagtttgtgattttgttatttagtggttgttagggttagaaatgtttagggttcaaatttttaggttcatttgagttgaatttagttcctagcagcttgtgttgatgtttgaattaggttttgtgcaagtttgagctttgagttcaaagctttgatctctaatggcataaattgatttagtatgtttttcaatgaaatactagttggattatgttgtgtatgcattgtttaggtgttctggaaagtatggttgcatttggtggaggattgagcaagaaatggaaagtttggggtgaactggtgcaaactggctagccgattttaccagtacctctaaaatcggctagctggttatggcagggtccccgaatgcttcattttctcaattctcgtccatttcagtgccgtagttgggtgtttctctatttcctgagttagtgtaatccctagagaatatggcagaacctagaattgtaggttcggattttcgagattagggtttcgatcatgtgatttacccagttttataatgtgattagggcatccatctagcacgagactttccgttcaggtcggccagcacacttgaatctggaaagaaggtaagatctgtatataatgtgtgatatggatatgcgaatgtatgtatatgtttagtgtatatgcatgcttatatgttgtgattcatacactaccaacacttgtacggttgcggcacagggagcattggtaaagtgtatgatgtctgaaagtacatcgtggtgttacgaacacttgtacggaaaggtacaaggtgtctgtggtacaacacttaacagtactcaaggttcagtccataccctacctacactagtacgaaggtatactgagtgcatgtggtacatggtacatggtcgtatccttagtagaacgttcttactcatctgttaagccttgtaaatacgtgtatgggcgcctaaatacaagtctaaaattaaatgatatgttatatgcttttcttactatgtctgtcgactcatagttctggtgtaggtaaaggaaaggcaaaatctgaataggagtgaacctgagctgggatgaagttgtacatgtcgaggcagcggacatggagtgttcggtctcgggacatctggggttatattttgtagttgttgtgcgacctgaatatcatgtattttgtgaatattatgtttgaaagtttgaaaatggtatcccggaacttgttaattataaagtttaatatttattataaaagttttaagttgacacagttttcgagaaaaatctttgattagcaaagatagcactgtaattgaaaaagcactgtaacgtgccttagcattaggccgttacaatagctttggtcaaggtgctctggagaaacagtaaggtggaggaagccacctgggagatggagtcagacatcagggctcaatatctagagttgttcaggttagatttcgaggacggaatcattttaacggggggataactataaagaccacttaattttagaataagaattagcatataattagggtttaatttggaattagacttttaattatgatttatgaatttttatggagatatatttgtattctaggtgtgttatttatgttatatatgaaatttcatgtttttcat

SEQ ID NO: 335656 - DNA, 846 bp, Cannabis indica
tgaaaataattcaagataaactagatgtatttttctgtatttaattaaataaaagaagttataactaattagattcttctgaaaacttaattatttgaattttcatagaaaatatatttaagttgaaaattgtcaacttaaatttgaatattttgaaattaataattaagtagaatcttctagaaaattagctattcagatattttttaagttgaaaatttgttaattttggatcaacttaaatagggatatttttcaaattaaggtgattagttcaagatacttaatttgatatttaattaaattttgaaaaattatttaagttgaaaattttagaacaacttaaattagatatttttcataaatttattttattatattttatataattttgaaattttataattatttatatggatttttcgaaattattgtttgaaaattaaattaaagttgaaaattaattttggatcaacttaaattaagtaattttcattactaaaatatataggttaaaataaatgattaattaaaaatacattattttaaataatgagttttattcaaagagatattcgatctccattgttggtcttacaatagttaaatgttttcaatataacctcgagatgctagacttcgtcccccttatggatggttattcgttgaaagcatttaacaccgtaagatctcatatgataagcattttgtaagttttcgtctctattatactctcccctacggtgactacttagaaataacttacaaaatatgaaacaatggcggaagctcataaaataagataaaccttgactctcgcctaccgggacaacgttggattctcat

SEQ ID NO: 335657 - DNA, 1265 bp, Cannabis indica
agaaaaatatccaatatttaagtctcttgaacgaaataaacttaaatattaattttctatttaattcaatatatttagaaaaatactaaaagtctactcaaaatataactatctacacatttgattaacaaattatttatattctaataaaactaaaatatattttagtgtattgattttaataaatcatctataaatataatctatgttatctcaatttttgcactctgatgtggcatcacatgaatggtgacacgtggaatccacatggaacatctgctcgggaagcgtagtctgagcaggatatctcgccagcatgcccagagcaaagtattcgacaatccgcgcagagcgatcaacacttagcgaattcagatttcgcatcgtgagtcatcaacacaatccctataactcagggatcaacttacttggatatggcatacacacgatcccattatcagtgtattcaacctcaatccaacgatccttgcattcaccattcatcccacgatctttctatttatacgcattttaacgagaggggaaactcttcctctccaagcttactagccctataaatagtgatgtatgttcactgggcaagaggtggaaaagcagttgagcaaagaatgtaccctaaatatattatctaagaattatacatttagagatattgttgcaagagctataagaaaaggaatccttctccttgatcttaagtcaatacaaataacgaggattatgttattaccgaactgctcggggctaaacctctataaaattcatgtgtctttacatcgctttatcatatatttcttgttataaatcacttgtcgcttataaaaatagactcgttctcgttggctaaaagcaacgtcaacattttggtactttcattgagataagaatcaagaatcgctctctattcaacatctaatcacaaatacgatggtgcaaactcgtagaggcctgactgatctagcaaattcacagacgctgaatccctcatcatagaacccaagaaacacaagggttccgcccgctgttaatcctggacagccgacgaacgtggcgaatggtgtaatagttcctatagatgaaatcgcgtctggtgtgcaagagactgggaataagagttccgcactcaaccagagcattcataacacaattgtttcgcttggaaccaacgccgagacgaccgtcggagatgccactaaattacaaaatctctgtgatgctctcggtttaggttagatttatttggc

SEQ ID NO: 335658 - DNA, 678 bp, Cannabis indica
aagataaagggaacgtgaatcgatgcaattgcttcttatggaataactcattaattacataagtatcaaagtatatttgtaaaccgctgactgtaaggtcttaggcgaggaatcaatgtacaagctgacacttagtatattagggagaaaccatatattgctaaatgtgaatagcgaggcaccaaagaaagcgacacgtattaattgcaaaagtccttagcgtacaatgaacaaattaagtgtaaaagttagatcggctcaagaacaagtaagcgaggtgcgttatgggaagaattcatataacttcatcccattagcgtcagcgaggcttacaatcctggtgagccagaagatagcgttcaaatgagcctcgaagaaatctttgaggataagaactgcgatcgacactagacatacatcgtcgacctcagaaggaagaatggtcccaactcgctattaagatcactagaaccaagtttaggtcgagacatctccagatacaacagctaaagacgtgtttaatactagattgttttgacccagtaaaagcgaaaaaatcacagctatatgattttcaaaatcctaaactgcatttacagtatgtgatatgtaatcaaatcccacgattttagggatgattgttgtaaacatattccagtcaacttttgtaatttactg

SEQ ID NO: 335659 - DNA, 400 bp, Cannabis indica
tttaggctatttttgaccgtagatgatgatctaatggtgaaattgacttcagaggtcggtcatcaatttttgaagcttaagtcgcatccacgtgacctgctccgtgtaagttgtagcttaaatttgtaattctattgagggtaaattttggagtcgataacttagtaattgtgattgaagtgtgagacatgacttaatagagcattaaaatagctttgaagcgcaggttgaatcgcgccaatcaaatcaatatcgagagagtcatgccattttactaaaggttgtgatgggcctagtgcccatgttgacatctcagcgtccaagttgacatccagagcccatgttgacatgtgacttctgttaggtaaaaattagtctaagtttcgggtcatattttcgg

SEQ ID NO: 335660 - DNA, 802 bp, Cannabis indica
aataaaaatattttcaggttcaacgacgtgagagacttgatcgggagccagaaatgacataataggtttaattgatagaattaatagaaatattgtgataagttgaaggtattgaggtaattaggagtatatgaaatttagcttagcaccctaaaagcaaaaacaatttagtggctaaaaaacaataaaataaccattaataaaaagtttttattaatattattatattattattataactgttattattattattattattatattaataatattattattatattactattataatatattttttaattaaaaaataaaacttataagttatacgataagttaatacatatattataaatttataataagtaaactaaacagaatgaaacccttcgcctctttcgatgaaactttctccctatttattcattttcttcgattttcaatccaaaacctagcgatctaagctccggtattagcggaacaacaatccttggagagaggaaagcttaaggtaagatttaatttcgtttaaagttagaaactaatggttttgtatagggttttgtgaattaaaatagttatgaaggttctgacctcgtaggattgttctcgtgtagccatgggactagttccgatattttcttgctgaaattgaggtaattttgggctagcaattgagtttgaaactttttatagcttaagtccgaacattagtgacgttttccaattaagggctcgattttagtttgtattgcataagtatggtaattttgtgccctatgaagtttggagtgat

SEQ ID NO: 335661 - DNA, 537 bp, Cannabis indica
gtaaaataatttccaacaggctcattcctgtagcttccactagttaacttaagacatcttttcattgagattaacaatcttgacgagtcagaagctaaacattcaaatgagcctcgagaaattctctgttaataaaatctgcgattgttacaatgaagcgttaagctctcaagaaacaacgaggcgtacatcatcgacttcgggaagatatgggaggaaagttccagctcgctatctgggtcattggaaccaagttcctatcgagacatcccagaacactacaattaaagaagtgtttaaatacacgaccattttgacccagtagaagcaggaaaatcatacctctgagatttttaaataataacagcaattatactacgtgatatgtaatcaaaccccatgatttcaggggaaaatgttgtaaacattacagccaactttgtaattaactgcctactatgtgattataaataggagtaaataccattttggaccttgtgttttgtaaaagttatcaattagaccctctgttttgtt

SEQ ID NO: 335662 - DNA, 1715 bp, Cannabis indica
atatcacatggtttattgaaattttcaattactctacctgacacataagagtgggtagctcccgaatcaaacaatacagtataagaacaaccatttataggcaactgacctgtcaccactgacggactagcatcatcgtcagcctgagtcatggtaaaatgttgtcccgggttctgtgtaacattcttcttaggctcctctttcttactctgaggacaatctctgatgaagcggcccaccatgcaacactagaaacaagtcttggcccgacattcaccctgatggtgtttcttgcattttgtacactcaggataagatcggaatgaagatccgcggccctggcagccacctctgtttccctgaaacttcctgttaccccctgatgttccggaagcatcagccttccgtttgtgataagggttaccactgtcggtccccatactgatattaccactagcagcagggttcgatgccgtgacggcatcctttgcagtctgctcctttattacttgttgctcagcctcctcaacaattaaggctagatctaccactttcttgtacaaagtgtcatgagtagtggtaatcttcaagtcccgactgattgtggtattcagtcctctcacatatttctgtttcttggtgaaatatgtgagcaccagatcaccagcaaacttggacagccgatcaaactccagagtgtactcagcctcagacatcttcccctgagttagtttcacaaaatcttccatatgtgaagtcctcactgcgatgttataaaatttttcttcaaacaaattcttaaactcatcccaagtcattacactgacgtcacgagtctgtcccacaatatcccaccagacgcgggcatgatcttgtaacatgaaagctgcacaattcactctctctgttcccgtcactcccatattatcaaggatacgggtgattgtactcatccattgctcagccttaattatgtcagtacctcccagaaaagttggaggttgcagcttcacaaaccgttcaaacacagaatctctatgcggcatcataaacccctggttacccatcactagcacaggcgctggtggtaacacttgctcaacaggggcagccggtgccggttgccttaatcgacgcaattcttcctcttgacgaagtatgatacctcgcatttcttggaacatctgctgccagtcagcaggaggattagcattgccaacccccgcattatcccccagattctgcggaggtgcaggcggtgccggtggattggtttggtctacaccatgctctacttgctcgccctgtggtctagatgattgaggagggtccatttttacaagtacccctgtaatcaacaaccccagcgagttaagcaccaataccacacttatgcacttattaccttaaaccctaactcaactatttactccatataattaaacacttaatcatatagcatttaaagcatggcatcacatatcatataaatactctagatgcctacatactgcctaaaatggaaagcggtaaataattgatcacataagcagtaaagtatttactctcaacacttactgcaccatgagtcaagcttatctctgacgatgattgtacatgttcggccggtctacaggaagtttaaaaaccttggcgctctgataccaaattgtaacgccctaagatttaggcacgctacccaatatgattaagaa

SEQ ID NO: 335663 - DNA, 719 bp, Cannabis indica
aatgactatgagtagctaactttcaattagggttgttaatgaagattgttcgacactttattttggtttaatgtgattaaattcttccccaattttctatgtgtatttgtacttaatttcttttaattgtctgatcacttaattgtttaatgatttcaatacaaaatttgagaagtgatcagtattaattatgctatagtgaaatagatacatatttcgatataggacgatagtacctatatatggtttgtgtatatttaggatttttatgcttaatgcctcttatttgttaaatttatcacgagagtagaaagtttacatataagttgagatttatatattctaacccgacccgaatataagtttttttagtaaatctgttatcacataaaaattaaaatttgagaattaaattatattaaatcatacgtggattcaatcgaaattaatcatcctaagttttaatcattattaatttcactttatttatttgttttttctttctcagtcgaatttaaaaaccacttttctttttattgtcaccgaatataattataaatttaattgtttggatacttaactgcagtctttgtaatatatatacaatatcgatctcctgaataatatatatattcaatgtactttcttaaaatggatgcactgatgtaccatctacctatttcggtatccacaagaattttttaatctatttttatttt

SEQ ID NO: 335664 - DNA, 594 bp, Cannabis indica
gttgagtgtctgggtagtgtctccgttattccccgctctcgctctggcctttgggggcgaggcgagtgttagtagtcaagcagccccgtctgagggggttactctggcgattcccccgttgaagaagtcaaaagagaaaaaacatgccctgggtagttcctatttggatgttaagtcaagttgtccgtcggtcctcacccagcgtgaacttgactccctggttttgtcgtgtggttttccggcgggggttgaagttaggcttcccaaacagcatgagagggcagattcctctccaaatgagtgggtgtgcctacactcgtattgatttgagtcgaaaattaggctgaggctacccattcctaagctcatcaaggaattttctaatacattactcgcttgctcctgcccagttactccataatgtgtgggctattcttttaggtctgattgtgttaggggataaggcgggcgttcaatgggaggtatccgacgtcatccacttttattctctgatggaaaaaagagccggggtgttaccatcttcgccccaggagaattgttccctgcttctgacttagagacttctcataaagg

SEQ ID NO: 335665 - DNA, 1059 bp, Cannabis indica
tggaggcaaagctagacgatatgccactagtataactttctcgagaatctcgaaaggtcctgtaaacctagggcataactctttttccaaaacgtctaatccccttcattggagacacccgtaggaacacatgatctcctaccgaaattccacatctatgcacttcagatctgcataactttttttcctactctgagaagcaagcattctggccttaatcttttctatggcctcattagtctgttgcactgattccagacctaagtatttcttttctttcgtctgccatacaacaactcatagggagccgtccctattgtactctagtaactgttattgtacgagaattttatcagtggcaggtacttactacatgagccttcgaaatccattacacaagctcgtaacatgtcttccagtatctgaattattcgttcagactgtccatcagtctgaggatagaaagttgtactgaatttcagtttggtacccatagcccgttgaagactctaccagaactttaaagtaaatttcggatctctatctgatacaatggactttggaacgccatgcaacctcactatctctttcacgtaaaaaatctgcatattgatccactgtataggttgttttatcggtagaaaatgtgcagacttcgtgaatcgatctaccacaacccaaatcaaatcgtacattcctgtggttctaggtaatacaaccacaaagtccatggtgatgtcctctcacttccactcaggaagtgttagtggttgcaataaacctaccggtctctgatgttcagccttgatctgttgacaagttaagcaccgggatccaaattctaccacatctttcttcattccacaccaccagtagtagggtttaagatcttgatacatcttggtagttccatgatgcagcaaatatggagtggtacgagcttcctcgagaatctcatttctaagtttcgcactacctagaacacaaaccctggtcttcaacaacaacattccactatctgacaccgtaaaatctttggcttgactagctgaaacctct

SEQ ID NO: 335666 - DNA, 673 bp, Cannabis indica
ttttgaggtaaatgacctcacttggggatttgaaagaaaagactttacttgggattattgaggtgaatgacctcatttagaatttttaaggaggagaatgacttcatttagaatttgatgaggtgaatgatttcatttgggatttgatgaggtcaatgatctctttgaaatttcaggaggtgaatgacttctttaatatttcaagattaattttaatgagttcatttagaatcttgtactattttgtatgactttagaattttaccacttctagtgataaattgagttttgaaatctctttactattatttaaattatttgacaaatattttaattatttattctaaaatttagaaaataataatttatcttttatcagatactattttaaatttaaatttaagttgctcaattaaaatttaagatactatctaaaatatttattttataattcaattcttatttaaatttgaattatataattgaacatatatagcctcgtgcctatttattttacaactgagacacttataaaaacatattaatatattattcactagcagtcggtattttacaattatcagattatcttgtatatacaggaaaatttgaaaaactatactttgaaaactttaatattttattcttaaaccaatacatttcaaactaaaaa

SEQ ID NO: 335667 - DNA, 868 bp, Cannabis indica
cttttttttgtttttttttttttttttttttttctttttgtctaggtttcattacaaactaaaaaggataagtttttttttttgaaaaaatttatcatctttattaattgcaatctatagtgattacttgattaaaatctatagtaacatcactactcctcataacacgatcagcaactaaataggatgctcgagctaagaaatgagcaacactatttgcagaacgtctaataaaattgacataaacatctcgcaagtcatttaacaacatcttacaatcagaaataatactccgaagtatgaaaccataggaatagagctacgtaacgcttgcaccacagtaagactatcagtttcaatgacaaccttcctccaatctttccgtttaacccaactcagtgcctccttaacacccaaagcttccaccatttcgggttgcaacacccctgaccgacagcaggtaaaagcttccaccaatgcgctagtttcatccctaatcacccctgcaaagctataagttgcagttcctgaaaaaatggcagcatctacattaatcttcaaggtgttttcagctggtttggcccaagtttcagcaccatcgacatcagtaaggaatgcagccgtaggattaaatgttgaatcttgagcccgagtccaatctgcgagtaaagcttgagctaagtgagcaacactcgcaacagtaggggacttatcagaccatactagctcatttcgatgtttccaaattgcccaacatgtcattgcgatcaacctccttttctccccatccgcctgctgtagaaccgtagcaaaccagttggcaaaagaaccaactaccgtcaaattaacaccagcaaccaactgttgc

SEQ ID NO: 335668 - DNA, 587 bp, Cannabis indica
aaattgttattcatggccaaggaacaacaatctaataaaaatgaaactcacttgaatgaacaaaggcaaaaatactaaagtaagcttaaaaattaatcatacccaacatagaagttcatagccattcaagccgcaaaagtctagctcatactcaagttagaaagtaatatccaaagaaagaaaaattcatccatggttgctgcccaggtttacaatctcacaaagtttttaatactaagtgcaaacaacaatagaaaagaaagagaaagaaaactattaaggaagggtaaaagaaaaatcaaacactaaggcttgatcccctcttctttcttctctgctatactttctgctgtagttactcctccaaaaaaaagaattgcagcagctgccttacgtaatggaggttgatggtggtgtactttccttctttccccttttagttgttttgttcctagggtaccaaaatcactccctaaaatgagaagcccaattctttttgtcctttggcccactaggtttagtcccattccttccacagcagccagttggtgtattttgagtgattgggacgaattttctgatgtgga

SEQ ID NO: 335669 - DNA, 1325 bp, Cannabis indica
tagagcgacgcattcttatatttcaagtagagtaattgacaacttgagtaggcctagtgatgtactttcaagaggctttggaactttactgcctactagagagctggttatctctagcatgtgggttcgatcccttccaatatttgtggaaggaagagagttatcggttgacctaatagagttaaatttggaagattttgaggtttcttagcgagtgcagtggatactactaaggaaccaccaacgggacaagagcatgttccagtggttcgagaatttatagaagtttttctagaggaactaccaaggttaccaccgaagtgggaaattgattttgagattgatttaataccaagggcagagcctgtatcaagagctccttactggatggcacctgcggagctaaaagagttaaaagttcagttataggggatgttggatttaaaatttactagactgagtacctcaccttggggtgcaccggttttgtttgtgaaaaagaaggacagaactttacggatgtgtattgattaccgtgagttaaacaaattgacagtaaagaataagtaccctctgccaaggatagatgacctatttgatcaaatttagggaaagactgtcttctccaagatcgatcttcgatctggttattaccagttgaggatacgggaagaggatattccaaaaacagcttttcggacccggtacggatactatgaatttttaatatccttcaaattaacaaacgccctgtcagcatttatggacttgatgaactgagtgttcaaggactttctggatgattttattatcgtcttcattgatgatattttaatttattcagatactgaaaggacacacgaaagacatcttcggatggtgttgcaacgcctcagagatcataacttatatgctaagtttaagaagtgcgaattttggttgtctcaggtgagtttcttgggtcatgtggtaagtaaagacgacatcttggtggatccggtgaaaattgaggcagcacaggactggcctcgacctaagttagcaagtgaggttagaattttcctggggttatcagggtattatagaagatttgtcgaggggtttgctaagttttgtatgcccttaacagagttgactcggaagaactgcaagtttgtgtggactgacaggtgtgagagtagttttcaggaactgaagtaaagattaattaccgctactgtgctaactttatcggtcagtgacgaaaagtttgtaagttattgcgacgcatccaaatagggttaggttgtattcttatgcagcctggaaaagtgattgcttatgca

SEQ ID NO: 335670 - DNA, 1148 bp, Cannabis indica
agattatcatatcagtaaaacccagtgttctgataaatctaggaatctttaatcacatagtcttgtttactttccactgtgcttgacgacacaataaacaagaacaagaatgtgaaaggggtttggatgaatttataaatcaaatagacaaataattgataatgtgaaccaaaacatacacaaatgaatgaaaaatacttctgtttctttattgatattgaataatacggattacattgaaatagagttttatttagggcataaaacccaacatgatagtgagtcttaatattaagcgataaaggatataattcaggtacaatatgaaaagatatataaagaacacaaagttttttaaagaggttcggccccgagcagttcggtaatagcctactccccttaatttttgttgacttaagaacaaagaatacagtgattcctcttttaaagctcttacaataaaatctctgagtatgctctcttagatctctctcaagtaattctcttgaccccttttctagtgagaatggatcactatttatagggatacatgtttgagggaagatttcccttttacttacaatatctataattgttaagaatacatattacatatattgaatgcacaaattgtgggatttggacaccttgccatatctctgtgatacgattccagatttataggaattatcttgtgcttcacgatgcaaatgctgaaattgctaagtgttgatatgctgttcagattgtcactgttcgactaggaggaccttgtccgtgcaggtatatgcggtgttctgctcggaacatctccttcgggcaggtatggagaatcaattccacgtgtcaccaacatgtgatgccatgtgagagtgcaaaaattgggataacaatatctataacctatataaaaaaatgaaaatgtttttagggtttcacttattaaattacattattagccttcaatatatattaaattaacaaaaaaaaaaaaaaaaaaaacaataaactagccattgataaaacaagtaccacattatactacacaacttattaaggtcaatgctaaataagctctgccctccaattaatattttgtcttatgtaaaatagttgtggaagtgattattttatcaaagtctctcaat

SEQ ID NO: 335671 - DNA, 726 bp, Cannabis indica
attgcttatgcatccaggcaactgaaagagtatgagcagcggtatcctactcattatattgaactagcagaagtcatttttgcactgaaagtttggcgtcattatctatatggagaaaagtgcgagatttatactgatcacaagagcctcaagtactttttcactcaaaaggacttaaatatgaggcagcgatgatggttagaactgatcaaagattatgactgcgagattctctaccacactggaaaagcaaatgtagtagcggatgctctaagtcaaaaggggtcagggcaagtctatgaattaaagaagatttcagcagagttggctgaagatatgattagagcaaatgttgaatttatagtcaggaaagcttgctaacatcaccctgcagtctgatttattggaaagaatcaagacagctcagcagaatgatttcgagctacaggggtataaagagaagtttatagtcaggtcagtaaaagacttttcacttttatctgatgggttgttgcggtataagggcagggtttgtgtaccagtcgataaaaatatcagacatgagattcttgatgagtctcataccacaccgtactccttatacctggggacaactaaaatgtatcattatgtgaagaccttgtactggtggtcaggtatgaagagtgatattgttgagtatgtgtcgagatgtttaacttgtcagcaaatcaaagtagaacatca

SEQ ID NO: 335672 - DNA, 994 bp, Cannabis indica
ttccttccacagcagccagttggtgtattttgagtgattgggacgaatttcctgatgtggataagtaaaactcgtgtttccacgtcactgccagaatgctgaattcgcttcagcattctgccagcaatctgccccgatttcagcttttgttccacttcttccttgcttctttttctttttcctatcaatttaattcttcatttttcaacaacaaacaagcacaatcaattggaaaaacacacctaacaatatcaatatttacaagacttaaaagttagcttactaaatagaaaataaaactaaaactaattaaaattaagcaaacaaacacattttcactactcttctcacaatatttttagtttaaaagcataaaaaataactctataccatagagttatcaaaggactattgatctcgatcaaaattcgaatgaatggttaaagatcctccagatttacaatacgacgagtaaaaaacacttcttcagttgaagggatgttcatttaatgatggaatagcatttctcgagaaaaacaaaattgctaaagaaaagcactcattatcaattgggaaaagaccgatttatctagccaagatcaaataaaaagccctttcagttctaggaataactttttagggggtaattattatgtccaaattttgagcaataaatatggacatgacacgtggaaataagccccgaaaattaagggaacctataaacataaaaagtgtgatagttatctcacctcgaaatatgccacaattaatgatacatttgtctcgcgttgtattataatatggctattaaataaaatcaatataattataaatacaataattagtgagccaatgaaattataagttcatcttagacttgattgagataaacgagacatgtatagaatacgaagagatgggccactggaaaaggtagataataattattttaagagcttagagctcattaacccacatactcgtgagtatg

SEQ ID NO: 335673 - DNA, 674 bp, Cannabis indica
ttattctgtttttatgaacaatgtgtgatatgagaattaaaagatttacgagttgtttgatattatttttattttctgttttcgtgtttcaaaagtgacaataaaaaataatttttgtcattttcaaaatgctagacacgtttttgctaaaatgtttttagaccttcttactactaaaaaataaaataaacttcaatatttcacatctcaacatgaacccaatctcatcctaaccttggccccaggccccagtcccgactccggctccaaaccttagattctagactcgaccctgaccccaaacttggaccacacacttggcctcgcccggccaaacttgggcccctaactctgtttatgtagttacttagttatagttaagttgtggtaatatttgtttatgtagtcactctattatagctaacatgtgaaattatttttgtttatgttatagatatgtcaaactcatgttcaggtttagactcagaattagacccaacaatggagatccctagagtgatacctaagcgaggtcgaacagagatgaacaatataagtaagctgatggccaaggaaaaaggaagcccatgactaatatatagaatacgaacattctttaaaattaattgaattcaatttgtatcattctccgcaggaaatgatgaacaataaat

SEQ ID NO: 335674 - DNA, 643 bp, Cannabis indica
tatcaggaattcaatttccatcttccgattgttgcattcttagtgtcatggccatagtcttcgtggaatcgacaaaactttgtcatgtccctcttgctgacatctttcttcatgggttcaggcttcttatatggggccagcaactgagttgccatgtaaatactttctgcgtcttcagtcaagatagtgaacgcagtgtactttgcttgattctcccggggagcttgttcagatttaccggcgaattttcctttcttcccattcccttgcttgtggttgttgttggaacctttaccactagagcttgacttatttgggtaatgtggaagttgggtggatgttccaggagaaggagcctttgactttcaaggcttttgctcaccttccgctcgttgaatggcttctttaagcttgatgaagccttcggcacggtcaagaaatcactcattgagtctaccagccggttcttccttatatccttccaaagttcaccgaggacttcaatgccccccaatatcgcggataactttccatcttcagttaccagtgaaaccttggtcgcctccgtcatgaatctgctgatgtatgctcagagaggatcacctagtctttgcttaacttcgaccaagtctcctagatgcaa

SEQ ID NO: 335675 - DNA, 1231 bp, Cannabis indica
gttcaatctcagatatcaatttgggattttgttcattactcctgattttgttaaatatatgttttggatttttgtatgtgttattcggtgtttagtattatatacttaatttttatattttttaacagttatttttggttgttctgaatttttttttttaatgtatttagggtaaggaaaaattttcaaggtgaaggttctcttttgtgatgttatggtagtccccactgacaaaagaattattgatgtatagttttttttgtgattttatttggttattttattttgtagttttacagttgttttaataattttgttgttattgtttcaggattgaaattttaaatacttacgttcttactgaaaacatagtttttttttgagtgttctggtgttagtctggtggttcggtacgtaagcgtaaagaccgcctaagattgataatatggattattaaataattagggtttaattataggatttaaaatattatttatattatgtatattgtgaaaatttatttgagtcgatataattaattatgctattttgtatgattttctcgttgatctataatgtatttggaagcagtggaaagagacgttgggccagtagagagtcatgttttttctttacggtatagaattattttaatatcggggtgttatagttagactttggtagtgtcaagaatttagcggggtttgggaataatcaaattactcttggctttcttttaatatttaactttttgactaggcttgaattggtattaaaatagttagtaaagtcttttgtcttttatggaattatatatatatcaaataatctgatttctttcatctattttaaaataaaaacaaaagaaaaggaaatgaaaacctagaaaactctactcatttcaccatcaagcttttcctccctctctctctctttccttcgaccaactaagagaaccagccaaggaatcctttgtactcaatcaaattctgaagttttaggagggttggaagttaaattaaggtatggagttttgctattttcttcttaaggttttcctagcttaaagttgattatttttgcatagtattggggattgtgtggctgtttgctttgggattgtttgaatatgttttctggtgttagatggatgttttattgctgaattaagcttagtgaagtgattgtttaaggtttgagttaaggtggagcttatgagctcaagttggag

SEQ ID NO: 335676 - DNA, 803 bp, Cannabis indica
tttcttttagaattatcaaaatattatttaaactaaaagttttaaaaaaattcataacatgaaataaaagcacaattagttcaacttgtacgtaaatcataaaatttgtgtcacacaaacaagtttgattataatttattaattataattttttggtagatgacaatcaataagacttgggtgaccatgagaaatcgtaaggatccagcttacttggaaggtctccaggtctttatggcacttgcatctaatcacaaagattgtgacggaagaattttctgtccttgtgttagatgtaagaataccggactgcatccattgaacactgtgctgacacatatctttacaaaggattttgtaagcagttataagaggtagatttaccatggggagtcggatgaaccagacgaggctaacaacaatattgatgtcgatgagatggttcatgtaattgaagatttcttccctcctataaacgatgaagaaagagccaccgatgatggtagttagaggggtcaatattatgatgaaatatttgaggagatcgaggcagagttgtatcgggttgcaatttgatatcctccctcaaatttatagcaaagttaatgcacttgaaaaatttgggaaaaataccattgttgaaattgctgaaatttacattttcgaaggataacaaaattcctgaaacacactatgaggcaaagaagaagttaggtaaattaggcctagggtaagaatcaattcatgtgttcaagaataattgttgcttattttacaatgagcatgcattgaaagatttttgc

SEQ ID NO: 335677 - DNA, 662 bp, Cannabis indica
aagttctccaagttccgttaggcttcaggaatagaacaggattggctatccacgagaaattaaacacctcggtataaagtcgttgactaacaacttgtccacttcctattttattgccccttgcctctcagaatttaagggtctccttttcggtctcttcgctgggtagtatagatcaacatttaaatgatggcagataatattagggtcgatccctatcatatctccatggctctaggcgaagtgatcctggttcgccttcaaaaagcttattagctgctatttaagctgcttgtccaggttcttcccaatgtatacacactttgtgggaattcctgggtcgagaataacctcttccaattcctccattggttttaataggtttctctcatcttgaactcagggctcaagatcttcttctttcttctcgttttcttctgccaagatcgccatcaattgatcatccgctttcctatgatgcagctcaatgcgatagcaatggcaagccagcatctggtcacaccgcaccactcccacgccatttggtgtttggaatttcaaagataggtgcttgatcgaattgactgcccctagtctgatcagtgctggacaacccagcaatatgttgtaagctgagggtaggtcgacaactaagaagtctt

SEQ ID NO: 335678 - DNA, 668 bp, Cannabis indica
aaatgcaaaaacacaattgtattaagttcaaataaaaatagtacagtgcttttaagataagaaaaaacccaagttgggttacaaacttgtctttacaaaaatgccactaggggcagaccattaagtcatctttctaaacaaaggatgagaggggaagccgatgaacttgagaaagactgtcttcatatagcctgagaaagaccgtctacacatagcttgagaaagaccggctatatgtagagagcctcgatctctgcatagacctcattctcctcatcatcagaagatcccatttcctgaagccgagatctctttcccagtctcaggaaatttctcgataccacaaagaggttgacgcaaagatcttctgacacaggtttgagtcttgggttggctggatgctctgatagaaaccatgccaacttccttcccagattcatctgcaaccatacaaaccttcctctggaattctttattagcctgaggtggaccttttaaatcgcccacaagatctatgatcacttgtgaggattacccatggcaggctatggggttcccctggtttggattggtcagaagctcctcagccttggaatccatcgtttctggctccagatgaggcttgaagtctttaggaacaaatggaaaatggttggtccatctgggta

SEQ ID NO: 335679 - DNA, 606 bp, Cannabis indica
agcttgagaaagtactatcatgtagggtctctttatgtctatcccaagaattctctttgctttacccagagctttcatctcaaagtcatcactgagtttcctttttagcttgtcaatctctgactttgctttgctaaagatcagtatatcatcaacataaagtagcaaataggtttgataattgaaatacacacatgagtcatacttacttttagtgtatccaatattctgcatataagtgccaaacctcaagttccattgcctaggtgtctgcttgaggccataaagagacttcttgagtaagcttacctcatctgggttcccattgccaaagccctcaggttgttgcatatagatttcctcttctaactcaccatgcaagaaagctattcttacatccgtttcttaaatctctaggtccatgcttgctgcctttgccatcatggcattgattaaagcttgcttaaccactggagagaaaatctcattgtaatcgatgccttctttctgagtgaaccccttggcaactaaccttgccttgatctggtaggctcattccctgaaccttctttatgcttgaaactccatttacatcctaccagcttg

SEQ ID NO: 335680 - DNA, 961 bp, Cannabis indica
ttttcgaacactagagaaccatttagggttctggtttttcttcgcaattcaagcaagttgcagcaagttttagtgtgaatccaagccaaggtaagtttctagcaattcctagttaggttttcttgaattttaagaaatggattttgcatgattttgagttggtagctgttgtgattattgttgatgtttgaatcatgtttctgtagttagaatatgatttattatgttgagttaagcatgaattagtagtttcttgaaggttttagcaagctttgacttttagaactcaagattgaagctttaatggtgaatattaattatgggctttgattgttgttttgttgcttagaaatagtttattggggcataatatgcaggtctggaaggtttgactgagtttggaaacgatttggttagggtatgaatttttgttggttttctgggtaaaaccgattaacctgttttacaatgcttgcaaaaccggttcccaaattttgctgcagggaggaaaaccttccagacctgcatattttgcagcagggggaataccggtttttcagattgtcgtttcgtgtcagtttctggtttctagttggttgattccctcctagtttgggatattaccatattaagttgcagtagatacggttttggttttaaaccttagtcccgattgtgatttagcgagtcacttatgtgagttattatcgatgcgatttaggagcctataatttgccaagcagttgttccactcaggttgaccgacacacctgaattcggaattaaggtaagactagtataatatcatacatatgttattacatgtttagcgtacatattgttattgcctgttagattacattgatagcagtaatagtatacatagagttgtactgatgactgatagatgtatgttggctaaaatattgatcgatgttgtcacatcaatatggctagagta

SEQ ID NO: 335681 - DNA, 855 bp, Cannabis indica
tgatggcaactgacatgtacgctaaacatgtataagcatatgcatgacattatactaatcttacctcgattccgaattcaggtgtgccggtcaacctgagtggaacaatctgctcggcgaattacaggctcctaaatcataataatcacaacactgttaagtgacacgctaaatcactttccggggacttaaactcgaaactagaagttttcctatcgataaataacatggcaataccctaaacaacacaaaaatgggaagaactagggttcccaaattttccccaaccggtagaccggttcctcaactagaattccagttctgggaaaattcctgaaagccaactggtagaccggttcctacaggcctccctgaaccgaaattttgcttcagtgcaggaatgggtcaaaatttcatatcttgagcaaaacaaccccaaaccacatgagactctccagacctgttctaaatatcccaaagaacaatttcaaagcaacaaaacaaccctacacacacagaatcaaaatccaccgtgtgagctccaagtttgagcttcaaagctcaaaacttggctaacaccacaatcagccatcacaaccaactaaaatcaacctaaaacaacatatgcaacatccagaaaccaaactcaagcacaaacaaagatcacagcagcaaaaacaccattttaccattaaaatccaaagttttgagtttaaaatccaaacttgcttaaaatcatcaaacaaccacaacaacctgcttaaatcctcatattaaaacataattaagcttctaaaaacaacaacaactaatcacaccaaccaccatagcaaaatcaccaagcatgcaaaattt

SEQ ID NO: 335682 - DNA, 1027 bp, Cannabis indica
tgtctttggagtgggctcaggaattttcctcggctttatggtaaataagcgaggaatcgaagctaatcctgcaaaaatataagccttggtggagatgcgatctcctaccaaaccgaaagaagtctaaagccttacaggtaaagtcgctgcattaaatcgctttatatcacgtccctctggtaaatgtaaagagtttttctagattctaaaaggaaataaaaaagtttaatggactaaaagtgtgaagaagcttttcaggcccagaaaacgcacttgggcaacccccgatactatccaagctgatgcctggagaagttttatcaatctacctcgcagtgtccaaatacgcgattagttcagtactaatctgcgaagaccaaggtagacaacatctggtatactatgtgagcaagcgtctcttggatgttaaaacctgttatccacaaatggaacgactagcatttgcactggtgattgcttcaagaaagttgcgaccttattttcaagcacacagcattgagattttaacaaactaccccttacgacaagttttggccaaaccaaaagcatcaaggagattactcaaatggtcagtagaactgagccagttcgacatcaggtacaaactaagatcagcaatcaagggacaggcccttgcaaatttcatactcgagtttccaaatgacgaggtggccataatcacagacgagcgagttgaccctgacattccaacaagcaaaggatagattctgtatgttgatggggattccaacaatgactgatcagggggtggaacaatcctcataagtcccaacaaattcaaggtacacaatgcccttaagtttgaattttttgcatctaacaatgaagctgaatatgaggctctaatcgcaggattaaaactagctctcgagatgaaaatcgagtaccttcaagcatttagcgactcgcaaatcatagtttgccaagtcaatggagagtacctagctagaggagggcgtttggccaaatatctttcttatacttg

SEQ ID NO: 335683 - DNA, 733 bp, Cannabis indica
gtagtaaactcctcgtaataggatctgaaaggttgaattaaacacaaccttttctccaccatcactagtagttaaggcaatttgtcatggctgaactagtttttctttgcctttacctgcaccacatagcacatgtgagccacatggactcaacaagaaaagtaataacaataatcatataatttattatttgaatattatcatttatactcagacatcagaatcaaacgatcacacattactcataagatgagatccaaatcactactgacatctgtcaagaataaacatcagtataaggatatttagaaatacaaaaccattatatcaataatagaaatcatattcatctaataatataaattatatatatgttacctcgtaaattaatcatctctattacatcacattgcctaatcaggcaagtcgatactttaatttgataatcctgtattacattgcctgatcaggcaagcctgtaccatagtctggcacccatacatcgcataatcacatcaccaaatcaggtgagcccgtgccataatttaacatcatacataaaattattgtgtcatctaatcaggtgagcccgtgccacaacttggcaccaatatgttgcattacctaatcagatgagcccgtaccataatcttgtactcacatgtcactaccgcccgtacctaataaggtatgccgcaaggaagaaatccaacaatggtttcagtctatgcca

SEQ ID NO: 335684 - DNA, 1467 bp, Cannabis indica
actattaatgtcttattatgctttgaaacacgtgttataaccgtccatacatataatgtaacctacaaataacaaaaaagaaatttaattagttaccatatttgatatttattcctctattgaaaccctaataccacattctctatgaaatttgtgaataaatagtaccacaaagtgaactaaagaagagcacaaagcattatttgggatatgtgtctcccattttggcacactagttagctagtttctcacattagctcttgtttttattttctttttcagctcaacaagccaaaactatgaccagaaagaaggtgaagttggcttacatcaacaatgacaccgctcgaaaagccacttataagaagagaaagacaggtctgataaagaaggtgagtgagcttagtacattgtgcggtgtagatgtgtgtgcaatcatctataatccgttcaacactcagcctgaggtgtacccatctttaccaggggtacaatgtatagtggaaaagttcaagaagatgcctgagatcgagcagagcaagaagatgatgaaccaagaagttttcctgaagcaaaaaattggcaaggtgagcgagcagatgaagaagatgaagaaagagaatcgcgacgaagagatgaatcgactcttgtatgacaatctctctggtaagatgaaccttcaaggcttgactgttacagatttgaatgatctcacctcgctcattgatcaaaatttgaaggatattaataagagaatggaaaaaatagccaaagaaactaagattgctcgaatgacgacagatgctgcagcaacgtcaccaaatgggaaagtgaaagctaatgtggctgcttttgctactacttcgacgacagataacaatggtcgtggcaggggcatgcaaaagagaggagactcaaattaacacccgaaatcaagctaatagtaacaataacaataaatcgatgaagtttgggggaagggatgagatttttccattgaggaacaacaacaacaacatgaactttaactaaatattatctaatcgtggcgattattttgtgtttatgagttattgtgttagtttggtgtttcattttattctcttgttgttgtagttggttaaaattatttttatgttgttttaattaatgttcgtagtatgtagtttttatttcaatgaagtttcgtttttattttttattttcttatgttgttctttaaaaataattggggctttgtttagattgtttggttttattattttattataatttttttatatatatttaatatatttcatgaaattatatttgtgacagtcagtagtcccgtgatccgtaaggagaaataccgggtaagctgtacaatctcacaccgcctggggaaggtcaaaggggaagaatccaaaaactgtgtaggtatgggactacgacagttgaatagagtttaaatggattgattggtac

SEQ ID NO: 335685 - DNA, 580 bp, Cannabis indica
ttgttattacctagaatgtgacctcatgtgtatagactatgcaccgaaggcggataggtagaggtaactgcaagctagctgggctcggggttgctggtgagggtgagaaccctcctccgccaccaaactaggaagagtcatatgctgcgatgaaagagactatccgacagcagggtgaacaaattcaagaattgagggagcagcgagcttagcctgctctaaaccctaatcttgatcttccaatagctctggtagtgccatcggatgcaggcaatcatttggaatcgttgtatgaatggtttaagaagcaaaacctaccaatgtttgagggtggtactgatccactcaaggcggagcaatggatgagtatgataacatccatatttgattttatgcgggtcgaggataatgaccgggtcaggtgtgctatctatatgctgcaagatgatgcctgtatttggtgggagattgtgtctcaaggtcatgacctgaataacatgacctgagatgccttctggactttgttttatgaagagcaacctgttcaggttttggatagaaaagaaaaagttcttcggaa

SEQ ID NO: 335686 - DNA, 813 bp, Cannabis indica
agtagaaacactttccttttagtgtatcaccaggagcagcagcctttttgttcttaactgttttcacagcttgagctcgcttcttggtatttttccacttcttctttgtcttgggtctggaagtagaggcaacgtgtgcctcaggtttaatcgtcccattaccatttccagaattctgaggtttactccctttcttcttgggtcctccaatcaaattttcatatgtctgaaggtcattgactaacgtgtgaaagtcttgttccttcttattcatgacataatttgatgtatagggcagaaaagctggagtcagactattcaagataagactcacttgagttgtctgatccatttcagcaccatgattctgggcttcctggaaataacttgccatttggagaaggtgatcacgcacattctgatggggttccatccgtgcattgatgaatttcttagtcgcgtcaaagtgagactggatagatgccattctgaatagctcagttaactgcgtcattatttctgcagccgtgacagtgtttgcaaaccctggtttttaatgtgtcaaccatgctggaaagcatgaagtatcgagctttgttgttagcattctgccaacgctcgaacttctctttaacaactttagttgcattgtcacccggctgttcaggagacggctcatttaacacaaacagggcactttcacctatgagagcaatattaatgttctctttccatttagggaagttagatccacttagcttattttcagtcaacagtgataacatgggatttgacatggctatacaggatact

SEQ ID NO: 335687 - DNA, 1540 bp, Cannabis indica
accggttgcaacacaggcccccaggaaccggaattccggttctgagctgggaacccaaaaattcttccccttaattcaaatcaatcccaaatcttctcaaaacttccagaatacctgtaaacattatactaaaccaatcccaagcaataaaactcaacaatccacacaaattctcaaatcaccattagagagctaggtttgagttcttaaactctaactttgctcaaacctcaattcaacctatagatttaattcaaataagcttaaacaacctcaaaccatttccagaataccaaattaaaccatttcaaatcacacagcaacctagaacctaaattcacatgtaaaacctaacctaaacttaagaaaattaagaaggaagagttaccttggattaaagctcccaagaatcactaaaatcccttgattcaaactcaaaatcccaactcccagctgctgcccaagagaatcgaaagagaaagagagagagaaaagaagagatgaaccttttctcttgatttccttctaacttaagaaatgtccaattttcttttcttttcttttttttaaataataatcttaagctcagccttaaaataaccccaaataagacaaaataagcatttgccaaaaagacctcctcgcccttcaagctaaataaattaactataaactcccaagggaaaattggtcaaataaaaaacccccaaaattctaacacctctaacattaactataacaccccactaatattctagaaatacaaaatatgactctctacaggcccaacgtcgctttccacagcttccgaacacaaacgcagaaattggataatttacattaaatagcataataacatatatgatactaaatatatttccaaaacatacatttcataaattttaatttaatctcattcataaaccctaattatataataattcaaggtactaatcatatacggtctttacatcttattataggtagtagtgacgaggtaataagtcttaagcagcggaacttgaggtaagtaaatcaagtagttttatatgtgttgatctggatattttaaattatgtgtgtatttaaatatcggttgtgatttattattatgaatgcgtatatagtattgagaatgtgtggtatggacacaatatgtgtttgtgaatcagtgtatattatggttgttatatggttgttatgactagtacatgttgtatgtatatctatgtgttgcatgttgtatgtagtatgctaacgtttcaggtacaaatgaggggccatgatggggtatgatacggggtaaggccgttgaatgtagagataccctaccctgcatttgtctgattcgtgtatgatattgttatggtaaggtatgatacggcgacagtgctgttgaatgtagagataccttattccataacaatggtagggctaaatgtgcccaagttattatagggccaatgtaggcccagattatgtatgtaatggtcatgatatgatatgattgtgtatggttatttcatagtattatggttat

SEQ ID NO: 335688 - DNA, 513 bp, Cannabis indica
tccctctaaattattgccgcaattttttgtaattgcactttatgaatctgacttctaaaacacctccaaacaacgaactcccttcatctttaaagtgtgcgtgcttacttcctcccgaagtaaggcttgaacaagtcttctcccgaagaccactctcttgttcaatcaagtcgttctaacaaaccctaagacagagtaagaacagatatgaaaaacactagaacctagatgaacaactaggttctcacaaaacaaactctcttctcacaaataagaaaaatgcaaaaaatgaaaactagaagagttgattcgaatggctgatctctaggttctatttatagaacatagaaaccctagagacagccacaaagtcgaatctacagctgtacaaaactttcctaagaaaaacttgatctgcagcatcagaaacggattctgacgcagcaaatcagaccagaaaaggaaacttgctaaaaacgagtctggtcttgtattgggtcttgatacatgcta

SEQ ID NO: 335689 - DNA, 582 bp, Cannabis indica
ctcctatctgaagttcacgacagattctgtggaaatcatgccgccgggcagagcttatccaagaaaattctaaggcaaggttatttctggccaacaatgattgaagattcaaaagcctatgctaagaagtgtgacaaatgccagagattttcaaagataccacgagctccacccaacgagttaacacagatgcaaagtctgtggccctttccaatttgaaggattgacctgatcggacaattacccaaaggtaaaggcggaatgcagtatgtagtggtagcggttgattactttactaagtggactgaagctgaaccactcgaaaccattacatcaaagaaagttcaagactatattgtgaagatcataatatgtcggttcggactactgtacaaaatagtctcagataatggcaagcagttcgatagccaatccttcactgatttctgtgcgaaccaaggtatcgtcaaaagtttctccatagtggcgcatcctcaagaaaatggtcaagttgaagcagtcaacaaaaccttgaaggatacactgaagaaaaaactgttggaatttattttaccaggatct

SEQ ID NO: 335690 - DNA, 567 bp, Cannabis indica
gaacggattttcatcacatttttgcagataagactggcagaatctacgagtatggtctagcctaccacagtaaaagcagaaatcaggcaatcgttcatatttgaagtccaaccatttggtaaattccctacccatcttaagaaaacgaatgttaatacccctcctaagtggtttattaacatccagaaggaatctaccccttaagtaaggcccagtgccttccttaatggtatcctcgtcaacttgaatgaggtcacccaaacctgaagctataagtttggcaagatcataggacttacagcgaaagggaatgccataaatttgaacccagaaagggatataatgcaagaggtcagctgtaagagggaaagagtgatcaggagatgcgaaaacagtcaagctttgagcaaaatgccaaggctgcccatcaaggattctcttcttatcgccttcgcacccaaacgtgacaagaaacaatccctcagagtgttcagagaccacaacaggaaatcggcattgagaggtccacatttgtgagagtgttttcatgagggaaggacggttgaa

SEQ ID NO: 335691 - DNA, 604 bp, Cannabis indica
aactattgtaaagtttaaattattacaagttttattttcattcagtttattacaaaagtttaaattgtgcgctattttgattagtaatcccgtttaggggattagggtttcgtaaataacttgggtagcgtgcctaattatttagggcgttacaaaagatatttcttttgtaatgtaaatacctcactcaaacaagttgcaaaagtaactcaatacttttataacttttgggggcatatatggtataggccataactatactccatcaattcacaaaataaatctcaaagtcattgccaacacgtcacttatgagcatgggattttaaaaaattttgccatgaatattttttcaaaatttcctctcgaatagggggcaaagtcggatatcgacgagataaaagtaaatctcaatgtcattactaacacgccactctaagagcatggaattttaaaatttttgccatgaatatttttcaaaatttcatctcggacaaggggcaaagttggtacactaaccagataaaagacaaatgagggcgctccaaggagccataactcaaaaaattctgcttaccaaaaacatctcgaatggcctacattag

SEQ ID NO: 335692 - DNA, 504 bp, Cannabis indica
atagtatttttgaaaaaaaaatatcatcccacaataaaaaagtaaaaatattagaaatttcagtatagaaggtaaaaaagtccttatattttcaataaatttgtaaaagaaaaaaagatgcggtgtggtcactatttagatcattgatcaaaacccatttgtattctctaaaaaatcatatataaacttaggaataattacataacgcaccatttttttataaaatattgggatattggcggctaaaccacctgaattttacggtttgtaacacttaaccacaaaaaccgaatttttggcggctaaactacctaaaccctggttccgttttgctctgcacacctccgtccaaaaatcacagttaagtgccacggtggactgtccacgtgtacgcacttgtacacgtggcaaatttttagtgatccacgtcattttaattttaaaaaataattataaatattaaaaaaaattaaaaaaaaacaatttataaaaattaattttttt

SEQ ID NO: 335693 - DNA, 936 bp, Cannabis indica
aatactattctttttacaagagtgagagttctaaaaagtggaaagtttggtacgagtctcatcgaccacgtccttgtgaacatacaccatttagtgcatgttcttatgatgaagaggaagaacaatcatacaactcttactatcagaatagtcttgatgattatagttggaagcctaagtacgactataatccattatatgagtggaattgtgaagaggaagattcttggttttcttataactctcaacatctatataacagttcccttaatgacactattgttgagttacaagcatctatggttacaaattgtgagatgatgaaagacttacttgctgagttgaaacaaattaagcaggaattgagcaagttatctggtcacctggtgaatgaagcactaatctccaagactaccttccacaattttgacgaggtaagtgtcacctccacaaatagtcgtgaaaattttgaagaatccattctaccaagtacatatgtggattaccatactgacgtggtacccacatcattcatagaggaggataccaccactattcagaatgaagctctttctcattctacaattcttcgcctaactctggaagaaaagaaatgctatcatactgatgtgatagataaagtcgttgggaaaattagaaaattattttcacctagtcatttacactatttcctctatgacttagacaatgaccattttcttttttctgaaaatgtaactaatgcttctatttttgagacacaggataaaagaaaattcatttttgatactggatagtcaaaaatattaagttggtaagccttcctgaggagacttgtctccggtttgccgagaccaatcaggttctatctttccttgttttcttttatttttggtatgttttaacctttgttagtttatttcttcttttgttttt

SEQ ID NO: 335694 - DNA, 836 bp, Cannabis indica
tcaggttttagcaggggaggtagttgtcagccatggaccaaaaaagaggcatccactacaactagtggctcgggcagaacaagaggtttcggggaaaccaaggtcgaagcaatcgctagagttgcactaaaacccgatacacttacccagagtgccccagtgtagagggcaagggtgctatgagtgtggcatgccaaggcactgcaagagagattgtccccaagtcagatctaaggcacgaaagactccagcgacccactccagcaagcgtatttgccataactcttactgatgcagaagccagcccttcagtggtgacaggtcagctcttggtcaacaacttttacttctctgtactgtttgactctagggctacacattcttatgtggcagccagaatctttagtaaattggatagaccgtatgatagttatgaatcagggtttggaaccctattacctggcagagagttagttatctctaaaaggtggattaggtctatgctgatcaggattgacgataaggagttaagtgctgacctaatagaaataatttagcagattttgatatcatactatgaatggatttcttgtccaactattcagccagtagtgactgtaagaggaagattgtaatcttccaaccagatggtgaagaaccgtttgtttttgtcagttcggtttagggatcttggatactggtgatttcggccttatcagctaaagaattgttatgtgatggatgtctagggtttctagccgtggtattggataccactcgacttgactctgttcggccagaagacatcaaggtggttcgggaatttttagatgttt

SEQ ID NO: 335695 - DNA, 740 bp, Cannabis indica
aaataatttccaacagtttcttgcatttaggacactcaggataagatcggaatgaagatccgcggccctaacggccaactctatttcctcgaaactttctatcaccccttgatgttctggaagcatcagccttccgtttgtgatcagggttacaaccgtcggtccccttactgacattaccactagtaggaggattcgatgccatgatggcatcctttgcaatctgttcctttattacatgttgctcaacctcctcatcaactaaggctagctctaccactttcttgtacaaagtgtcatgtgaagtggtgattttcaagtcccgactgattgtggcattcagtcctctcacatatttctgtttcctggtgaaatctgtggccacccagatcaccagcaaacttagacagccgatcaaactccagagtgtactcggccacaaacatcttcccctaagttaatttcacaaagtcttccatgtgtgaattcctcacagcaatgttataacatttttcctcaaacagactcttgaactcatcccaagtcatcacactgacgtcacgagtctgtcccacaatatcccaccagacgcgggcatgatcttgtcacataaaagctgcacaattcactctctttgttcccgtcactcccatattgtcaaggatacgacttattgtacttatccactacccgaccttaattatattaatacctcccaaaaaagtcggaggttgcagctt

SEQ ID NO: 335696 - DNA, 1700 bp, Cannabis indica
aaaccgctcaaacacagaatctctatgcagcattataaactcctagttacccaccactcgcacaggtgctggtggtaacacttgctcaacaggggaagccgatgctggttgccttaatcgaagcaactcttcctcttgacgaagtatgataccttgcatttcttgaaacatctgctgccagccagcaggaagattagcattacaaaccccccacattatcccccgaattcggcggaggtgtaggcagtgtcggtggattggtttggtcaaccccaggctctacttgcttgccctgtggtctagatgattgcggagggtccattttacaagtacccctataatcaacaaccccaacgagttaagcaccaataccacacttatgcaatctccactatttactccacataaataaacacttaacatacaacattttaagcatggcatcacatatcacataaatactctagatgcttacatactacctaaaatggaaagtagtatataaataatcacataagcagtaaagtatttactctcaacacttactacaccatgagttgagcttgtctctgacaatgattatacatgttcggccggtatacaggaagtttaaaaaccttggcgctctgataccaaattgtaacgccctcactattaggcacgttaccaaagataactaagaaaccctaatcccgtaaatgtgattactaaatagaaaagcacgggaaatttaaactttaaatgcaaatggaatgaaaataaacttgtaataattttaactttacaaacaaacaaaagttacatgtctcgtgatccttaaaacaatttacaaaatattacaagtctatttccaatagctgacctaagcggcaaaacagagttacaaaaaaaaatcatcactggtagaccccaacctgcttggtcttgtgtggcctgaacatgtacatacatcgcccaactcccctactcatggctgattagaaacaaattttccctttcctggacagtagatcacccgtgagcccagcccagcaacacagtagaatatatcgataatcatatataactcatcacctaaataataatgtcatctcatatttgtctgtatgacagagacccgcgtgttacgctcacacacctaattatgtctatgttgcatagacctacgtgttacgctcacacgtcgaattacaataagagcttagaacggttcatctcggttctagttaccgagtccaacctgattatacctggaacacataaccgtgaatttcaatatacatctatatacatcgtggcatttcaattacataatgactgtttattagggtaataaccctaagccaagaaatcgctcactttagagtaataactctaaacctagtttctagtctttcatatatatcatattgcatataagcgtcattgcgcatatctctacgtgctaactactttcttacatgatgtctcgcaaatatggagattccaaattcccaggtgctcctgaccaagttccagtaatcctagtcacaattcttggagacacaagtataaactgggcatttaaattctagatattcacatagagagctttccaacgatataaagaacattccaaatggagtcccgagtcaaaagttatgatcaaaacaaaaacctaaaaaaaacatactataatgccataaaatggccgcggctac

SEQ ID NO: 335697 - DNA, 550 bp, Cannabis indica
aaattgatgatgatggaaaggcaacacattcggatggaaatttgacttcggaggttttggtgggagaatcaagcaaggtttttcaatttggggctgtggagacttgcccagaaacgtctccaaagttgccacgaaaatacttgcttggaactgtcgcgggctcgggaataccgcgacagtttgtcaactgatggccttaattctgttgggattttataccctaaataaaatccattacaatctaatatgatttgtcaacaataaaatattagatatcatttatgcttacatgttatattcatgtttatggtttaatttatatatatacacaaaatctgttaaattcagaacatatagtcatacacaattgcagtgatgtcaacatagtggaatgtaattgtaattatatgcttcgaaagacaaagtccctgtttcatcagtgcattggatttacattaatgtgataatcagcgatgaagtatacttgcactttgtataagtgttatgttctttccaaaacattggcatagtatactagtctcgaatgtat

SEQ ID NO: 335698 - DNA, 887 bp, Cannabis indica
ctcttcctcgccctgtggggagtgaccccaattaaatcaattccccatatagaaaatgggtaaggcgaggttatcattctcagtttcgttggcggtacgcgaggtatatgtaaaaatctctgactcttatcacactttttgacaaactcatgggtgtccttattgattgttggccaataatatccttgcctaatgatctttttagataggctctgccaacctgcatgatccccacaaaagccttcatgaatttctctgatgatctcgtttccttctataggaagaacacaccgaagtagaggcatataataacctcttctgtatagtttgccttcaattattgtgtatcgaggcactgaatacaagagttttcgtgcctcgtttttgtcagttggaagttgtccgtcgagtagatagttgattataggagtcatccatgtaggtgaactgtctatcatctctatgtcttccttttcagatatacttggctcgcttagcatctccactggaaccaagtttaattcatccaagtcgttctgcgaggccagttttgccaaggcatcagcgttagagttttgttctcttgggattcgctcaattttaaagtaatcgaatcttttcaagttcttccgaaccttctctatatacttagccattttcaggcccttagcctggtattccccgagaacctaatttacaatcagtggtgagtcactatgacacatgagattcttgaccttcagcgcctcgactatccttaagcaagcgatcaaggcttcatactcagccttgttgtttggcgcatcgaattgaaatctcaaagcataatgaaacttaaagccttttggtgaaattaatattacccctgcacccgagccctgctcatt

SEQ ID NO: 335699 - DNA, 644 bp, Cannabis indica
aagacaaagttatgcttccttcgcctcgctgtatccaaagcaagctgacacgccgccgcctcaccaataagagcgtccctgaaattaagggaggacgtagcagcccacagaaccgttcctgagtgatctctggccagggccgcaatgcacatggagtctccgccaactttaacatcacagttaattttgatccagagttatggtatatttgtcttatatgtatatgatacactccaatttatttaagtattctagaaaaaaatttagtttatttttttttattatatcgtactaagaatgtgaaataaagatcagaatttttgtaacctagattcatgctctgaggtaactttacggataagtagccgggaataataattgaatttgtgggcattttggctgaaaaagatacttggatttgtatattattaatataaagatatcttgtgttaaactaaattatttttatgttattgtaaaatttgttataagttgtttacactatatatcaattcaacatgcaaaaccagcagagagtcaccatgaacatcaacgagagaagatcaacaaatgaaagatttccataaacacggacttacccaaacattttgagaacaaatttgatttgatttgatttttttttt

SEQ ID NO: 335700 - DNA, 360 bp, Cannabis indica
attgtcgagtggttattatacacaataaccttgatccccacaagatacgatctgaatttctcaaaaggcaaaaaccaccgctagcaactctttctcagtagtggtgtagttaatttgggcatcaacaagagttttgcttgcgtaacaaatagagtgaaagatcttattcttccgctgcccaagaacacctccaatggtaaaatcacttgcatcacacatgagttcaaagggcaatgaccaatcgggtgcaacaatcacgggggccgtcacaagagctgtctttaacttcaaaaatgcttcattacattcagcggtaaactcaaatgacctattttgttccagcaagctacacaagggttt

SEQ ID NO: 335701 - DNA, 926 bp, Cannabis indica
catgattatttcatgattatgcttaatgtataagttctattaagtccagaacatatataaatatgtatatatttgttcatgattatagtgtcgtcagcacagtgaaatataattatgattatatattcaaaagtttaattctcataatttgtcagttcactggatttagacagacataataatcggcgataaggtatacttacaccttagataagtgttatgtgtttgaatatattttatcaggatctagatttactaccatgtatgttatttaacatcctaaatatgaatttcgaaaacaatataatttaaacacatataaagtttgagaaaccttacattgggtgcagcgaaattaaatgactcattccgctcagatctctaacccttgtatcctttctatagcagagtatcactaagatctgagcccgattctccttctcttgaattggattctttacagtcttacacactatgattgagtaccacttgatgtgtatgggaacttactctatcattatggggttcgaaaatattgaagagagaaagagagagaggaaggattggaatgagatagaaaagatggctcaaaattttgattgaaggcaagtgtattcatcatcttttaatttgaggccatcactatctatttataggaatccaactaggttaaggtttgaatgatttgacattaaaaaatgataaaataaatggtaaaagaagccataagtggccgaccatggatgtgggctcccactttgcaattttgctattttttcatctatttatcttattttctcaaaaatgtcatttttccaattcaaccacttaaatgccaaaactatttatttaataattaaaattaattatcaaataaaattgccatctaacatatttattaattagacttaataaagtctcttaat

SEQ ID NO: 335702 - DNA, 575 bp, Cannabis indica
cctttttcagcttgaaaaatcttcctattctttaagctatacaacctgtatttaactatttctttaatctcatttacaatcttcaatatagttaaacaactactattatgcacacaaaaatttctatttttccaaagcaagtaaacagtggcagtaaagagcaaaattatcacaccagaattcttgctacaaaacaagcagcgccacctgttgtagtccagaggccaggctgcaacaccacaccagtcaaagatctacttcacaacctccctagagacacatcagttgaagaaaagatgatggtggctctccttttcaatgccacaaactgggcagaaactagagtctaaaataatgtgaaatttatggaaattatctctagtaagcaagtgtccatgaaccacctgccataagataaatctatgcttgggcagaaaaagattacaccaaacagatttgtaatagctatctatgttcagctttaaagttcccatatacaatctggcagcaataaacttacctttccttacagctgctatcaccataggcttgctgaaatggcttctcaaatgaca

SEQ ID NO: 335703 - DNA, 980 bp, Cannabis indica
ttttcacgaaaatatcctttcgttttagtccatattattctatttgtttcagattttattaacatagattatttaaataagataaattgccattcaaaaaaataatataataaaataaattggaataaaaaaattaaattatttgttctcagaaatatcttttaactttgaatgatgtgtttaaaaatattctttattagtaacaatattacgtacaattttaacaaacatttacacaattattttttgcatctctcacattaattttaaattataattaccaaacacaagtcaacttctatatatacttcagccccatttcctcaaatcatgaataaagtaaattatatttattctatatatcaatataaaggtgataaataaaaaacactaaatttatcaatcttctttattttttcttctattttttctataatttatagttgtcaataaattaataataacaataaaaaatatctattttctactatatattgtttaagtaattttttttttaaggaataatatttatgtaactaaaattcaaataagttgatattggaatttaaataattattatattgtaataaataagatcgattttgacttttttttttgttaaaaacaaaacaatatcttattgatggtatgtcaaaaaaatatcatattaatggtagaagtcacttggattctactttccataaaaaaaactaatcaatatcacaatcatttacatttttttttcaattatcattactatacgtaccattatcgcaataatcaattggaagatttgtttgctttgctatatatgtgatgagaaaaataatttgagattttatttggacagtaatttaaaattattttaaaaaatatatatacataaaaataaaaatagaaagaaacaaattgttatatatatctattctatataaagtgtgcctaattcttggtttttgtagaaatttatgggtaacttt

SEQ ID NO: 335704 - DNA, 742 bp, Cannabis indica
ctgcccaacttcccatgacccaataattcaagctcaagtggtaaatgctccaacaacaaccacaagcaagggaatgggaagaaaggaaaatttgccggcaaaattgaacaagctccccgcgaaaatcaagtcaagtacactggagtcactaacttgactgaagatatagaacgtgtttacatggcaactcagtcgctggccccttataaaaaacccggacccatgaagaaagatgtcagcaagagggacaagacaaagttttgtcggttccacagagactacatccacgacactaatgaatgcaacaacttgaaacaggaaatttgattcctgataaggaaaaacaacccacacctgaaaatgtatgtcaagaccgatcagggtcaaaggaacgacaataaccaagatttgctacccccaccattagatgggcatctgcaagttatcgtttgaggcccgcatattgctgaagattcgggcgaagcttggagaggtatgcccgaacaacacaacatgagcaagaagaagttatcctagtcttgtaagaaatgaagcccaaagttccacgagcagaagagacgaccataaccttcaacgatgaagacgctgtcaaaattaaatttctgcacaatgacccgttggtcgtggaagtacagatagccaacaaaatggtggctagaaccatgatcgacaatggagcctcttccaacatcttatttaaaattgcttatgaaaagatggg

SEQ ID NO: 335705 - DNA, 814 bp, Cannabis indica
gcaaaattgtgaattttatgactaaagaaaatgtgatggtagagaaggttgatactgaatacaaccaatcagatcatattacatagtttatgtcaaatattatatttgatcaagaaattaagtatatgagattaaaataaaatgtacttttgttttatattagtgcaagtggggctttgttggaattttatgccttaaataaaattcaatttcattgcaaccttatttactttcattaaagatcagaaatcatatcttgaccttatcatatgctttgttcccatatttttttacatgattataggtttaatttataagttctattaaatcccgaacatatagttatacacaattatagtaatgtcatcacattagaaagtaattgtgattatatgattcaaactatttagtcccatgatttatcagtacattagatttatacggacgtgataattaacgataaaatttacttacacattaatatgtagaatgttctttctagggcattagcaaagtatactagtatcggatgtattggctatacatcagactggaccaatattaacagtgaaaaagatatcataaacttaccgttatattttttttaagttaatgtcacttagttgatcttagattaaagatcttaaccccgagatgattaggttctggcttaaatatattacatgtgttctttgacttgtttgttacagatgaccattaggatcgatccaatacttacatcttggggacatggtactataattgagtgggggtattaatcgtagataaagaatctatagcttctattactatt

SEQ ID NO: 335706 - DNA, 638 bp, Cannabis indica
ctgggaattcctgaaccctcatccggaattccggctcctcacaggataccctcaaaaattcaaaactccctcaaatcaaatccaattcaatccaaaccttccagacctgttctaaataccccaaagaacatttctaaagcatcaacacagcccagaaaacaaagaatcgaaaatcaccattaaagctccaagctttgagttcaaaactcaaactttgttaaatctaactaacatgcatccaaattagttaaaatctacttaaatatgcatattataacctctgaaaactacaacaagcatcaacaacaagtgcagcaacagatttcatcattttctttaaaaaccatagttttgagttaaaattccatatattgataaaaccaactaatcatcaacacaatcatgcctgaatcaacattctaaaatcgtgctctaactacggaaatcaacaacaacatacagcagcaagaacccactcaaaactaagcatgcaacctatcaaactttctcaaaattacataaaacttaaaggaaagctaaggtaaacataccaacaacttgagatcactaaaatttgctaaaaagagcttgaatcaccaagaaaatggccagcttcttgctgctccaagagggccgaa

SEQ ID NO: 335707 - DNA, 756 bp, Cannabis indica
tttttgatcgaagattagggatttcgttttctttcttcttatttcatctttatgttccatgacaagtctgaatttttgtggtattaatccaaagttgtagatcaaaacttgatgatgttaagttcagactgaagggattttagtatcgtcttcatcaccagatttgaagggagtatagattaaagaaaagtgttgaagagagctcatcattcacacaaggggatcttgtgtctccaatcaatggtctttgttggtttgggtatagattcactgtattttgtaaaagagtgtattgtttacaatattgtttacagttggtatttgtaagatacatctttgaatatagtgaaagttattaccctggtacggggaacccaagcactagccgcctagaatgagtttctagggcagatgaagcttgtaatttttggtgttgaatcttagatttcggtttttatattcaagcataaatcaagataaaatcaatccaaatatgaaaaagataggttagccaaatacttggggtttacatcaactatctctgaaaatcaaggtgacgtttgagatagctctgcgtgttgggatttatgccataaataaaactcatttcaatctaatctgatttgttatcaatagaagattagaagtcatttgtgtttacatgtagttttcatgtttatggtttaatgtgtacaaaatctgttaaatccagaacatatagttattcacaattacagtgatgtcaacatagtggaa

SEQ ID NO: 335708 - DNA, 1290 bp, Cannabis indica
ttgccggtgaactttccctttttcccattcccttgcctattattgttgctggaccgtttaccatttgaacttgaattacttgggtaatgggggagctggatggatgttccagtagaacgagcttttgacttgccaggtttttgttcaccttctgctcgctggatagcctcttcaagtttgataaaaccttctgcacggtcaaggaaatcactcctcaagtcgactggtccgttcttccttatgtccttccaaagctcaccaaggacttcaatgacccccagtatcgcggacaacttttcatcctcagttactcgtgaaaacttggtcgcctccgtcatgaatctgttgatgtaggctcggagaggctctccttgtctttccattacttcggccagatctcctaagtgtaacggaagttgtcaagaggaggaaaattgtgcatggaactccaaggagaaagccttccatgagttgaactttccgggcgccaacttgaaataccattgttgggcagctttagagagggtgcaggaaaaactctgcaacatacatctcctcgtactccttgcaaatccatttgcatctcgaagtacttgaggtgggacaatggatcttcttttcctgtatacatcttacaagttggcatcttaaacttgtggggcaactccagaatattgatttcgagatcgttgttcctctcaccggccaggccttggaacatattttttagttcgtccagctgtgcctgcacggctcgactaacctgttcggtctcttggccgatctgagtcatatcagcatctttttgtgcaggattttaaacgcgggttccgggttgcatgattggcgtgtcaagcttatcatctacttctctcttcctgttccgatcatttctgagatcatgagtcgtccccaacctatcaaatacggaaacgcctgactttctcagtgactggttggtttggccaatttactgaccggcacaattaacttggttggagttattgggtatgacttctcctgatgaattactagacaaggtctgcccacctacaacttggcccccaagtggaacctgtgactggggatttgacggttgaccatttatagtctgagagatattcatcgctaaaacttcgtaggctgctaccaggcggtctgataggctttttgtatcagcacagcggcttgtcgactgcgatcgtcaatgactccttgttgagcccttaacgtttccactctccttatccctccattcggcaacatgcgcctctgctcttcaaacgcgag

SEQ ID NO: 335709 - DNA, 905 bp, Cannabis indica
catacaattctaacctaaacctagaggacattctataaatagaaagtattggcttcaggaaactcatgactttgaacattgtttccttcagacaaaagccaagccgccccttctttctcttttcttctctaaaattttgaattcccttgagtgaatgagtagtgcccacacacatcaagtggtacctcaatcatagtatgtaagactttggaaaatcaaccatcaagaaggagaatcaacatcaaagaaggagagaaagagatccggattcagatcttgattatggtctgctacagaaaggaatcaagggctagagatctgaatggaaggagtcattatattccgctgcacccaatgtaagattttctaaactttatgtgtttaatttcattgttttagaattcatattagggtgttaatcaaacatacttggtagtatgttacgtggacctactgaggctgaggttgaagagaaggcaaagtcaggtcgtttgatagtagaatactttaatggagatccatccattagcattggtcgactgtgcagcgtctttgagagttgcactgagaaggatgatgtttagaagctgggtttagtgttgtttgtagggctgcacatttggacccgcacacttgaaaaacccgaacactcgccccgacccgcagccaaaaaaaccgcccatcgaaaaacccgtatggtcgggtcgggttgaacccggaaaagcctaaaacgggtttcgggttcgggtgtggataagcagtttattttcggtcgggttgtaacttgtaacccgaaatttatattttttttaaaaaaataatattaataatacttaattatttattaatcaggaataggattcacattcagaaaaaaaaagactattcattactaagtctaaaaa

SEQ ID NO: 335710 - DNA, 1556 bp, Cannabis indica
atatcgtgtcaggaactgttgacgataacagaaatttcttagatctagtttaggttgaaggttgtttatcatttctatatgtagtttgaaatctgttttgtactaatgtttcatcttcacagatggtccctaatcgcaggcagaataccaggaaggacagccaatgatgtgaaaaattattggaacacacacttgggaaagaaggtaatgatgtcctacgataaacttaatcaaaaacactacctcagaaacaaagatgatcatcacaagtttatccctaaatccaacatcattaaacctcgtcctcggaccttcagaaaccaattacccttgacgaatactacaactgtttcaaaaaacaatattagctctgcaccagtaccacatgtagtagcctgtacacgtagccagcatgggcctgttttagaaatgaataataagaactggggctgggagagcttattagacatgatcgacagcgaggatcaacaatttttgagctctggttttgatgaagaatttaataatgttgcccataactctgaatttgaacctgtttctcatcgaccttcagaatcaaaaatcaaagacattagtactactactaataacagtagtatttttgtcattgatggctatcaaaattgctcaactgactttaccatggacatggacctatgggatctcggaatcactgccacatcagtaccagacagggaaatgcatgagcaaccttaaaattattactatactaattataataagaatttcacaacatcaataaagtattgttcactatgtcatagtggtataattattagctagatagaaataattctcctaataataaagttttaaatttggatgttgtctttagaaaaataaaaaactggaagttctgtttggcttgacattttgggttgtgtatgatttattttattttacttatctccttatattgtcgacagcttattattcattgtgtcgactaattttgtcatacataaaagatcctgccatactgttgtacgtagactgagcagcgcgcgcccacagataaatttgactgggtagtctagaaatgagcgatgcaaataagctttgcgtatgtaattgatctggatgggacgaatagctagcaagttgctagatatgataaaatcagttgaaacaggtagacaggaatgtgccatgtgtgatccggcacagtatccgacaaaacactagctccaccacaatttaattatgaccattttgctattcgctatttggcatcttaattttgaaaaaaaaaataaattaaatgtttatttttatatttaaattaatggatactttacatgttgagcattgctattaggcatcactggtgcgtagcactttctcaacatgtcacgttgctcctaaaagctattatattaaattatgtgggacccgatacttaattggactaatagcaatactgacacataggagggtgtttgccttttaacatttctctttacatgttacatcttaagtaacattacattcagtaaaaagaaaaaaaaaaaaaa

SEQ ID NO: 335711 - DNA, 645 bp, Cannabis indica
gttacaggtcaacttcttatcaataacttcaattatattgttttgttttactatggggctacatgctcacatgtagcatcaagggtacttagtcagttgggtaagcctagtgatatctttgagatagggtttggaactctgctcctagtggagagttaattatctctagaaaatggattagataggttctcgtgtcccaaaaattacagcgttgaaggctagagatttagtacgcagtggatgtgtaagatttctagcggttgtgattgattctcataggcccgagatacttggccctaaggaagtcagagtggttaaggaattcctggatgtgtttcccaatgagttaccaggattaccatcacagcatgggataggctttattattgattttgtacatggggcagaacctgtttcgaaagcaccttatcgaatggcttcagcagagcttaagaagctaaagatacaacttcaggggctgttggatctagggtttacccgaccatgtgccctcaggagctcaagatttgtttgtgaaaaagaaagatgggaatcttcggatgtgcatcgactatcgagagttgaacaagttaaccattaaaaacaagtatcctttacctagaattgatgacctgtttgatcaac

SEQ ID NO: 335712 - DNA, 1214 bp, Cannabis indica
tataaataaataatacaaaaaaattaaaattaaaaaataattaaagtttaaaatatggaaaaaaaaaatcataaatgaatttaataaaacttattaagttttgctagaaaagttgacgatgccagaaaagttattgccatcgaaaagtcattgaaaaagtcacaatcgttagaaaagttaccgaaaaagtcattgtcgccaaaaaagtcattggaaaagtgattagaaaaatcaccagaagtagatgtctcagatttaaataaaaatagaaccgattctataacataatgaataaaaataaataactcaaaccggttataattgaaatataactggttctgtaacataatgaatataaataactaatacaaaataacgtaaaccagttataattaaaatagaaccggttctataacagtgttataatgaataaaaataaataacacgaaataattcaaaccgattataactaagatagaaccattacaagcctagaaagaccttttgattcttggttgtgcattgatttacattagtgtataatattagtaagtatagcaagcatatgaaatattttgagttagtggattaatggttgtaattggcatgcagaaattgtttcaattgttagttaaatgtgttttatggtttcatgagttgaatgagaaaaatttttgaagtgcgtcaagagcataattgagttgaattctggactgttatgcataggtgaaattttttcataatcatgttactgagtctacttgaaaattgctcatgtgtctggggattgacttgtttaacttgtgtttttcaatttagtgtttactcgaggacgagtaaatgcttactttgggggaatttgttagggtgttattagtaatattttttaggttaattttagtgtgtttttaattaagttttacttttgtttgaagtaattttacgctttttgttatcatttatttttgcagatttaaaatagattaaacatggaaaatatggaaggaatatgatgaaaaaagatcaaataaaagatcactgctcacaaaatagggggtcaagcctaggcatggaatcccatgtctaggtccgtgtcgattgcatcctgtaggcgtgtggattgtgcaacacgggctgcggcataggaagtgcatgtcgcggcccgcccccttctaatccaagcagaataggtttcagcgtcttttatctttttt

SEQ ID NO: 335713 - DNA, 809 bp, Cannabis indica
atatatatatatatataggtttcggacttttcggattaaacctttttttgtacgcaatatacataagtcatatgcatgcatgtatattctatcctatacgaaagaaagtgggtgttctccataacctcgttgacgtcggctaaaatatataactctaatgaaatctcatcaatttgtgaccatacattaggtgagaaaaatcctcccttatccatgattgtgtcttcccacgttgacgtatatcatatatgtatattgatcattattctcatattattatatcattcatattcatacaattcagtttcgagatgtgaaaatatccataactgaattgtataaatagttcatgtattatatatataaataagaacaaacttacaaaaaaaatattagaatttaggttaatttttacaaaaatactgtcacacgaatttttttttccaaaattactctatttttatcaaaatacaaagtagaacaattcaaaacaacagtaaaacaccagtgaaaatttaacacagtatactgcagtatgaaacttataaaaaaatacagtaaaaaagtgaaaaataccgtctggcagtatttttgtaaaaaaataacaaaagttagtataccatgtaaatttcgatgaaaattatataaatcaatacaaaatagttaggcatatgtaagtgtaacccaccaagtctttctatcacctgggcccaagcctaataaaaagtaaggataccattctattacaatcattttaatttaggatattggcggctaaactacttgaattttacggtttgtaacactta

SEQ ID NO: 335714 - DNA, 1952 bp, Cannabis indica
tattcaaggatttcctcgatatctgtgtaattatgtttatcgatgatatccttgtgtattctgagttagaagaggagcatgagctacatctccgtatggttctgcaacgactttgagagcacaagctttatgccaaatttaagaaatgtgaattttggttatcttaggtgtcctttttagggcacattgttagcaaggatgagatcaaggtgggtccaggaaagattaaatctgtcaggcattcgccgagaccgaaaacagtgacagaagtcagaagcttcttaggtttagccggttattatcttcagtttgtagaagggttttctaaaatctcaacacccttaaccgagctcaccaaaaagaatcagcgttttgtatggtcagacaaatgtgaggctagttttcaggagttgaaaaaaaggttgattacagctccagtgctagcgttgtcttctgacaaagaaaagttcgtggtttattgtgatgcatccagacaagttctgggatgcgtgctgatgcaagctgatcgggttatcgcatatgcctcccgtcggttgaaagactatgagcagcgatatcctcctcatgacctagaattggccgtagtagtgtttgctttaaaaatttggcggcattatctttatgaagaaaaatatgaaatttataccgaccataaaagtctcaaatatttctttactcagaaagatttgaatatgtgtcagaggcgatggttggagttggttaaggattacgattgtgagatcctttatcacccttggaaggccaatgtagtggtcgatgccctgagcaggaagggtcccgggcaggtaactagtatgattcagatttcacctcagttagcagaggacatggttagatctagcattgagtttgttgtagacaagcttcacaacttgacgctgcaatctgatctgttagaacgaattaaagtcgcctagatgactgatccagagttagtaaaaatctgagaagaggtttcaactagtcaagccagagatttttaacagtgtcagacagtgggatgttattgtttaaagccacggtttttgttccaaatagtgtggaacctagaaataaaattctcgaggaggctcataccactccatattccctacatcccggcaccaccaagatgtatctggatcttaaaccttacttctggtggagcagaatgaagaagaattttgtagaattcgtatcgagatgcttaacctgttagcagatcaaggatgaacatcagacaccggcagggttgttacagcctttaaccctacctgaatggaagtgggaggacatcacgatggattttgtggttgggttatctataaccacaggtttatttgattctatttgggttgtggtggatcgattcacaaagtctgctcattttctaatagttaaaaaaacctatttagtggatcagttagcagagttgtatattaaagaaataataaggcttcatggggtaccaaaatcaataatttcggacagagatcagaagtttacttccaagttttggtagagtttacaacgagctatgggtacaaaactgaaatttagtacaactttccatccttagacagatggacagtccgaaaggatgattcagatattggaagatatgctacgagcctgtgttatggattttgagggctcctggaacaagtatctaccattgatagagttctcttataataagagttatcagagtacgatagggattgctccctatgaacttttatatggaagaaaatgtagatgtcccatccactaggataagacaggggaaaagaaatacctaggtccagagtcagtacaacggaccaataaggcaattgaaaagattaaagctagaatgcttgcctcacagagtaggcaaaagagttatgcagatccgaaacgcagaaatgttgagttccaagtaggggacc

SEQ ID NO: 335715 - DNA, 718 bp, Cannabis indica
taatagcaaagacaaaaatgataggtttaaacctaaagctgtagcaggaaaacaatgctattactgtaagaagaaggtcatttcgtgatgattgtttggcacttaaggctaaactgaaaagagaaaagaatctggaaagaatggagaagctaacatagcagatggctatgaatcagctgaggttctagttgtgtctggtaacacaatagatggagcctggatcttggatttaggatgctctttccacatgacacccaacaaagaactattcagttctttttcagaagaacatgaaggaacggtgttacttggtaataacagagcatgtgaagttaagggaattggttcaatagaaatgcaaatgcatgatggtgtttccagaattgtacaacatgtgagatatgtgccaaatttgaagagaaatttgttatccattggaatgtttgacaagaatggatatacagttaagattgaagatggaatactcagaattttcagaggttcaaagattctgatcaaaggtcttttgaaaaatggactctattaccttgatggtaaatcagttgttggaatgctacaccagcagtgagtcacaattctgagatgagtacaaagatggcacttgaggttaggtcatgttagtcaaaggggcatggatgaactcagcagacaaggtattcaagggtggcttgaagagcaaacttgaattttgtgaaga

SEQ ID NO: 335716 - DNA, 634 bp, Cannabis indica
ctcaattaattgattttaataatcaattataattctgaaattagactatgtctagtttatgaatttttcactaagttatggcttgattgtgaagaactagaattttagcatttatttgttaattaagatattttgtggagtctaattaataaataatacaaatgacaattttatttgataattaattttaattattatagttacttttggcatttataggattagaattgcaaaatatggcctttgtgaaataatagagaaatggttaagaaaaatagcaaaaatctaattagtgttgggcccacatatggtcggccactgtgctcctatttttgctattattttatcatttttttattccaaataattcaatcttaaccctaagtgaattagtataaaaagaaaataatagtctcattatccaacaatttctttcaaacctagttttcatcttgtcagacaactagtactttgagacttcttcttcttcttattttctcttttctaattcgaattctatagtcttcttcacaaacaaaattcgagccttagtgattgagtgcatgcccacccatagtcctcgatcatagtgtgtaagactgtaaagaattcaaacaactgaagaagtttcggg

SEQ ID NO: 335717 - DNA, 707 bp, Cannabis indica
tcttcagaccatgctaatttattgacttttcgtcccgcttggcatgctttttcagtaacgagaaccccaaaagaagaagaagattcaccttgttcttccctttttgcctcttcattaagcaaactatctttgactaaatctatagtcaaagtcccttctggcatggaattagaaaccgttatcaccaacattttccaactgtcaagtaaagaaatgaggagtaatgatgcttgcatctcatcatccatattcatcttcatggcaactaactggtatacaagactctgaaattgacttgtatgctcaaccatacaaccaccatccttgtacttcaaatttacaagtcttctagtagagaaattttattaccagccattcacttcgcaaagagattttctagcttttccaaacgacattaactctggtttcattaaaattatgctcatgaagatttatatccatccatcgtctaatataggcaatagcttttctatgttgaacttcccattcctcatcatctaacttagatggcttctcactacctttaataggtttgtacaaatctttacaatagagcaaatcttccatcaattccttccaagcagaatagtttgataggttcaatttcatcattccatccgacttatccaattttcaacacacaagaattcaacaccaatcaactttggctctaatatcacttgttg

SEQ ID NO: 335718 - DNA, 582 bp, Cannabis indica
ggtgctctactgtgcaggaaagggtaaagttgtttctgatcagccatgagtatgggagctgaacgaagaatgtacatgtcgggccacactagaccaagcgggttggggtctaccagtgatgtcttttgagactctgttttgccgcttaggtcggccaaaggaaaagaacttgtaatattgttttgtaaatacttttgggatcccaacttttgtaacttttaaattataaggtttaaattattacaagttattttcatttcgtttattaataaattttaattttaactcttattttactagtaatcccaattaggggattagggtttcataagtttattgtgtatcgtgcctaattatttagggcattacaagcccggtcgcccaagagaattatacttgtcgttcaaacggttgggaggcagatgagctctgctccaccctgacctgcgcccatcagttggagaaaattgtgactgtagctagcatcaagccgtccgcatctgggttctttcatcaattgcctcgggacgaagagacgcccaatcacaattatgggggtttcggagcttggagctagaccca

SEQ ID NO: 335719 - DNA, 586 bp, Cannabis indica
atgttctggacttaacagattttgtatatattaaaccttaaacatgaaaactacatgtaaacataaatgacttctaatattttattaataacaaatcagattagattgaaatgagttttatttagggcataaaatcccaacaaactcccacttgcactaacataaaacaagtagtgcatttcaatcaatcaattgtcttgatatccagatcaagggtagtatatttgactcaatccaaattactggaactataagtctgtggtaagctactgctttctccaccattacttccttggggtaaataaaacattatgcaacattatttactatatggattactcatctagggatacttaattctttactgcttattaaatgcatctgaataaacagaagacatatctctcattctatacaaaaattggaatagagataacacagtgtagaatttttttcagttgaataactttctagtatttttgaaatttcaaagttatgtatcttcactgatggagcttaaattattattgatggatttttatatcctactagaataattcctccacccccagagtaaccaccatct

SEQ ID NO: 335720 - DNA, 360 bp, Cannabis indica
tggaaaccggttccacccctagtgccaaatatatcacgaagtcaatctcccgctgaggtggtaaccctgaaagttcttcgggaaaaacatctaaaaattcccgaaccaccctgatatcctctggccgaatggtatctggccgagtggtgtccatcaccacggccagaaaccctaagcaaccaccatgcaataactccttagctgacatggccgaaatcactgggatccgagatccccgaaccgaaccaacaaacacaaaaggttcttcactttccggttggaagatcaccatcttccttttgcaatcaatactagctgaatatttcgataggaaatccattcctaaaataatatcgaact

SEQ ID NO: 335721 - DNA, 957 bp, Cannabis indica
tcgatctctaatgaacgaggtatggtcctgatctggttcatacatcggggatctgggtatatcccgagtatgcatccatgaaactgagaagttcatgacctgcagtggcatcgacaagttggtcaatgctaggaagtgggaaactgtccttgggacaagctttattcaaattagtgaaatcaatgcatgtgcgccatgagccgttaggcttgggcacgagtacgggatttgctaaccagtttttgtagaatgactcccttatgaagccgcatgccaaaaggcggtctacttcttccttcagcgcttggtacctcgcggggtccattttgcggcgcttttgttggacacctcgcacttcggggtcaatgttcaattggtgacacatgtcctgcggagatattccgaccatgtctgaatgtttccaggcgaaaacatcccggttttgcttgagaaaagtgataagcttttctcactgttgaaaagttagtttacaaccaattttcaaaactttattattatctattggatcagtagtgtcttctgcggcctgggcggttgcggcgtagtcgaggatcctaggatccaaatctggttcgtctttatgcgatatttcttctattctgaatacctcctattgaggaggcggtgcctctagtaagtaaatgacgttaactgacttcttttctgcgagttttactgctgtgttgtagcattcccgcgagtccgattggactcctcgcacagatcctactccagcgggattagggaacttcatggtgagatggtagatggatgtcacgatcttcatctccttcaggataggtcgaccaatcacagcattctatgccgagtgttggtcaattactgcgaagtgagccattgacttggctaccacgggtgcggttcccaaagtgattgggagttttatcattctctttaatgcgatgacgtcgtcca

SEQ ID NO: 335722 - DNA, 831 bp, Cannabis indica
taccgcctgctctcaggcttgtttattttttatgtagcccgtggctgggcttcacctagcccagctgagattttatacttttatgaacttgtgtctatccccaagaagggggataagtttaagaacggttttttcacactccgggcccatcctgctaatgagggcccggtcccttataattttcagaagaatgttaaggagtaccgccaccgtttcttcttctcttccagctttcaggtcgtggatcgcccaaaagttctcatggagtggattaggatccctccactgcatcgcactgctcctacctagcttttcctccaacacgctaaggtcttttccacttacgacaaaaatggccttaacgtgggagacttggtcacaatggagaactgccggaagtccaagcttatctcggggagccattccgtggataaattcaacctctctaaggtcgtctgcccaaacattcgtaccccagactctgaaaaggcactccgggcggacattattgcctcagcagaggaccggtaccagaagtacctcttcaggagggaacaagagttagcctatattaaggctcaagctgctcctgggaggaccctccagatagaagcgggtaaagaacgggtgccttctcgacctaagttgcttctgccggtccccaatgctggcgctcttgatgccagcacgcccggatccgataagtctcccttaacggttcatcatgttccctccgctcaagattattcttggtgtaggcctatagggtttttatttttccaacttaggtcattttttaggccgatcttggatggggtctgggcctcccgc

SEQ ID NO: 335723 - DNA, 1052 bp, Cannabis indica
aggctagaactcaacttaggttttctaggttagagttaaggccttcatataagaaagcctaaatcctaatttacaactgaaaccttagatatttatatatattaaattgattaaatataaaagattaaatttctcattgaaagtagatattttccatccagtttgttgggctgttaagggcccaatttgtatgtagcttgcaactcacgtatcaggccgtacatggagtcctgccatgctaatcttggttgaccatacactacaggatatggtttggtcggccatgcatgtactgcacgttgaggtctggcaggctatgctcctactaggacctagcaggtcatgtgcgtgccaagatcctacaagtcatgttctgttagcttaacaaagaggaggctagcctttggcaagtggaggacaactttgtacactgtttgcttgaagaggttatgttctcttgtattggaatttattttactaggatctaaatttactaacatgtatgttttattaacatcctaaatatgaattctctaatacgatgaaattaaacacagaagagtttagaaaaccttacattgattgcagtggaataatatgactccttccacttagatctctaacccttgttcctttctgtcgcagagtaataacatgatctgagcctaaatctctttctctccttcgggttggttaccaccatcttccgcactatgattgagtacttgacttgctatgtgtgggcatggtactctatcactatggctcgaattggtgaagaacaatgaatgggctgcaaaatcactgtagaaggtgcctctcatctactagttgtcaagaaaatgaaaagtaggtttagttggttgaagtgagttgttggatgagaagagagcatcatattccttttatagtatttcaactagggtttaggattgaattatatggattaaaaaagaacaaaataatgggaaaataaacactaagtggccggctacactatgtgggcctcactagttacaattttgccactttatttcaaccacttattcttc

SEQ ID NO: 335724 - DNA, 538 bp, Cannabis indica
aaaaaattaaaactaatatcgatatatcataagctttaagtaattttcttctaattctaaaaaaaatatgaaaaaaatattgattttatgtggcaaaagacaatataaataataaatagtataaaaggatcatttctctacaaattttaaaatgagaatatttattcacatagtgctatgatttggagtcattcactataatttccccgtaaggaatccaaaaatttgtatttcaaactcctacaaaaccacatagagacaattaaattaatcaatcaaaaaaactaaattcaaaaattaagaaatttaattaaaactaagtaaaatatactaaattaatttttattcaaaactaactaacaagttactaaaataaaataaaataaaaatacttgaaaccaaatcaattggatgcaaagcctctacgtgaattttcgagagcagtctgccgttagttgtgctctgaggcagttaagaagtcctttatggtttttttccttttttcttgcttcctgcatctctgtaaccgctcccttca

SEQ ID NO: 335725 - DNA, 534 bp, Cannabis indica
ttctcaatacaaagattaacaacttaaaaaattacaattattttgagtgagatttaatctcaaccacttaaaatatttcattatgttattgtaattaaataaatttttaattaatgtttatataaagaaagagatgaagattaaaaactctaataactcattctcctcttctctttctttatgcaaattttaaattgggcttcaccatgggtttcgaaataaatccacacaataattaaaattaatttttaaaccattttaagttatataattatttattgagctattctcaattaaattataaaacacctaacataaaataagtatacgtaccttacatatagttttttttttttgttaataaatatatataccaataaataagaagaaaaaaaaacaattggaaagtaataaattagttgtgccagacagaagcaactaagagtaatacagtttcacaattcattaaaaaaaattcccaaaaatcatatgttataaatcaaaaaaaaaaaaacaaacaaacaaacaactaaa

SEQ ID NO: 335726 - DNA, 771 bp, Cannabis indica
actctcaatcagaagaggagcatgaacaacatctcttgttggttctacaacggcttcaagaacacaagttgttttccaaatttaagaagtgcgagtttttgctatctcaggtgtcctttcttgggcacattgttagcaaagacaggatcaaggtggatacggggaagatagaatccgtcagggattagctgagaccaaatacagctacagaagttagaagtttcttgggtctggctggttattatcatcagttcgtagaagggttctctaaaatttcaacacccttaaccgagcttactaaaaagaatcagcgttttatgtggacggataagtttgaagcaagttttcaagagctgaaacagagattaatcacagctcgagtgttagccctaccttttgataaagagaagtttgtggtttactgttatgcatccagacagggtttggggtgtgtactgatgtaggctgatctggttattgcctatgcctctagtcagttgaaagaatatgaatagtgatacccaactcatgatctagaacttgcggcggtagtgttttctttaaagatttggcggaattatctctacggagagagatgttaaatttatactgaccataagagcctcaaatatttctttacttagaaagacttgaatatgagatagaggcgttgattagagttggttaaggattacgactgtgagatcctttactgtcctacgaaggccaatttagtggctaatgcctgagcaagaagggtcccaggcaggt

SEQ ID NO: 335727 - DNA, 709 bp, Cannabis indica
aaattgtattgtatactcactttattttacttgttttaatttttacctttatttccatattctttaagatatacctacttttgtaaatgatgttttcattatatcccttaatgtaaattatgtgctagacttaagtgaaatgtgagggtatattggacaacccactcataaaattgggtagattctaatgaaatctaatataagagtatttttgtttaatagatacaaaaaagaggtattcctcaacttatatatgacacatgtacaaaagtgtacacataaactgtatatattgacagttaactgtgaaaaatgaatgacacctttaatttactattagttcagtaatttagagagtcttactgttaaaatttcagcttagaagtttaaatacaagtaaagtaataattgaggggaaatttgactttttatgtttacaaatacataatatttttcccctaaacacatgacatgtaatatttgtgggatatgacacattttacaatattcctaaaatacccatatttacattatcccctatcccctctcttcttctctctttcttcatacccattggaccccaatcggggtccccatcggacccgtcggacccacatttacaacacatgcatcgaaccccaatcggggtccccatcagacccgtcggacccaaaagtttttccagtatatgcatcggacccccatcgga

SEQ ID NO: 335728 - DNA, 725 bp, Cannabis indica
tcctcttaaatgtgtctttggagtcggtgtagggaaattcctcgggtttatggttaattatcaaggaatagaggcaaacctcgcgaagatcaaagcattagtagaattgcaatccccaactatgccaaaagaagtccaaagtctcacaggtaaaatcgccgctttaaatcgatttatatcacaatcttctgatttgtgcaaagagttttttcagattttaaagggcaacaagaagttccgatggactgaaaactgcgaagaagcttttcaagcactaaaaaagcatttggggcaacccccaatattgtccaaacccatgtttggggaagtgttatccatttacctggcagtgtcaaaatatgcgattagctcagtactaatccgcgaagaccaaggtcgacaatacccagtaaactatgtcagtaagcgtttgttagatgctgagactcgttatcctcaaatggagaagctagcattttccctagtaatatcgtcaagaaaactacgaccttatttccaggtccataacattgaagttttaacaaagtatcctttgagccaagtcttagcgaagccacatgcatcgggaaggttgttgaagtggtcagtagagctaagccagttcgacatcaagtacaacccgagatccgcgatcaaggggcaggccttgagggtactgtccaactgacgaccaatcagtacatcgcaatccaagaccagatacg

SEQ ID NO: 335729 - DNA, 841 bp, Cannabis indica
tgaaatcaatatcgtgaggctaaattttagttaaaaaaaatttagtgttaatagtttggtgctttcattgagagcctctatgaaaaagctcaaaaaaaaccctcccttctttcgaggaaaaaccatctccttcatggctgaaaatctagaaaatgttaacaccccacatgaggaaaccaatcatcgttctgggaaaggggccatgggctccataagatctatcaacctgcagtctagaaggaccacccgttcaaggagggttcaacctaagggtggccccagtgcgcggaccacgcgttctcggagaactcgacccgatgttggtcctagtacacggacaacacgctcgaggagaactcatcgtgggaatagtcaaaaccccaggacaagggatgaagagcacaatcgtggaggtgcacaatctgtgggagaaagaacctatgaaacacagagttagaacgtgctgcagtctcgaccagggcggcacaggggataaatgttcaaaatcaacctgaacttggagtgagaagaccatgacgcagacctcgtggctcacaaaccaggagatagaaaaaggctcgggaagaacaacccggggaaaatgagataccccctaaaaatcaggatgaacgtccagatgggagacaactggaagttgatgaacgagaaatccctcatgagaatgaggaagatcttgggactcaattgggagaacggaggtcacctgctagaaatcataaccgttcttcccaaacccatagagcgaggactcgtacagatcctaatgggggaaatacgacaaactgctctcgggaggatagaacagagcgtgaagaagcaa

SEQ ID NO: 335730 - DNA, 777 bp, Cannabis indica
aagtgcctggctccttagcaattgattcgcttggttgacgggtggaatgacaccattgatctggttggaaccatcaggtatgacttctcctgataaattactagacaaggtctgctcgcctaccgctaggcccacgagtggaactcgtgaccggggattgggcggctgaccatttctagtctgggaagtattcaacctccgaatgtctgtctcaccaaggggaatgacattcggaggttgctgacctacagtttggtaggctttccgtatcagcacggtagctttccaactacaattttcaatctctgcacggtgagccattaatgcctccatctctctatccctccattcggtaaacatacgcttttattcgtcgaacgcgagattcatcgtagtgtggagttcgtcctgatcatgatgtagggtgttgttgtgaccctacatgagcccgagagcttcgtcgagattttgtaactcagtagcatctccgatagtcgtctgggcattggttccaggcggaacagttgtgttgtgaatgccctggttggtgcggaactattattccaagtctcttgcacaccaggcacgacttcatctataggagttgttacaccattgcccacgtttgccggctgtccaggattaacagctggcggaacccttgtgtttcctgggttctgcaatgcaggatccaccgtttgtgaatttgctggattagtcaggcctctacgagtttgcaccatcgtatttgtggctagattatgaatagacagtaat

SEQ ID NO: 335731 - DNA, 796 bp, Cannabis indica
aataattctcagcaaaggttgagagctcccgagcttgctttgctttatgcccatgtaccacacgatttctttctgtccatattgaccatagcatgcaaatgattcgctccatttcagccttggagtgaatactggaaaggtgtaccaaataatcgcccttcttcattgatgaagctttataccaatcaaagttgaaaccagaatttctccatacagctttggcatatttacacccaaataaagcatgccccacggtttcccatgcctgtcgacaaattgtacaggttgaatctgtgatgactttccttttcactaaacctgtagcaacgggaagggcatcatgaaagactcgccaagcaatattttaattttttggggcagctgaagtgcccaaaaaaacttccaccaggggctgtttgaataagaaccagagcaaaagtcagcatcttcaagagaggaggctaaatgataacccgtttggactgtataaagacccgaagtgtgatggtgccatattaatgagtcattattccggaagaaactcagtggtattgtaagtatgcgttcaacatcgggctgcgaaaaccattgtttaagaaggtcaagatcccactccctattatccttgataagatttgagacaacaccatttattggtccattatagtgaaaaggaaggaaggtagagtgccccgggatccaagggtcttgtccacaaagtatacggcacccttctccaatcttccatcttaaacccaaaattagaagcttcttaccccaatgaatgccttgccaa

SEQ ID NO: 335732 - DNA, 727 bp, Cannabis indica
gaaacgaatcgttgcctgcaaaagtaaaaactgcaatgatgattgtcataaatacatcccacgcgcccaaaggacgtgccgggtagtcaataagacagccggaggcacctaagcaagcctcgtttacttcccaccaaactaggcttggggggtaaatgttgcccaaaatacgtggaccaatgcgactgcgacacgtggattcgaggaatatggttctaaataatttgactaagtatttttagatcaagagtatcaacgagaaaatacctcccggagaagatatgaggggtccacatactcccagagggcagagccatagcaaagcacctctgggaggcaccagaccccatttgaacagtcacctcgcatttaatgccgcatgagagaaggcgtattggaactgccataaatattaagtctgacggcttaacccctcttttgcagctatcacgctatgattaataagcctagtgacggctattttatgagggatcacatcagtcaagaagggataaaggattatatccacctaacccctaagatacctagggtataggccatgcatttcccattttatatctgttgggaatgtgtgcccctactgaaaagatacagaaagacatgtagttcggttctagggatcaccccacaaaaacgctataaataccccccaaacacattaagacggggtcgagaatttgggtttcataagaaccaaagagagaaa

SEQ ID NO: 335733 - DNA, 632 bp, Cannabis indica
tacagctcttcttatatattatttaactggttgccaaaaatctcggtcaacaggttcttttaccgtttttgtttagttgctcgttgttatataaagactttcatatttttcccctatttgtttttacatatatagttagatgggtacaacatgtgtttttgttgattctaatattcgagttgttgaagatcatccaattttcattgaccaaactcctcttgttgacaagaggaaatctaagaaaccaatagctttgacgtctccctttatggagtttgactcttcgaattcaagttctaaagatggttctggttatggagttgttaagtacattgctggtttgtgtcctcttgatgataaaattggagaagatatagaccataaagacgagaatgattttgacttgtggcttgatgaaggtcgacgaacaaagaaagaccagtatgtgttttatttagccttttttttgtttcatgtttctttttttcttgatattaaattattatctgtatttttcttttttattatttttttatcttttagttatgttaaggagaaggtttacttgaagggtaatgataagattgttccaccttttcgttttggcgtggaagatgttgcatctaagatgt

SEQ ID NO: 335734 - DNA, 599 bp, Cannabis indica
aattactaactattttgccaaacaaaatattaggaattcatatgtgattaccacctcatatccaaacacaccttgcattttaaaatagagtgtaattactaaactctgtaattaccaccttagtaattatcctgcttagtaattacacagttacttccaaatacaccctaaaaaaagtttacataagtgaaaataagcaattccaaattaataacatcatgaattaaaaaattattacattaattttactaaagagttactacaaaataaacctttagaagcgagttttttcaacaaattaataaaattttaataaaatcacctatggagtcagttattttgtaataattggctccataggtaataattttttaatcttaataaaaaaaatactacggtggttattttgtaataaccgtaggtaattttttaattttaataaaaaatacatatggcatcggttattttgtaataaccgactccatatgtctttatataaccctctccagctatcgtcttcctcaaaccctaaaataaccagcagccattcttcctctcaaacccatgaaaccctcgcccaaccacccctttcttccccc

SEQ ID NO: 335735 - DNA, 553 bp, Cannabis indica
attagagctcttcccgtagccaagaatggtcttcccaaaatgatgggaaaattttcatctttctccatatcaagtattaagaaatcagtatggaagataaacttaccaactttcaccaaaatatcttcaattatatctcgaggatgagtcaaagaatggtctgccattgtaatgccactactgtaggcttggcttcttctaatattagtcttttaaaactagacaagggcattaagttaatactcgctcccatatcacatagagcttttgtttccatcaaactccctatcgagcctggaatattgagactattagaatctttaagcttgggtagtagtttcttttgcaggattgcactacactcctcagtaagtgtcgccatcttatattcttctatttttcttttcttggctaaaatatccttcatgaacttcaaataggttggtatttgttccaaggcctccacaaatggattgttgatgtacagtttcttgaatattttaagaaattttgaaaattgcttgtccagcttattcttacagagcctttgagg

SEQ ID NO: 335736 - DNA, 715 bp, Cannabis indica
gtgctgggtttgggacgattttgggggttctggtttttttttctttgaaagtgaagtgttcagggatttttgtaaatgacgaaggggaagagaaagagttggtaaagtgtattggaaaagacccgagtgagtgagtgattgagagagacgataagtcgagagaaacccgagtgcgttgcgatttttctctgtctttgctcactccctacaaacctgaaatctaggaaattaattataatcaatgggaaaatcaacctctcaaacacccctaacctacactgagagactgagagagagagcgagaacgcaaggaaaaagagagggaaagagagacttacggaggtgggaaaatcgccggttcagaccttcgaaatcgcaagagagaaagagagggaaagagagttgttcaaagaaagagagggaaaaaagagctcgaaaatgaaagtgtcattcgactgtttaggggtaagtgaacaagaggagaatttgcgtcgttttctcacactcacaatctctttatcgtcggttttaaaacgccacacaaagcttgagtgaggcttttaaaacgacgctaataatgaacgaatttttttaatttcttcacttttaccgtcagttgggtaattagtgacaaacatagaaccgatgcaatttgtttattttttgttgactattttaaaaatgacgaatatattgaatatagtactattcacgt

SEQ ID NO: 335737 - DNA, 673 bp, Cannabis indica
taaatctagatcttggtaaaaaatattccaaaaactggcctcagagccatggtaattgatttactttcaagaaatatggatctaagattatgtatgtgtgatttagatgtgattcatgttgatctatgtgtttattggtgattgattgatgtttgtaaattttttttatgtaaaataattagaatttcattatgaaattatttttattggatagtatggaaaaaactaagcaatttacttttttacaaaactcaattttgattttatttgaattagttatgaatttttaaaaattggaaaaatcataggggtggtgacaccccatgcgcgcgaggacaccacgtgacacacgggtgtcacgcatgttcggacaaccccctgtctgaaagaacacgcacacagtgtctgaacaggggccattccacgcacgaaaatgctactggcagcccccagcgccaaggtttctcggctgtgcacccttagggacacgcgtaccatccgtaccaaatgcaattttttccaattttttcattttttcatgctttttcatggaattaatttcaaattttttgtgtaattttgtattttagtttttatttttcaaattttcaaattcaattatcagaattacattaattaatttttttaagtaatttaagatattagtagtttt

SEQ ID NO: 335738 - DNA, 590 bp, Cannabis indica
tgtatgaatatgtatttttttctccaaatgtatctgacgtaagatcaatctaagctctacttgtatacccttaaatcaattcttaatttattgcataaaaattaaacaagtcttcttataaagtattgaaaccccttttttctcttccttgcataatgtctcaatcaagggaactttaagtatccattcaacattttcttatttggtccaaaggaaaacgtggacactagacctgcaggggagggttgaagttgaattgaagatatggaagaagcaaagcagctacacacctaaaatttttacataatgacatttttatttatgttttaaatatgggtaaataatattttgaactctctgttttgcaaaagttaataagtgaacactctgttaaaatagatcttgtattttctaaaatagtacaaataggaccctgaactgatttttgtcaaaataaaatatgataataatctgatctaaatgtgttataacaaagttgtttacattttctgtatctatttgtgttaggaattgtcttcaagttggttatattaaaaaaaaaagttgtcgaaaattaagctcaggatctt

SEQ ID NO: 335739 - DNA, 672 bp, Cannabis indica
ttttttctttttttaaatttgtcttgtcgttttgacatgtctggtatttgatttttgctattgagtggtgtgtgttttttgcgagttatgagtttgttgagttggaattgctgtgggcttggaaacccccgggttgttcaattccttaaagaaatagtttttcaaaagacactcaatttaatatttttgtgtgagacaatttgcaaaaaaaaacaaagttgattgtgttaaagctttattgggctatgatggaagttttgttgttgaggcccgtggacatagtgggggtcttgcaatgttgtggaaaaatcaagatgatggcaaacttcttagctttagtaataatcacattgatttggagttgaagcttgacggataccctttgtttcgtgtgactggcttctatggtgaacctcagaggagtttgcgtgggaattcttggagacttattcggcagtttgcggggggaatcgactcttccttggtgtttaatgggagatttgaataatgtccttcatcatagtgacaagagaggcggtcgaccttatccaacctctttaattcagggatttcaagatgtggtttcagattgcagtcttattgtaatatcctgaaaaatatattgatattttaattagacatattttattaaatatgtgattaagtgggtat

SEQ ID NO: 335740 - DNA, 696 bp, Cannabis indica
tgtactaaatcacgccccttgaactttcatccatgttaaatttttttactaaaattagacaaaactccttaaatttaacaatctcaatagttcgggggaaatttttaacggccaaaaaagttcagggggcacgatttactacatgtcaaagttcaggggaaaaaattactaattagcctaaaaaaataacaaaacaaatgcatatgtatacaacaaaaacattatctaagataaactcataatatacacgataaaaactgcacataaactaaacaacatctgtacaaaaaaaaactcgtaaaaacaattatagaacacctaaacaacaacataaaaataactataaaataataaaaagacaactataaatgaacagaaaaataatcaagacatcaatcttatgaaaatatgcaaattattcataaattaactctgaataaactacaaaatatcaaaaacaaatatatatatatatatattacttttattaatcatgtaagggatagaaaaatacaggaggagtgctcttatttttttgtaagagagagaaagagtgttaaaagaaataagatatcactataagaaatgtcacttttaccatcacagtactggtaaaagtaatttttaataccagtgcatttcgcaaacgacactggtaaaaatgtcaaagttttaccaatgcacatttgcagtggc

SEQ ID NO: 335741 - DNA, 600 bp, Cannabis indica
ctaacaaattcccccaaactgaacctttaattgccctcgagtaaaactaaaacttaaaactgaaataaacacaaaatgacgcaatcagataactgagcctccaaatagttgaactaacataccacttgtgcaacttcaatcaattgaataactagaatttcaattcaatcactctaggaattaacttggatgcacaagttagaaacaatcaattcatataaaaacaaaacacctctttggaaactcatatcacaaccaatctacactttccaacattccgccaaccaatgttcaatatgcttgcatgacatacctctctccactaatgttaacaacccttgctcggaatcaaagggtctttcttggttgaaatgtgacagcctaggtaaaaaagggtagatgaaaattcatttaggctacattataccataagcagaacataccaatcaaacaccctcaattatccatatttttatcccaaagaaactggtaaaagattgcaaacttctttttttttttatgtgcctactaccatttttcccttttctttgtttttttttttcaagaagaattatcagatttattactttgttttttttt

SEQ ID NO: 335742 - DNA, 761 bp, Cannabis indica
cgaaatagaaactaaagcacacagtgcaattttgcagtttgggtgatgaagttttaagagaagtctcaagtgaggagaaagccttgggattgtgggaaaagctatctgagatttacatgaagaaatccctagccaacaaactatatctcaagaagaaactgtacactctaagaatggatgaatcaaaggaattaagaaagcatcttgatgactataacaagattgtattggatctgtgcaacattggggtaaagattgatgatgaagatcaagcaattattttgctaagttcattgcctaaaaactatgaacattttgttgacactattctgtatgggaaagactctctcaccatgacagaagtcaaagctgccctaagttctaaagagattcaaagaaaggatgacaacaagattgaatcaaatggtgaaggtttattcaccagaggcagaagcacaaaaagagagtataaagggaacaagaatcatcatgggaatggaggatacaaagcaagatctggttcaagaaatgcagcagggaaacaatgctactattgcaaaaaggaagggcactttagggatgattgtcttgctctcaaagccaaattaaagagagagcaaaacaagaaaagcaagttcaagggagaagctgacctagctgctgatggttatgagtctgctgatgtgcttgttgcatcaagcataaagtctggtgaagaatggatactagactcgggttgttcatttcacatgacaccaaat

SEQ ID NO: 335743 - DNA, 709 bp, Cannabis indica
ccgcctcccatccggtggcccgttacttatacccctcctgggtaacaggatccagtgagacatcttcaagggtagccacacgcttaccgctcttcttcgacgactttgaaccggacgtagacatgttttgattctgaaaaaagagttaagattccagcagttaggccccataccaaaccctgaaccaagaaaaagggaatgggggtcccctaaccgctggaaagaggccccctcccggacatctgtcaatcagaaaaccctaagaaggatatcctggacaaaagtcgggtacagagaactcacagaagacaacatcgcgcgtaaaagaaaaagaaagggcagaaaatcgagaaaaacaaagtcttctttatgccctagaaaggccagtacacgaaaagcgtatggtcctttgtaaaaataacaacaaacacgtgacaagagtaaccctatcaccagaaatggtgaatctagacctgttacgtgaagaacccaaaagaatacattcccagaaacttcaaataccaaacccagaaaaacaacaaacagataagtaaagcatgccaggtacatttacagtaaggcaaggcatgcgagaaacttacagtgaagtgttgagactgggggttctgctgtagatcaaacaaagataagatagattgacagtagtaaacgaaggtgcactgggaaaatttgtagagtgttcaaaggt

SEQ ID NO: 335744 - DNA, 1357 bp, Cannabis indica
aaaccattcaactctattaattttcagcagcaaaataccaaatataacatgaattctaacctagaaaattccctaaaatctaagtcaaaacttatcaatacaatccacaataatattatgcaatccatactaaaatctataaaatctataaagattaaataccaattctcttaacatacaatctcaagaataactcaaccacttcatactctttccataataaaatttagcaaaaattccaaataaaatcagttagaaagagctaccccaattcaattcaaagccaagctcaatcaatccccaagtaccaagctccaaaccaagcaaattttcaccaaattgagtttaaaattcaaagagggttgagagagagaggggggattgggtaagagggcaagaaaccagaaaattcatctgttttcttaaaaaaaaattcctttcttttattacatataatcgaagggtcaaaattaccattttgcacctagggccagaaagcacacacataagcacttaagggaatttaagtcatttacaaataaataaacccaattaaatttttagattattcaccaataataaaaatgccaataattcaatccaaattgtatttcaggtcaaaacccggttcggcctgaaatacgcagttgtgactataccgggccaacctgtcagaacacacctgaaaaagacaacacaggtatactatataacaatatagttccataagcacgtaaataaattaatttcactgttttacccttctcaggtcaaaattactataatacccttgcctcaccaacgaggtcttaacatggcataaatcatataaattcccatatattaaattatataataatataattcctcaataatacataattatctaattaggattttgctaatctattctcataattctaggatattacagtggagttatcccctcttctcttcctattaccattaaccttaaccgttttcacttaagacacatatatatatgtcacacctttctaaccctaatgggttatttactaattggacttaagtggttcaataatggtatattataatttagtgggctaattatagttatgagggtgctctgatgtgcctcttattagaattattttactaggatttagatttagtaacaagtatgtttttaacatcctaaacatgaacttctaaaacgatatgaattaaatacatataaagtttcagaaaccttacaatggttgcagcggaatttaatgtctccttccactcagatttctaacccttgtatcctttctgtagcagagtatcacaaagatttgagtctgaatctccttctcttgaaactggattcttc

SEQ ID NO: 335745 - DNA, 803 bp, Cannabis indica
gattctttggctattgctggtcatcatgttcatgattttgatcttattttacatcttctcaatggacttggtctcgagatcggctctgtcgtatccagcattacctctcgaagtgatactctttcacttgaagaagtccaagcttttctgatgtctcatgagtcaagactagagagacacttagcagccttggatctctcagcaaaaatgcagcaaatcttactgtaggttcaagaaatggtcagtacagaccctttaatggctcagggaggggacaaggtcctgaaaactcatcaagattcccaaaccgtggcaatggacctcgacttataaaaaataacagacctttatgccaagtctgcatgaaatttgggcatactgttgttacttgccactatcgatttgatagaaattgggtcaacccaaaggcttctactgctcaacctcaagccaatcttactaaacagaccctcaattatgatcctcaggcctttattgctcaatctgtacatgattttggtgatgatgttggatggtatgtggattctggtgcaaccaaccatattgctcactctttagacaatcttgagtttgtcacccccttcactagccaagaagcagttgctgtggctaatggtaagaaattgctcatttctaatattggtacaaccactctctcttcaaattctcactctttaaatctcaattttgtcttgcaaattccttctataactaaaaatcttgttagtgtgtccaaactaactaatgacaatgatgttttcttggaatttcataaaacttgt

SEQ ID NO: 335746 - DNA, 552 bp, Cannabis indica
cactcggttgaaccgtgacaggtcatcgctcgggtccgagttcccggtataagctgccatttcgggcatcttaaaatttttggggagctccgcctccaggatgtacctagcacatagctctcggtcttcacagtcagagtcggagtcatcacctttttgtctctgggagacccgagcaatgtcttttcggagtatggcaagctcagccatgattccttcatttagtgttcacgtggagaccgcgggcacgtgtttcttttggtctaagtgatcctggaggtcacgttgttttctgttgatctgatgtctcagattgacgggagggtatttttggccccttcctcctctccctccgggttcctggtgcacaaaaacgctctttcggtcctcttgatcctgaaggccaagactccctttttggagttttcccctatgcggacctttcccttttgggtaatctgaacggacctttcgcagatcctgtacctttttcttttttccaggggtggaagtagggtttttctgctggttcccttcagagggataccttat

SEQ ID NO: 335747 - DNA, 599 bp, Cannabis indica
gcctctgatgaggaaccgcctcaacaagctcctcggtgacatagtcaacgcctgcaaccagggcgtccccgtcagcatcaattggttgcccagcctcattgtactccccatagtttgggggttcaatctcctcctctccctcagcagcgggagggctgcccggacgtgcctcttccagttcctcaacctcctggacttcaacgtccccctcacggtcctcttccattgggaccgccaaatcctgttcggcgtcgggcagggtggcaagccgagccacctggggatcagaagcgtcagccagacgcgtagttttcttcgtacgagccatcattctatggctaggtacaaaatcagaaaaaggattagcatgaagacgaggatggacttcgtgcagaagttgaaccaggtcctggtcgatttgatgctcaggctcccaagactcaccagggttcatctacaaaagaaaacacgcaagatgagtgttggacggagtatcaagcggaaaaacaagcaaatatgccgaccaggagcacccaacagataaaagaacagccatgttcgaagaaaaatctaaactcaagaagtcagaaagtttgtct

SEQ ID NO: 335748 - DNA, 535 bp, Cannabis indica
aagtaattatataaatataataagaagtaattatataaaagcaacatctagaccacatagtataaatgttttatgaaaattacagttagtatttctgtaaaaatatttctttaaaaaaatagttcgtaaaaatatttaaaaaatcatacattattttttttttgtttttggataattatgaaagaatctcatagctttaattttcaattacatgagaaatgttagcaattaagtgcatgtttgacatcataactaaaaaattagtttttgtttttaaacacagaaaattgttttttgaaaataatttggcttgtttggccttatttttttaaaacagttttcagaaaatgaagttacaaaaaacaagaattttgaaaacaacaaagggtatgtttggtaaccattttaaaaatggttttttgtttttaaaattgaaattttgaaaacactaataaaaattgtgttcggtaacttagttttactttttatttttaaaattaaaaaacatattgtattgaattttaaaaacagtttt

SEQ ID NO: 335749 - DNA, 585 bp, Cannabis indica
aacttcaccaaaaatttgcctagatcatgacttttttctgatgttttaaagtagaagcgtgagacatttttttcttatgaaggaaacaaaattccacacaagcaaaaaataagaaaaagatcaaatgaaattggatttaataagaggattaagtattttcaagcataaataacaagaaatcagtgagagagaaaaaaaaaagtagtttaacaatacattcatttaactaaaaacaatcaaaagctggaaaggcaaagagcaaagaagcttgaagtttgggtgtttctcattatgataattacaaatccttcttttcaaaacaaaggtgactcctctctattctaagtagccaataattacatgttctacaattccacattactactgtcatcttccctttgccaaagccctcataggcttctattatcattaaatttttaaagaaacagtaatgaagaatattttttacaaaatcctatactatagatatcaggcgacactacaatggaattttaactttgatcagtatttcaaaaagtgcagctattgaagttgtattggtagggaccaaatgaaacagtataa

SEQ ID NO: 335750 - DNA, 612 bp, Cannabis indica
ctgtaaaagtagcagcaacacttcaggcatgtcactatatatttttcttttcttttgttaattattttttaagatacaatgacgcacaaaaaaagccactatatcatattttttttaaaaaaaaataataaaatcacaaacaattaattttgattcatcaaaacaaatgccaatttgtatattaatttctcttgtcatatagcttttcttttcaagagagagtagcaattttttaatacagatactaaatggaaaacattatattatcaatcatgaaaagaagaaatcaaaataataaatctacaagtcctaagggcctctacatcattggtgttttatgaaccatgaccccagccacaacttcaatgaatccgaaccatcccaccgtttcagtcaacctacagataaaaaataggtatacatttacccataaatccaaacatctatacatatttcttgccaaaaattaaaacaaatttcgtataaaacatgaaatttcagaacagtcaccaaataaaatttggttttttttattagccaaaaaaaattattgaaacaaaataaaactaaaaaaatcaatccattttccctccgacatacacgaaccaaaaa

SEQ ID NO: 335751 - DNA, 551 bp, Cannabis indica
aaggaaaagaaataattaaattcggagctatccttccattcgttcgtttgggaattttgggatgtccctatttagcgaggttttcttgggtgttggtttactagctagatgtgtagtgtttgtgtcaacatatcattactcgttccactttataatctaacgtttagcctttagcatttctcttcaataaatcagtggctgctgaaattattttgggaatggtaataccacctaagttggcagatgatcgatctggagctattatatagaacctgaactgtgtgtaagtataatgaaatggtcactttgtattggtaagttggtaactgcttgttttggcttctttaatcctacaacaatccacaatttttgtaccaaaaaaccccaagtaaatgaacacaattccctataagattaagttttgctatgacaatattatgttggagtttatttaccacaacccgtttttttcacacggttacactactacaaaaacccccatttagaggcggtttttaagccctttcagcgtcagttttcgcgaaattcgc

SEQ ID NO: 335752 - DNA, 551 bp, Cannabis indica
gatcctgaagactggtttgatatgtacattggctgcaaggacttgtttgactcatggttcagcaagcttttagtgaaaagatagtttgttaactttctgattgcctgataatctgaattgtgttgatatcggaatggtgtgggtaggactataatatatggaaatacttattagtattgttattacttggaatgtgaccgcatgtgtatagattatgcacctgaggcggactggtaggggtacccgtgagctagctgggctcggggctcctgagggcgagaaccctccaccaccaccaaactgggaagagttatatgctgcaatgcaagagactattcggcagcagggtgagcaaatcagagaattgaaagagcagtgagttcagcctactcaaaaccctaaccctcatactctggcacctctggtagtgccaccggatatagggaaccgtttggaacctttgtatgagcggttccagaagtagaacccgccagtgtttgagggttatgctgatcgactcaaggcggagcaatggatgagtatgataacat

SEQ ID NO: 335753 - DNA, 663 bp, Cannabis indica
gggtgctcctgatcaggtgccggtaatcctagtcacacaaatctgagattttcacacatagggttaacccctggttccatactcataaaattcaatcatggcatttaaaattcagataaccatacagagctcggaacgagccttccaacgatataaagaactcccaaatcggagttcggaataaaaagttacaaaatttcaaagttcgaactcaatctgcccaaaaacatgagggtgggtcgcggcatgcccaagccatgccgcgacacctgggacgaacctccaggttccatctgttataaatattttaccagaatctagatttactaccatgtatgtttcatgaacatcctaatatgaattctacttgattcctttctgtagcaaaacataatcaagatctgaacctggatctctttctctccttcctttgatgcagattctccttattgattggattctacacaatcttccacactatgattgaggtactgtttgctgtgtgtggacactactctttcactaggtatttcgaaattgaagagaagaaaagagaagaagagtggtggctatgaggctcaggtttttctctaagagaaaataagatgcaagtccatagtttcctgaagccatcactttctatttatagaatgccatctaggt

SEQ ID NO: 335754 - DNA, 709 bp, Cannabis indica
ttttactgatggaacaatctcaggccatatgatataaaaatgagagattttttttttattagatataaaaactaagcataaaaactcaaaattttctaattttatccattcatgggtaatacccattaagagtgcacccatatatgtatattatctaatttttttagagataattcaatacaataacttgattagtataatattataacgttaaaagtttgataaaatatttttttacttttttaattgttaaaactctagcagactaaactttcaatgtttattttaatgtttgataatgatgagtgtaaaccgcataaatcacatcgcatcacggcgccgtatttttgcagtataatttttatagttttaaggtcttgcggtgcgattgtggttttaaaaaattataaaaatcgcatatatacaatttgatttggaaaattaatctaaacctacactacccgcactgggaacatgtgtagattgccgtggtcgccttcaattaattcaattgtagattagaaattaataagatttgaatatggttattaaatataaaaatattatatatatatatatatttaactagattgatgttacgtgcaatgcctgtataattagttttcttttcaattaagtttaattagatgacgttaagtgcaatatatgtatatttaattttttttaattaaataatgtatttttaaaa

SEQ ID NO: 335755 - DNA, 776 bp, Cannabis indica
aatgacggccaaggttgcatactatattttatatggactatatgaatcagatgttccaggattacttgaacagatgtgtaatcatgtttatcaatgacatcttggtgtattctgaattagaagaaaagcatgaattgcattttagagtgattttgaaacgattgcagaaccacaagctgtatgctaaatttgtgaattctggttatctcgtgtctctttcttgggccacatagtagataaagatgggatcatggtggatctggccaaaattgaggctgttcgggattggccaacaccaaaatcagtttctgaagttaggagctttctgggattagctgggtattattgtcggttcgttgagggtttttcaaaggttgatgtacacttaacggaactgactcgaaagaacctgaagtttgtttggactgatcggtgtgagaaaaattttctagagttaaagcagcgcatggttactgctccaatactaactcttccttcagataaggaaaggtttgtggtttattgtgatgcctcgagacaaggcctcgactgtgtgcttatgcaagctggaaaggtaatagcctatgcttcttggcagttaaaggagtacgagcagaggtaccctactcacgatctagaacttgcagcaatggtatttgcgctaaagatttggcggcactacctatatgacgagaaatgtgagatatacactgatcacaagagtctgaaatactttttttttacccagaaggacttgaatatgagacagagacgtt

SEQ ID NO: 335756 - DNA, 1868 bp, Cannabis indica
gcatttttatctggttatatctagaatatgcatccataaatgacataagctcatgcccagcagctgcatccaccaactggtcaatcctgggtagtggaaaacaatcctttggccacgcctaattcagatcagagaagtcaaatacaagttcttcaggttccgttgggttttaggacaagaataggattgcctccatgagggataaaacacctcgcgtataaagtcgttgaccaacaacttatccacttcttttttaagtgtcgcttgtctctcggaatccaagggtctcctcttttgtctctttgttgagtagtttggatcgacatttaaatgatggaagacaatattagggtcaatccctatcatatctccatcgctacaggcgaactgatccttgttctccctttaaaaaacttattagctactatttcaattgtttttccaggtccatcccaatgtaaacacactttgtgggatttcttgggtccagaacaacttcttccaattcttcaattggtttcaataagtttctttcatcttgaattcgaggatcaagaccttcatccttcttcttgctgtcttctgtcaagacttccattagctggtgctggcttttcagtgctgcagctctatgcgatagcattcgcaagccagcatctaatcaccttgcactactcccacacccactggtttctgaaacttcaaggataagtgcttgaccaaactaactgtccctagtctgattaatgctggacgacccagcagtatattgtaagccgatggcaagtcgacaaccaaaaagtcttgcatgaataagggggaaaaaggtacttcacccaaggtcaatgcgagctcgattattccttgacttgcgacactgtcgctacttaacttgcaaaggtttaccatgcaaggactcaatttagctttttcgagccccatcttcttcagtgttccccataaaggatgttcactgaactcctgttgtctaccagcaccctttttattctcttgttggcgagctggatggtgatcaccaatgggtcgacgtgagggtacctcacgttcttttcatcttcctccgaaaatttaataggaggcttttcagtttttactttcttggaaggttctggagcaaatgcagactgctcattcttcacttccttcacgtacctcttttgggtgttattgctctctcttacaatatgtggccctcctgagataaccagaatatcttctccttcgacaaaaggaggttgtaatccctggtggcttgggttgttgggcgaatgaggctggttatgtccattgccctgcctcttcacatatttcttgaagtggcctcacgcgatgagactctctatctcatctttcaactgacgatactagtctgttgtgtgcccgatggttggatctcttttatgcctcgcgtgcctcatgggctcaagtttgttgaattcaaccttgtgctcatgcgcgaggtagatattctcctgagtttcattaagctcagtataaatggtgtaaacgttgtgcttctttgtttcttcttgtctttagatgaccccttagagttgcctttcctttttgagccggaggcccctgagttatacgctttagtcgagacaatacttgttgaaacaatactgggtttgctccccgagccagtttttaacaagttcatctcttttcgagcttcttcctttcgaacaaacacatgagccctctcgttgaactcggtgatgtttttaattggaggaccctgtaggtcgtcccacagttcgcctccggtaatggagagatctgtagtgatccccgcctgaagggcaataagtgttgggttttgtgccctaaataaaacccattac

SEQ ID NO: 335757 - DNA, 1893 bp, Cannabis indica
gaattcagaatacattttatatgccatatatgaaatttttatatttttagcatcttttgtgctcgacaacattggaacgcgacgtgtggctatttgaatcacattttagtattttttagtatagcggggcaatatagttagacattgggaatgtcgggattagtcaagattttagagttgaccaaatacccttaggttgtttagtgacttttttgcttaagtgtgggcaaaatggtctgttgccctatttggtgttttgtccatttgtgagattatatgatgttagtaatctaattttatgctggatttaattagataaagacttaatttgtttttattataattttattaaaaattagaagaaaacacaaatacaccctctcttcatttctctctttctctctcttgaattccgtagaatcaagctaaagtttggatctcttctattttaactaaggaattccagcaagtctttgtgatttcaaactcaaggtaatgttctaagcttgttcttattgagtttcttacagcttaagtatgttattcatggttttctttgtattttgttattcttgttgatggtgtttgagtttgttttctaaagttaatttaaggttattcatgttgttttgaggttagatttaacggcttttgtgatgttttagcaagctttgagttttagaacttaagcttggctcattaatggtggattttgattttgagcttgttaggttgttctgttgcttggattatgttctttggggtatattaagcaggtctggaatgtttggtatcatttggattcaaattgatttaggtttcaaattttcgggttacctggtgtaaatcggttaacaaatttttgaggccctgtaaaacttgtataccggatcagcaactgggttcccgaaatttttgtgttgtcgattcgtgttaattttcagagctttggttggataattccttgattatttagggtagtgccatgttaactttggttaggaaaacttttggttttaaacctatgtccccagatggtgatttagcgtgtcactcacccgtgttacgaataatgttatttatgggcttgtaatttgtcgagcagttgttccactcaggttggctggcacagttgaattcagtaatgaggtaagattagtataatgttatgcatatgtgtttacatgttttatgtacatgttatttatgcctgttagagtacattgatagcagtatcagaatatactacataccgatagatgtatgtttggctcaaatactgatcgatgctatcacaaaagtatgactaggcatattgagtataagttgatattatggtcgatagtattgtcttatgaatgttgtagacttagcaccgcgtgggacacggggatagggttattgttgggtgtatgggcgcctgattataatctgggttattgctatgttattacttatgcttttcttactgagtctattgactcacagttgctattttcatgtgtaggtaagggcaaggctaagactgagcaaccgtgagtaagagcagatggagattgtacatgtcggggcggttaggcctggagcatacggtcttttggacatcagggcatatttgttgtagttgctaggcaacaaactttcgtaatattcacaatgacacttttgtaaatattttgtaaaacgggatcccagtttattataagtataaaattttaatgtctattgttaattaggtgaaattttaattaatcatggttttcaataaactcgttgattagctacgagctgcacagttaagttaaaaattacgttaacatgcctaaaatagttatggtgttacaatttggtataagagacgccaagttgtcttccgaagatcgtcacgacatg

SEQ ID NO: 335758 - DNA, 508 bp, Cannabis indica
acccgaacccagacccgaacccggacccggacccaaaccaggatcgggacccgaactttgaccgggactcgggacccaagactaggaccgaactcgggacccgagactaggacccagactcgggactcgggacccgagacccaaaccttaacctaggacccgaatctgagacccagactcggacccggactgggacccagacctggactaagacccggaatccaggatccgacccgaacctgggacccggttcctaacccgggacccgggacccaggatcgggaccgggacccgaacccgaattgggacacgggatccgaactcgacccggatcgagactcggacccgaacccgaatctttacacaatcttttaatacatatcaataccaaatatagtattgcatttaataatactaatacaaaattaaaatgaatataaaattataagttaatattaaaattcttaaaaaaaaaaagagtcgggtcagatcaaatcaaatccgatcc

SEQ ID NO: 335759 - DNA, 988 bp, Cannabis indica
aggctcccagtcaccttgtgcccggacacaccccaaagcactttcaaatactgcacatttgtggtggtagactgcccaacagcttataatgcaatccttggacgaccggccttggtggattttgctgcagtcacgtcaataaggcacttgtgcctgaaattccccactcaagaagctgggataggaaccgtgagaggaaaccaaggggaggccaggcagtgttacaacgttgctgcccacctacccgtcctaatggtccgtgaaattattgagccagaaatggcagaagaagatgagttggatccgcgtgtgggatccgaaaaaattgtagaacccatggaggatgtcgaggaagtgtcagtgtgcgacctcgactccaccaaagtcctccggctaggaaagagcctagagccggaggaaaaagaaaacataataaagacactgaggagcgccacagatgtttttgtgtggtgtcaagaagacatgaccggcataagcccccacgtcataacccacgtccttaatgtcaatctagacatgccaccagttcagcaaaaacaacgccccctcgactcggtgaaggctgaagccttagagaaggaggtggacaaactgctaaccagtggcatgattcgggatgtgtattacccagagtggctggccaatctggtactggtgccaaagcccaacgagacatggcgggtttgtatagactttaccgacttaaacaaagcctgcctgaaagattgtttccccttgccgaggatcgacgagatggtggactccacctccggatttaagctattgtccttcattgatgcatacgccggttacaaccatattaagatgcacatcgcagatcaagagtgcactagcttcaggaccgataagggggtatactactacttagtcatgcctttcggactcaagaatgctggtgcaacttaccaaaggatggtgaacctgatgttcaagggcctcctggggc

SEQ ID NO: 335760 - DNA, 591 bp, Cannabis indica
gcagtattccagttctgaatgttgtgaagcctaatccccccaatttctttgaattacatacagtctcccatgctatcaaaccaggccctgctcctccttgaatgcctttccataagaaggatcggcaaatagcttctatatctttgagtaacttcttaggcaagatcattatttgagaccaataagtgtggatggaaatcaacacagaattgatcaaagtcactcttcccatgtacgataagtttcttgaactccaagacctgattctactcaccattttctccagaagttcctgacattcagctttactaatcctcttcgaacagatgggaactcccaaatatctaaaaggaagagtacttcttttgaattttgatgcatcaagaatcctgttcacctcttcttctgccatacccgaacaatagatagcagctttctgctcattaggaagaaggccagaagttgctgaaaacagtttcaagccctggagcattaacaagatggagacataatcaccattgctgaatattaaaagatcatcgcaaagcagaggtgattgagtttcagacttgagcacctatcatggaactt

SEQ ID NO: 335761 - DNA, 500 bp, Cannabis indica
ataaaatatacaaatacatatatatactatacatttaggtataaattattacctaataaccgcaatccgacgactactgtaaaaaatcccggcactatacacataaaacacaataatattactaataaaataaaaaaactcaaataataatttacaaaaataaaaaataaaacaatatacataatacaaaaagaatagaaacaatatttataccttaaacgaggttgagattcaacttctcaagaaaaatgggcagccggatttcaaacccaaactttactatttgggttctaggcaaaccagtcacaaagtccattgcaatgtcctcccacttccattctggaaggactaaaggttgcaataatcctgccggcctctgatgttcagccttaatctgctggcaggttaaacacttggacacatagtccaccacatctcttttcatcccataccaccagaagtagggtttcaaatcctgatacatcttggtggttcccgga

SEQ ID NO: 335762 - DNA, 567 bp, Cannabis indica
gtgcaagaccactagaattgtgatcacaatatgacatagaacaaagttagagtttgagcatcaatataaagaatatcaacacatagccttagttgataacgaaaggaaattagactatagtttggatcgaagaacttaccaatactttgcgatgatcaaatgaaaagtggaataatggtagtaattgtggtgataataatcttcaacaagatttgaaaggcaacgtaacaataatagattggctatcgtgtgtgtatatatatatatattagcaaagaactcaaggttcacccttagagtgtaacaaatggaaataaagaaagagtttgaacgatatattaatggtagtgatatttttctatgaaaaattagaggaagataaggtgaaggaatcaagagatcgctagagagtgtaattcttttggtcttaagtgctagtgaaaaaaatataagagggaaccactatttataacctttagaccctaaccacctacgctacttactaactaaatcgtagccctcttataaaaaacaatgcaaataaataactaacctttaactacaccc

SEQ ID NO: 335763 - DNA, 520 bp, Cannabis indica
gttgacacgtgtccaacagaaggaatatgaatcaattttgaatgatataataatattatatcaataaatgcatattaaataactcgttattattaaataaaggtttgatggataatattcaaaactcgttgactttatagtcaaaagagagacaaggataataactattgaactatgactaacaagacatatgcatgcctcggggtatacagacaagaaaggaatattcatccactcgagtagaatgaatgcaacaacaagactgcctcacattacacatagtgagaagatgacctagcattaataaaagaatatgacgagacaaactactttccaacacttaccatttttcttaagatggacaagaaggaaaactcatatcaagcgagatgtaaccttccacgtcagtaagaactgcctaaaggataaaactaaagagtggttgggtagttataagatattatcccacattgtgattaaaagaaacgtggggattatccacgtttcatgagcatttgta

SEQ ID NO: 335764 - DNA, 810 bp, Cannabis indica
tctcaagcaaagctgtttcgtgagacatgttttggacattttttggacatgaatccaattgcaatgcaaactcagttgattcacagtgctttgcacagggaggtacaccagaaaaatccttatgaaatgtggttcaaatttggttctcaaaatttcaggtttagtttggctgagtttgctgttgtgactggtttattatgtgttggtgattctgatatgagtggttatgcaaagaaggagaatgcatttgtggataagtattttagtgatcaacaagtaacagtcagtgctgtggaggagaggtttaggtatagtgattttaagttggacgaatacgctgttaagatggcggtgttgtatttcgtttctaattgcttgttcacaagccctaattccaagaaggttcctaatgaaatactcaatattgttgggattggtgattatgagagttttccttggggaaaattagtttttaagaaaactttacacaacttgaggattggtttgaggggtgtaccaaagaaaaaaacagggaaagatattggttccaagcatattgataagcgtaaagggaaagcaaaggctgctgataaagaatcttcgaggacttacaagttgccttgttttccttatgcatttcttgtttggatttacgaaactattcctctttgtcagaaggctggtttttgtgaatatgatagtgatccagaatataggatttgtagatggttgaatgtgggtcttcctaataatagtgctgttgagaggaaagttttttcatctcctaaggtacatttttatttatttttt

SEQ ID NO: 335765 - DNA, 934 bp, Cannabis indica
ttgagtggaaagttgtccgaagctgaaaaggcgtcagcccaggcccaaaaggctttggtcgatgagaaggaatccctgactaaggagataaaagtcctgacgggccaagtgaagaaggcgttccttagtgggagttatcagtcgtcttttaaattgtactccgagtttaaggaaggcaaatctgctacctgggatctggacgggttttttgcaaagtattctgagtttaagaaggatgaagatttggtggattcttcctcggagtctgacgaaggtagcgagggtgaggatgccaacggagcctggagatgggagggaattttaccgtgtccttattttaataaatttcctagtgtgtgttatttgtgtgcgtgggacaagcttgaggaacaatttcttatttgttatttattttatcattattaaggatttgtaaggatttttctttaaatttgtactttcaacttatttttcttattatggttatttacacgtgtgtggtattttttcgaatcgttttgacacttggggatgcgcatttattgtcatttaattccttatatgtgggtggatttacctatcatcttccttttatcttaccttggccaccttttgcgttctatttaaacagacattcttctttgttcatggtgtcattttggtgtagcttctaagttcctctatatatatatattttttgcttccctttcctctgcttcagaaatgtcaaactctccaggttctcctcttcctgagtcttcaagtggcgatgagttccattctgacgtcggggatcgatccccccgagtccttcaattttttcccattacaaccggcccagtggcgaagctattgttggaaggatgatgagggcttacatggctagacacaacgatgcgtcttcgtcttctgatgaggaatggcttcagaattt

SEQ ID NO: 335766 - DNA, 732 bp, Cannabis indica
tgctaactcgcttttttattttcgcagatagaccagctcgacctacactcgacgcgactcgcagagagatagttgaagttctcaggagccttcctgtacaagatcgcgactgacgattattatgtatgactgccaaactgcgagaacataagctgattccagagaacaccagtcttcagagagagccggtgtacaaggaaccttctgagaagcaacaagagcgaatagacaaacgtctctctaagcaaacttctcgaccatcatcaggtagcatatgcataaattagtgtgttagaatcttattcttattggcactaatcgttatcctttgttgttaatgtcgcagacatgactttctggaagtctgcacccagtcttaatcgcaaactaaaatctggaacagcgacaacttcccctatcgttcctcagaagaggaagagcgatgtggtggttacccctgtcgcgtattcttccaaagggccagctaagggcatgcaagagaaagggaagaaggtcgcgattgacccagcagttcgagcccgcaatgaatgactctccaagagaagttcgtgagcgacgaattccagtcaaagattgacaagactcctgctgagaagctgttgcctcgctctgctgagttagcttcgcagttcattgcgatgttcttaaaggcttttgttactggatccaaggaggtcgaaattcgaagagacagaacgttcagcttcagga

SEQ ID NO: 335767 - DNA, 1048 bp, Cannabis indica
ctatgtttctcctgtttatatttatcttgttttttgcacataggacaggccttaataaccccctaagtgacgtgaaaagaaattttgaggtcacttagtctttaaaaattacataagaggttgcatacatttgaccgacacaggatcttttatagaatataaacttcgcttttaactattgatagtatttgcagaggtggtcagcattccaggccctaagcactgcagttccgtccattctttttagcttataggtcctagagccaattttatcctcaattttgtacggtccttcacaatttagcccaagtacccccacttcggattcttgagtggctggaaagacccgtcttaggactagttcgccaatggtgaactttctatctttgaccttggcattgaagtatttaaccacctttctttggtaagctgccattcgtacctgagactcatcccagagctcgtctgtttgatctagcgcttcttgtaacaaggctttgttcgttgccggatcatatgtcgcccttttgtgggatgggaacaaggtttccaccgggaccatagcttcccacccgtacaccattcagaatagggagtgtctgtttggggttcttagggtggtccgataggcccataatactcgtgggagttcttcaggccaattgttcttgcaagccaacaactttttctttagggtgacttttactattttgttgatggcttcttcctgtccatttgtttgcggccttgcaatcgcggagcagcttttaacgactttgtgttggttgtagaagtttgtgaattcttcgcagtcaaactgcttctcattgtctaagactattttaagaggcaagccgtcacgacacacgatgtttttgataacaaagtctaatgatttcttagcagttatggtcttcataggctcgacctccatcaattttttgaagtagtctacggccaatatggcatactttacctctccctttcccgttggtaaggacccaatgaaatctatcccccacactgttgggctttatgccctaaataa

SEQ ID NO: 335768 - DNA, 625 bp, Cannabis indica
acatgactatgtgaataaagctctttaaagaaatttttataacatatttagttttattaatatactaaattagttgatatcaagttggtttagagaggtcaagcatttgtttctccacatattactgttaaggtacaagtaattatcgatcagtgacaaaaaaacactgacaaatagtttcttataggtacaaattcacattcaacatttctagttacaattaagctgcacgttagtttaataataattttgctactacaatatcatagtattataaaaatagggctcagaattgtcaaatacgcggcctgaatagataaaacatgattgttgtaatatttgtttgtattaaatacatggaattattagttgttctataattttatgtttgttggctcgtaacaaatatgattgttgcattacaatttcatcacagttattttaaagttgacttcttctttctcttatgaccgtcgaagttgaaatttttttcaggcaaagataccttcgatttattcttcactaaacgacgactacctttagccatggggggagaaaaattggagtcatcatcgccgatgactgggcgtttccctttagccttgttagtgttgggttttatgcc

SEQ ID NO: 335769 - DNA, 526 bp, Cannabis indica
ttttcattttaaatagtaacaatctgttttcttttcaacaacctggatatgaaggcttttgaccacacaactatgataacataatacataataagcattgatgagtagaaaaggcaatagcatgtgatttgaaaaggactattcctttcaatagaccccatcatatcaaaggtcttcaaaatgttcatatatacacatgaaattgggttcattatcacctcaagttttcacatcctctcaagtattcaactttacttccttgcaaaccctttgagatctcttttctttcttcttccttacaaagacatatatacaagaatgggattcagatttccaagcatagttcatgctattcaaagaccattttcaagttcaaaagatgttccaaaagggtatttggctgtttatgttggagaaaacagaatgaagagatttgtgatccctgtggcatatttgaaccagccatcattccaagactttctaagtcaagctgaagaagaatttggattcgatcacccaatgggag

SEQ ID NO: 335770 - DNA, 493 bp, Cannabis indica
ataaatataaaaattaaaattttaaaagatgcggtgcggtgcggtttgaatcgcggtttaataattcaaaaccgcaaaccgcaccgcaccgcgcggtttggaaaaaattcaaaccgcaaccgcaccgcgaggaatttcaaaccgcatttttttgcggtgcgggcggtttgagcggtttgatgtacacccttaccaattacgtacattgtagctttacaaacaggcctgaagcctatgttttggtagagatgatttatggagggatggacaagtgaggagggagatgagtagaatgagaggtcaatttctttgtttggtaggagggaacaaaggaggaggaaggagggcgcaaatccttccaaattcaaaatatttaggccatatttggtaggaagaaatgagagtaagatggatctatatataaagtttagaattaaccacttgaggctagctcaagtggccataggagggtgcgtgtgtgttggaggtcctg

SEQ ID NO: 335771 - DNA, 1341 bp, Cannabis indica
ttgttgttatgttggttattgttgcttgattatcgacatattgtagacaggttctcgataggagtgaaaattagttttttagttatcatgtttggtgattgtctactgattatcgatgggttctcaacaggttctcgatagaattaagtattgcattttttgtttcacatttgcattttatttctattattattgtattgtttaacttttgttgatatcattgataagttgtgttttttttccctttgttgtgttatgtctatttgttgataggttttcgattggttatcgatatgtttttgataggattctaacatttatttttttttctttcttcaacagtaattgattgttatgagagggttatttccttgcctagatgaagaagcgtatgtctaacaatcacatacaatgatgttgagatagtaattgagatgggtgtcaatgagacgcatcatgaatatgacgcccatgaccctactatttttgaaagccagccttaaaagtagtagaacaaattaaaataacagcgtccttgtattagaaaatattttgtataattttacacaattagagacaattagtgcaacttttccttgttatcaaagttaaattttaaaaattgtaataacaaaattcggagctttcatatgaaatattatcgaaaaaccatcgagaacaattgaattcccatcgagaaattatcatagaacacatttactaaattttgtaaaggactgcacaaaccatggacaacgcatcgagaacatatcgataaatcatcgttaaattttaaaaattacaatgatagcatctggaatcttcacatgaactattaccgaaaatccatcgataacacatctattttccattgagaaaccataaaaaatgcatttaaggtaaatttttaaaagcatcgtaaaaacatcgagaatatatcaaaagtttcacaatagcagtttcaattagcattaaatataacaaaacctgttttagggacccaagtaatattgaattatgcttcaaacacgggccttccatgtagctctgttgtggctgaagcttccataattgctgcaatttcgagattgtgttactactttatcaccaattttaaaccatacttcaatgggtcaacctccaactcttcatataaactgttgcacatttttttttataaggttgtgtcaattttaaccattaacgacatacttcctttgcttttatacacccaattaaattcctcaacactctaaacaccatcatacaatacaaccagaaacacagacgatcttgcaattcaatgcaaactaaaaataactgaatcataataacaaaaat

SEQ ID NO: 335772 - DNA, 566 bp, Cannabis indica
gtgggtcatagtagacatgtttaaaaagtttgctcacttttaacctgttcggacgaatttctccattgactagtatgctgagttatatgtcagagaaattgttcgtctgcatggtgtcccaaagtccattgtgtcagatagagatccgaagtttacatcaagattctgggagagtctgcatcgagctttgggtactctgttaaagttcagcacaacttttcatccttagacggatgggcaatccgagaggaccattcagattttagaggacatgctacgggcatgtgtgcttgactttgagggatcatgccttcccctgatcgagttttcttataataacagctatcacgaaacaatcgggatggttccttatgaacttttatatggaagaaaatgtagatcacctattcactgggatgaagtgggtgaaagaaacttcttgggtcccgaagatgttcagaaaataagtgaggcagtgataagattagagcgcgaatactcacggctcagagtaagcagaagagttatgctgatccaaagcgcagagatattgattttcaggtcgg

SEQ ID NO: 335773 - DNA, 499 bp, Cannabis indica
aaagccgtgtttcggcaacttttggaatgccgtacccttgacattctcctcggtgttatttcaccagctgatgctccacaaaatgaaagttgatgctcaggaggagttgaggatgcggttttacgttggtcggaaggaggtcagattcggagtgcttgagtttgcactcattacaggcctggacttctcctcggggccaacagaagaggagaaggctgcgcaggttgctcgctcagggtcagaccgattgatcaacaaatatttcaaccggtctgatagtgtgaagacagaagcactccaagataggttcacaaactgtcagaacccggaagacttgtacaagctcggcttgtgcttgtttgtggagtcagtgcttctggggcgcgaggctaacgcgctgattacgcctgacatacttagatatgtcgaagacctcgagttcttcttccggattccttgggggaagcactcattcgccagactcatgcactcgcttcaa

SEQ ID NO: 335774 - DNA, 500 bp, Cannabis indica
aggcaccaaaataccactattttgggtgctacaattgtcatcccaatcctcaaataggaatttaacatcattaacaatacatcctggataacaatagcatgctaaattagagggatttacgatggcgtacaactgatctgatacttcctcaaggttatcacctcagagttgattgatttatcattgagtgaaaaatgtaaccaatactagtacaagaaactgtatttgaatgaaaaaattagtagaaagcaatacttactcgagactcgaaccaattaggaaactcgttctcttaaactatgttaagattttgatcacctgatacttcctcaaggttatcagctcagagttcattgatttatcattgagtgaaaaatgtaatcaatactagtacaagaaactatatttgaatgaaaaaattagtagaaagcaatacttactcgagactcgaaccaattaggaaactcgttctcttaaactatgttaagattttgatcacc

SEQ ID NO: 335775 - DNA, 572 bp, Cannabis indica
acctggggatttggaatctccatgtttacgagacatcaggtaagacagtagtatgcacgtagagttaagcgcagtggcactcatattatatgttgtgattgtgattaattaagaaccagaattagggttattaccctgaaatgagcggttatttgatctaaggttattaccctagtagttaaaagaagttgaatgttatgccatgttaaatatgttggaataaagagttatgcgtccaggcatatttaaactagactcgataaactattaccttgagtttaattttaatatggtctagggtcattaccctagaatattatgaaggtaagaaagcattatatatggtaatattatcaatcaagtgaaaacatgagttagggttattaccctaagattttatatgatgtggtaaatattgagtacacgcatgtatgttaagagttatgtgtacaagacataagtgggttagacctggtatgcatcaccaggataaaccactaaaagaacgtaatgtatggattacgtatatatatgaatggggttatgcgagcaaggcataatcaggttaggct

SEQ ID NO: 335776 - DNA, 1324 bp, Cannabis indica
tgtatcactaaggtaaagaagattacctaaattacttaaggtgacacggtaatgatggagagtactttataattgactggatagtcaatgtggtttataaggagaccattgaaattctaggaaaggattactttattaagcaattatggaaaggcatactcacccacaatggggaaaagcttatgaattgagattcaattaaatggacatgtatttgagtgattggtgaatgttggatcacaaagtaggttgtttattaaacaacaagctatataattgagggtaaaataagttttagagtggttaaccaagtatgaagatagtgatgattgtaagaaagcaatagtaatgtatgaactatggagtaaaaccttagtggtaatgatggaaaaagaacacgagagtctcagatgttgatgaatcagcatcatcaatgagaaactgactataagttagtttggtaatttttaccaaggggttatcaataaaactgagaataccctggttccctcggaacctcttgctctgacttgagccaccaggtacagatggtgcctttcctttttggtcagtggtcgagtcactacaacccctaccataacaaaggataggaggagtaggggctccaccaacaacttgagtccctcaggactcctaggtgcactcaactccgccctcagctcgcagtgcctttcccaccatatcagcataggttgtgttgtcatcagtgttagtcataaggtcgtgttttatttttggatttaatccatttaggtacttctcttttgtgctaaagtcggttggcacaattcccgaggccaacctagccaatcaatcaaacttagttgtgtactcggtaacactcatattctccttctgggtcagctgagtaaattctttcctctttgcacttctaactgcctcactataatactttgcgttgaataattcctagaattcttcgcaggtagtggtagtaacatcccgagttagggaaaccatgtcccaccaaactagggcattctcctagaactggaatgtggcacaggccactctgtcgttactggtgacgcccataaaattcaaggttcttgtaataactgtgagccattgcgtggctttcctcacatcgggacctcccaagaagattggaggtgcttgcctagtcagatctcgatcatgaataatttactatttaccgcttaatttggtaattaaaagatacgcctattcacctatcaagctactaacatgcttcctatcagacttttcttataacatactaataaaataaactactaaagcaataaaggcttactaaaac

SEQ ID NO: 335777 - DNA, 504 bp, Cannabis indica
atggtttctcgtcaatacatgaactgatagtttataaatccctgtctcgcttatgactatgcagtcaacgagttatgattctactctattaattctgcatttaatgagttattccattttttatttaatgatataattatcattatatttgttaattcatatctcctgagattgacacgtttcagcttctaaagtacaaccgaatttcgagcgtaacaattgccccttaaaaagtccttttcaatgaaaagtacttttaaatgattaccgtgggtattttgtcatcataatctaatttgaaaatatgcatgcctttgaatttggtcagttttatggtttcaaggcacatcattagtcattaatgagccatcttttccacttctctcccaacttttatacgttggatcttctgccctttaatcctacggtattaagtttgaaggataaaatgggaaaggacccatttttccaccatttttgccttttcaaaaagttcaagatttt

SEQ ID NO: 335778 - DNA, 778 bp, Cannabis indica
caaccaactgtgtgtttgccattaggcagatctgtgatgatccatgttttattattttcaaatgcttttatttcctccattgtggcaacattccaattgggatcctatagagcttcttgaactgaatttagaatttaaacttgatctagagtggtgataaaacctctataggtaggatataagcttgagtaactcaaatagttatgaaagggatgttgagtgcaagagcgaacacctttcttgagagtaatgggaatgcttaaattgttagacacatctttttccacaatgggttcagctcgagcatcttccagtgtttgttcaagaatgaatggaattggattatattcatgactttgctgggtttgagtggtagcttgttcaatgttgcctagattcttctttttcctcgagtaaacctggatttctttgtttaggatgtggacaagagtttttggctcatgtgaattggttgaatggttgagtcggtactcgttgataggaacaagacttaaggaaggaatttgatgaggatttcttggctcatatgatttgtttgaatagtttggagtatgagtaatagacagatgatgatttttgaagtaatggtgttgtcagaagaagaatgaggattagcgagtgaaataggaggatgcgtagtttctgaagcaatgtgttgttagaagaagaatgaggatcaactagtgaaataggatgatgagtagtttttgtagcaatggtgttgtcaaaagaagaatgaggatcaatgagtgaaaca

SEQ ID NO: 335779 - DNA, 593 bp, Cannabis indica
acgacaagctacctctataaatacagtcactgaagctattagttagggagggacagagataagagaggaggaaaaaaaggcgtgtagtcccattaaacttgtctcatcaatcttcaaagaattatcatttctttctcttcctctacacaggctgcttgtaagcttcaaagcataacatcatacttgtatacaagctaccaacttcatctaaattcaataaatcctccacctcaaatccttcagaaagacaaacttcaaaccagtgtgcttacatgcaccctctttgtttattatgtcttttcttttcctcttcatctaatttctctctacacaagcaaagttacattaatatcatctctattcactaaaatacctatttacacaataataacaataatactaatctaacgaacatggatgaggttgtgttagctagatttggaaagcttcaaaaggcccaacacaacatgatgtaactactgagtttgcttctaccacagacacactaaaaagcatctgtcaaaaggagtggcttacctaaagaacgtgcgataaatgaatctttgataaggcaagtacatactattgaacaa

SEQ ID NO: 335780 - DNA, 662 bp, Cannabis indica
aaataattggcagcaagtaccccctaatagaaatgactctggtttgttcatgtgttacaattgtaacaagccaggtcatatggcacaaaagtgttacaactctggttggtgtgacactatgttattcaatccattcgtttatataatgtgattgaactggtgggaagaatacatcttttcttatcagaaaaaatacaattttcataaatactaaaattccatctgcggtatcaaatttattcgggtgtatttgacggggctctacagtgcgacgattgggctattttattctggggacgaccggaaaattctgactgcttgcacactcctgggcagtgctgcgaacgtcttaaagagagcgacttagtccgcgactcaacccagaatttttcattcggtaatatcgttcctcttttattttgctagcagtttattcaacaattttaagacgttctatctgctatgactactaccgatgaatgttctggttctacaactgacattaacaagccttttcgttttgagggtttgcactggtttgcactttaaacattggaggcagaagatattgtttttctgaccatgaaaaaatttacgtttgtgcttactgttttgaaaccagttgtgtctaagactccacctccttttcgagaagaaggatg

SEQ ID NO: 335781 - DNA, 512 bp, Cannabis indica
caagctcatcatcatcaccaaacattttcccaataaaagcattctccacgttcttcttgtttatttctttaaaaccagcaaaaatcttctccttcaacaaatttttttcttgtttatacctcaacttgtcacattgaccaaaacaatcaaggcctgaaaccaaagccatttcctcaacgctaaaccttagcatcgaactagcaacattaaaccatatctcattatcattcggctggaccacttccctcaacaacaaactatggaacaactggtttgcaaacataagaaggagttcttaaaaaacatccaaaatagtttgtccaaacatttccttctgttcaggggtcaaaatagaattgatagtctcaatgattttaaaagagcaagtagaagtcacccgtgtagtataaaaatcttcattaccaaatttattatcccataactgtaaaacaaaatagtaaaaataataaaacagtaaaacaacaactataaaaaaaaatataaataaataa

SEQ ID NO: 335782 - DNA, 618 bp, Cannabis indica
tccacttatgatctatgtcttatcttgatccttaagcataaaaatattgtagtaattgattaactagttccaccaaaactatttcaagacacaaaaccaacgtactagtctttcgaactcatcattgtgaaagcaaacatagaaatattaacttcagatgctcaagaaaatctcctaagcgattccaccctcataaagtttgtcaataaggatcgatagacacatgtataccttactaaaacaacctgacactcatcgtacgtaatactctcattgagcatgtagtaacttggcatctttaaattcaaatgtgatttcaagatttatcaattttgagacctagtccaattttctaatgagagatcaatatgacaaaatatattatagtcccatttgataactaagcggtagatgtcttaagattgcttaaagactaaaaaaaaataatcttagagtagtgtcactatgtgaaaacaaggttatgcaagctgctcatttcttagctttctcaatgatttatcaacagaaacgtattatgttatgctagagtcgttgaaataaaccatattgactcttacgcaggtaggacaactacttcaaatatcataaccaaattca

SEQ ID NO: 335783 - DNA, 1057 bp, Cannabis indica
tccaaatttctctctccacggctgacggttgcactcgattattttgatttcccatatttgctttcaaggcgggaaatcgaggcgtctaaggttcctttacgtacagttacccttttgcctataaatacttggagtactggcaccttacctcatttcagcacccttcgttgttaagcaaacttcaaagcaaaaagagagaattttctcgcttcagagttgctgaagagctttcagacgattttaggcttgcttgaatccggacacttgaatctttgagtaagtttctgactccctttatgtttttcctttgcatgcttgtgcctttgaatgtatctttgctatagaaagaacactgtgggaaaccctagggtttgaaacttctgcgactcttcttttccatgtccttgcgttagctttcagccgtaaggcttgttttaggactgcattgcgtctgtttttcattctgctttctttaagcttcatgaacgtttttgccctaactcaagaaaaactttctaacttcttgagtttagacttttcttcgaacatggtcgttctttaatctgttgggtactcctggtcagcatatttgcttgcttttccgcttgatactccgtccaacactcatcttgcgtgttgtctttagatgaaccctggtgagtcttgggagcctgagcatcaaatcgaccaggaactgcttcaacttctgcacgaagtccaccctcgtctttgtgctaatccttcttttgattccgtacccggcaatagaatgatggctcgtatgcgtctggctgacgcttttgatcttcaagtggctcggcttgccaccctgcccgacgccgaacaggaattggcggtccaaatggaggaggaccgtgagggggacgctgaagtccaggaggttgaggagttggacgaggcgagaggaggagattgaaccccctaactatgggaagtacaatgaggctgggcaaccagttgatgctgacagggacgtccttgtttcaggcgtcgactacgtcaccgaggagcttgctgaggcggttcctcataggag

SEQ ID NO: 335784 - DNA, 842 bp, Cannabis indica
gttcggacagcggttttttggattttttgctcacccctacggccagggtttgagcattagttgccggccaaaagtgactttcagaccaagggaacttctgtttgaccaagggagcctgacctctgcaaggaaaaggtgtacaaaagttggcctccatctccaaaggctagcctccacctctaaaggctagcctccacctctaaagggctgggctttatctatagaggctgaccatcaccaaggttggccaacacatgcaaagacctagccacttcttaacaaagctagcaagaacatgatctgccaaacccttgcaagaataggtactgctagatcctggtaggaacatggtcggccagacctcaacctacagatcttgtatggccggccagcctgcatcctgtaggtgtatggccggctagcttttcccttgcaggacgttgatccgcaactttcatccgtggacaacaagccaagctacgagttgggccttaacaagccactaagatgctacgaaaatatctactttcaaggggtaatttagtaatttgtatttattaaaataatgtgtaaatatctacttattttatttgttaattagggtttaagctctcctatataaagagccttaacttaaccctaaaaatgctaagtcattaagtctcatttaaagccataaagctctaagtctgaatcctcttctgtctctctctctacacacccaaagggctctctacctctctgtctctctctcacatgcctcccaggtcctatctctctttcagtagagacctacctactgattcatacattgtaatctaaagagagttatattagatccc

SEQ ID NO: 335785 - DNA, 1459 bp, Cannabis indica
tacctaagtttaatttattacggtaataatacataagttatatttttagaactctgtaggtacctgactgttaaatgttaagtcattatccacgtgtcatttttttattggtatatttaaatttaattttttttaaaaaaataaaaatttaatgactttgactaattaggaattaccacatggcaatttacttaacacttaacaattagttacctacaaaagttctagaattataacttaggtattattaccgccaaaaattaaacttaggtatttatttacaattgaaagttaaacttagatatttatgccgcaaattactctaaaaataaagtgagccttttacatcacttttcttaatattttttgactttcacaaaattttgttttattattttttaataataaaagtacgcattctatctatctatctctctctctctctcccctacatttttcttactactcacactcaaactattcatactatttttcttattattattattcatattttgtaaaagaatcttaattaatttttttaaacagagtattttattcacacagtttttctcatatatttttttagttttaactctctctctcaaaaaaaaaaattagaagcactcctcctatatctttttctcttttacatgattaaaaaatgtaataatttttggatgttttgtagtttcttcggagttaatttttaaataatttgcatattcttatagggttgatgttttgttgtttgtaattatttttatgtggttttcaagttttttttttcaacagttgtttttaatttatgtgaatttgtgatggtgtatatttttaatttattgttgacaattgtttttagatgtgcatttgttgtgttgtagttgttttaaaatagttttcagaatatttttagttgtgcaataattttttagttatttttttagtttatgtacatttattacgatgtatatttatagtttattcttgacaattttttattgtatgtatattgctttgtagattgtagatgtatatatatttaatattatttttttgaaatatttatgtttaaatacaataataaattttttcgtcataatgtgcactatatgtttaatttattaaaattatattattatctatatggatttttattatttttattatatattatttattatagaaacttgtttatgtacagtcactaaaacgatatatgtgtacatacaggtagttttttttaataggtgtcactattatattttaaaaggaaattgttcgtcatttttttgtcatggggcagtgattaatggtgaaaaatacacatttattggtgttaaagtttaaaataaataaagtttaaattaatattttcatgaaattaacaaaatatatttttatattgaaaatattttatttggatttaatttattgtcattttgtaggaattaaagtg

SEQ ID NO: 335786 - DNA, 367 bp, Cannabis indica
gaatatggggaagatatatcaatgatagttaaatatgagtggaagcccattatttgcaaacattgcaaaggaatggggcatcccacggaggagtgtagaaggaaggaagcaaagaaacaagagtgggttgtcaagggtaagcaaaagcagggaaatgatgatatgaagaatgtagtcgatgaagagggctataaacaggttgtgaatggttggaaacctaaagagaaattaactcctgctgatccatcatcatcaaatccatttggtgtattgcagaatgatatagttcaaaagctccaggaatttgaagtccgtgaccatgaagaaagtgttggaaattattttaccaggatcttatatctactca

SEQ ID NO: 335787 - DNA, 884 bp, Cannabis indica
ttaaaaagtaaagtggtgaaacaaaattgatgagaagtaattttgttaactttggactaatctcattgaggaaataactataaaatttaagatgcaattttattattttgagaattttgtgttatctattaataaaggacaaataatggataaaataattctatgaatttgtaagtgatattttgagagattatcatgtgatatctaaaggttcatgataattttgagtgcacattattttgaaagataatgtgtagagaacaaataaaataaagaggtttattttaaagtgatatggtattttcactttatggtaaaatgtgggggtgagatttgattttaatcaaatttgttgagaaattattgattatatatgtggttttgaatttaatattctaaattaatattttgctatgtgcatatggaaaattttgatatatttagtgtcaaaatttggtggtaataatttcaagaaggaaattaaatttaagatagtgggggtgcatactccaatatgagaagtttagacatattgagtgtctaaaactaaaaatgtatatatttgagatatgcttgatgtcttaaatatagtataactttgacatgtttgatgtataaagttaagtgtgtaatttagacatgtttggtgtctaaattaatgtttaattttgatatgcttgatatcaaaattattgagaatttgagttgtgtgaaaattaatcttttatgattgaattttcaaagcttaagtacttaaggagaaaagtggtcacaaagtgaacactatatatttggctagcatgattcgtttggaatcaaaagtgtgaggttaacaaatcgcttaatcttcatacaagattaaagcatgaatttcgagggatggg

SEQ ID NO: 335788 - DNA, 604 bp, Cannabis indica
ccaaagaatatggtttgtaaattaaaaaaaaatcatctatggactcaagcaagcttcccgtcaatggtaccatatatttcatcaagtgattctcttatttggttttaaaatgaatgttaatgatgattgtttgtatcacaagtttagtgggagtaagtacataattctggttctatatgtcgatgacatattgcttgccactaatgatataggcttattgcacaaaaccacgagatttctatctaaaatcattttgagatgaaagatcttggtgacgcctcttttgttttaggaattcaaatacatcgagatcgttctcggggtattcttagattatcacaaaagaactatattgataaagaactcctgtcgtcaaaggagacaaattttgtcttaagcaatgccctaaaggaagccttgaagtttaaaaaatgtaaaagattccctacgcttcagctatcgggagtctaatgtatgctcaagtttgtacgagtctagatataacgtacattgttagagtgttaggcagatacttaagcaatccaggaattgatcaccagaaaacagccaaaaaagttatgagatatttgaagagaacaagaga

SEQ ID NO: 335789 - DNA, 649 bp, Cannabis indica
agtgaaaattcataaataagacatagtctaattttagaattataattgattcattaaaaccaattaactgagtttgcaagaaatattatctcaacaagcgtggggtcatgggcctatataatcaagcctccaataagaagaactagaatttacgaagtaaattctctaacttattaattccaccttgagccactatagattcggaattgcactcttaattatatagaaatctctatatgtaccaagatatagatacattatgattatacattgtgacaatccaaatagtcaaagatcctctatagttgatctacattgaatagggacaaattgactgttctacccttcaatgtattttatccttaaaacacttagctacctataattgatattttagtaaactaatataattactgaaatgagatctcaatcatttatctctagtaagctgagcttgaaggaaattatcatttcacttctaaatacacatagcagctatagatttcatatctatgattagcgctcctactcaattgactaccatgtccttaatcagtatgtcacgagaagatccaattggtcgactttaatgaacaaattgaagaacataggtaatacaactaagattgaacctaaccatatcaggatt

SEQ ID NO: 335790 - DNA, 608 bp, Cannabis indica
ggtctaactcaagatcattattttgttgtccagccatgccgtgaaacatatttttcagttcgtcaagcggagcctgtatggctgagctgacctgctcggcattctggtcaacttggattacgtcagcatctttctgagtgggaaattgagtacgggctctgggctgcacggttgctgtaacattctgatcatctattcccctccttctatttagatcgttccttaggtcatgggttgttcctaaccttttgaacacagaatcgcctggttgtcttagcgattgattcgcttggttgacgggtggaatggcaccattgatctggttggagccatcaggtatgactcttcatgatgaattaccagacaaggtctgctcgcttactgctgggcccacgagcgggactcatgaccggggattgggcggctgaccattagtagtctgggaagtattcatcgttggatcctcttccgtttctcccaggggaaggacgttcggcgattactgacctacagtttggtaggctcttcgtatcagcacagtggcttgccgactacgatcttcaatctctgcatggtgagcccttaatgcctccatctctttatctctc

SEQ ID NO: 335791 - DNA, 740 bp, Cannabis indica
aaaaacctggacaagatttttttttccatataataaatttgtcttaactttaatatcgtcataattcagaatatggatcgagtttgatacatattttctcagcatggagacatgaaacacactatgtactctggacaacgcatgagttaaggctagctgataggctatctagcttatttatcttaggaaacaggtatctagtatttctctcgtaccacacttattgaagtacctaactcatagtacatttaattgtcacttttagacaaacactttgttaaaggaagagattattctaaaataatctaacctatatcaaatatacccatgacatgtttctaatattccattgatcttctcaggttatccacatttcaagatgttgtcgagtgaatttcgcaacaccagaatatattatttgattaatacaaaagagaattttcagagaaacgacaagtgcgagtattcgacctagaatggcgagtactcgactgggaatgtgagaacaatcaacaaagctggaaaatatcaataagacaaagaattatagtggttcagtcagattgtgatctgcttagtccactgtagcaaaggattcgtaggtgccatttcatggtggatcacccctttatatacaaagcaggtgtccaatcggttacataaggatcacattcattgttaatccattatttacatattgaattgcaataattaaacccaaacaacgttaacattaataa

SEQ ID NO: 335792 - DNA, 152 bp, Cannabis indica
gcaatatcctaaaccaacaaaaataaatttaacaaaccttctaatttccacaaatacttaaaagataaagttactgcttagccttgtaaagcaagtatgtgaacctaataaaaagacaaatgttgtacccccaacaaaaaaaaaaaaaaaaa

SEQ ID NO: 335793 - DNA, 872 bp, Cannabis indica
tttattgtctttatcttaaatagttttaaatggactaataagtgtgacgttacgggaaatcagggcgttacaataactaattagattcttctggatacttaattatttgaattttcaaagaaaataaatttaagttgaaaattagttttcaaactaatttttgaccaacttaaattagaatatgttgaaattaataattaagtagaatcttcttgaaaatttgttatttagatattctttaaaatatttttaagttgaaaatttgttaattttggatcaacttaaataggaatatttttcaaattaaggtgattagttcaaaatagttaatttgatatttaattaaaatattgaaaaaatcatttaagttgaaaattttgttattttagaacaacttaaattagattttttcagaaatttattttaatatattttatataatttcaaaattttatatttaaattataaatggattttcgaaattattatttgaaaattaaattaaagttgaaaagtaatttttttaattaattttcgatcaacttaaataaagtatttttcattattaaaataaatagattcaaataaatgactaattaaaaatatattattttaaataatgagctttaatcaaagagatattcgatctccattgttggtcttacaatggttaaatgttttcaatataacctcgagacactagacttcgtcctccttatggatggttatttgttgaaaacatttaacactgtaagatctcatatgataagtagtttgtaagttttcgtctctgttagactctctcctacgtgactacttagagataaacttacagaatatgaaataatggtggaagctcataaaatgagaat

SEQ ID NO: 335794 - DNA, 755 bp, Cannabis indica
aagaaaaaaagaccctccttacatataaaaaacaatctacttcatggctgaaaacacagagaacgttaacacgccacatgaagaaatgcatcaccgtcatggaaaggatcccatgggctccaaaaggcttcccaactcacagtctaaacggaccactcgctccagaaggagccaacctgagggtggccccaacactcagaccactcgttccaggaggactcaacatgagattggtcccagcacatgaacaacattttcaaggaggactcaacatgggaatggctaaaatcccaaagtgagagatgaatgggccagtcgtggaggtgctcagcccagaagtgagggtacttatgatttgaaaaactgccatcttaggcgccgcctggaggagacaaaccgacagatggctaaattagagcgcaatgcagctgcagctagggaagcacaggggaataacactcaaaatcagccaaaacttggagtgaaaagaccacgaggcagacctcctggctcacgaaccaagagacaggaaaatgctcaggaagaataacctggggaaaatgagattccccctaaaaatatgaatgatcagccaaaagcctctcatagaaatgagaatgggaggctactagaaactaacgaacaagaaattcctcgtggaaacgaggaagatcctcggacacaacccggggaacataggtcaccggcgaggaatcactagcactcttctcaaacccatagagagagggctcgta

SEQ ID NO: 335795 - DNA, 1335 bp, Cannabis indica
tgcaagattgaagttggcaaaagccgtaggggccgcaagagtagaagtcttcaatgattcgcaactggtggtcaatcaagtttcaggacaataccaaacgcatagagagaaaatggccgcgtacgtagctattgtccgggaactgctccatgagttcacatagtacaaagtggagagaattcctaaagagaagaacactcacacagactgtttggccaagttggcatcgaacagtgagatagagagattgggggtagtacccattgaacacctcgctgagccgagcatcagaatcaaagatgcggtggctgtaattgagcaagagccaagttggatggactccatcatcagatacataacgaaaggtaagttgcctcgggaaagggccatatccaggaggctatagtatcaggcacatcgatatgtaatgatggataatattctctaccaaaaaggactcagcatgccgtacttaaggtgtgtatcagaccttgaagctagacagatcatgcaagaggtccatgaggggttctacggagatcataccggaggtctaagtctctcaaagaaaatactgagacaaggatacttttggccaacaatgaagaaagattgtgtagactacgtcctgaaatgtgattcgtgccaaaggttcgcaaacataccaagagcccccccaacgagattaccctaactgactagcccctcgaccctccgcggtgtggggggagtagatctcattcggtcgtttaccaactaggaaagggaagtggtaaaggtatgctatagtagccgtcggacgtacttcacaaagtggacagaggccgagcctatgaagaacataactgctaaaaaagacattagactttattatcaaaaacaatagtgtgtcgatacgacttgcctcataagatagtctcagacaatggaaagcagtttgactgcgaagaattcaccaacttatgcaaccagcacagagtcattaaaagcttcttcgcggtggcaaggccacaaacaaatcaagcagaaaccgtcattaaattctaaaggtcaccctaaagaagaagctgctggcctacaaatacaactggcctggggactaaggcatatcacacggacaaatataaacagatcaagtgtaaggaagtttaaaaactaaatatattcgaacataatgtagattgtttgaacaagaaaaaccttaaaaaaacgaaaaaggacttgggggtacgaggccgataaaaagtctccccgttaaacgaaaaagaaaaaaattaagtcttagaagtgaggggaagggacatgatatgtaaaaacaaaaacaaaaaaataaga

SEQ ID NO: 335796 - DNA, 622 bp, Cannabis indica
tcaaaatctactaagcccaattctactaaatcacgactcaactctttaaccttaatccgaattggcatagacctaacctaccttttggagataactaattctccaccaggcaatagggttccaaaccctttatcataactatcaaacggtcttcccaatttatcaaaaactctgaccgtcacatacgagtgagaggccccagagtcaaataaaatagagatataagagttgttgatcgagagctgacttgtaacaacttaggggctagcttctacatcagcctgagtaagagcgaacacgcttgctaaagtgggtttgcttctgtcttctgctcttctttcttgagttgtggacaatctctattataatgtttaggcataccacagtgaaaacattctcaccctttacattcacccagatgatgcttcctacagttgggatattcctggtaagtgtatcgggtttctgaaccaccctgacggttgccatgaccttggttccctcggaacctcttgttctgacttgagccatcaggtgtagatggtgcctttctcttttgatcagtggtcaagtcactaccacccctaccataattagaagtaggaggagcagtggctccacc

SEQ ID NO: 335797 - DNA, 391 bp, Cannabis indica
aaataatttccaacaacttggacttagatccgaacctagaccgagatcggggtccagacctggacacaaacccggacacagactcggacccgaactcaaacacccacacctagaattagaccaaaagctagacccggacccggacccaaactcgaacctacaccaggatcaaaaccaaggacttagacctacaattgattccagactgagattgggattggaacttgggactcggacccaacctagaccaagacctaggacccgaacccacttctggagcctgatttggacatagactgaaatccgggcccgaaccatgactcgaactccgaccccaactaaaacccaaagtcgaactcagaattgcaaatggaactagaaccgaactagg

SEQ ID NO: 335798 - DNA, 859 bp, Cannabis indica
atctgctactgttataaaataattttttttaatatacatatatatattatattatatttaatttatttattatatatatactccgtttgattcagtcaaactgagtcttcacaacatcagtgtaaatccaatgcactgatgaaacagggactatatcttttgaagtatataatcacaatcacattccactgtgttgacatcactgtaattgtaaatgactatatgttctggacttaacagattttgtacatatattaaaccacaaacatgaaaacaacatgtaaacataaatggcttataatcttttattgataaccaataagaatagattggaatggattttatttagggcataaaatcccaacaaactcccacttgcactaacataaaacaagttgtgcatttcaatcaatctattgtcttatttctggaaccatgagcataaaacattatgcaacatcctttagtatatcatcaagggatactgaaatccttactgcttattaagtacatctgtataaatagaaaaacatatctctcattcttttaaagaatgaaatagagataatacagtgtagaattttcttcagttgaataattttctggtaatttcgaatttacaaatttatatatcttcactgatggagcttgaattattatagatgggtttttacactcttctagaataactcctccacccccagagtaaccaccatctcagattctttatgagttggtgtagatattaggacttgtaatatatacatccctattatctaacatataagtcactttcataaatctttcttgactatcccttaatgttccttgtttgattacatctcagatggctcccact

SEQ ID NO: 335799 - DNA, 866 bp, Cannabis indica
ttgatgattttttaataatttttttttttataaaaatatcaaaattgttagtaatgtagttttttatacacaaccaaacaaggtaatcttgcattcctatgctttaatattcccattttcagtttccaagaaatactaaacctattcccattaagtcaaaccttgtaccaaatggcccctaagtgtctcgccgggttgctgctttatatttgttagcaaggctgcttcgggtcgcctatccctagcaacctgaaattgctttttgaaatccctggacatctgctcccaagaagttattgaatgatgagtaaacttgttaaaccagctactcgctgctccaacaagcgaggtggggaacaaaatacaacgtaaattgttcgtcacattactcgctcgcattattgtgttaaagttattcaaatgtgaaaccggatctgtggttccatcataggacgagacatacgggtttttaaatcctgaaggaaaaggggtattcataatatctgggtgacacggctcaagctcctcgtcagagtcgtatccagatagtttccctgattcccccacttgatatctcctaaacttatcatccagctcgtttatccgaaattggattggatcctcttgctttggaccaagctgttggcgaaggtcaggtttctttcgattcaagtgctcttgtaaatctggttgggagtaattgttggcagatcttgccttactcatagatcgcgtcctactcatagactttgtctttgagtggcttacaaatttactggttcccatactttctcgatcattagctcgttgagtactttctcctctttgatttgatcgactatgggttctggattgcctcgaagtca

SEQ ID NO: 335800 - DNA, 1283 bp, Cannabis indica
ttgctcgatgtaattccggtagatgtattggctcacccaactataaatcgagaagtgatcatggaaatagattccgttcaagaggtcacctggattactcccatcgtcgcatatctggaaaagggtctcttgcccgatgacaaaatagaagcgagaaagctgcgacagcgagtcgcccgttatgtaatatatgaccaaaggttgtatcgcagaagttttagtcaacctctactgaaatgcatcagcggggaagattgtggttatatacttcgcgaggtacacggagggatttgtggcaatcataccggaggtaactcccttgcattaaaaatcatgcgacaagggtattactggccaaccttgcgacaagatgctctcgcatttgcgaagaagtgtgacaggtgccagcgaatagccacatatacccaccaacctccgagtaacctccattctatcacaagtccatggccctttgcagtatgggggattgacttaataggcgagctacctaaagggaaaggtggagtcaaatatgcggtagtcgcagtagattacttcacgaaatgggccgaagccaaagcactcgcaaccatcacagcaacaaaattgcgcgagtttgtctatacctccataatttgtcgctttggtattccatacaaactcatttcagacaatggaaaacagttcgattgtaaagagatgcgacaactatgcgacgatctaggaatcaaaaaggcattctccgcagttgcttacccgcaaagcaacggacagactgaagctgttaacaaaataataaaacacaccattaaagggagactagaagatcgcaaagggacttggccagacgagttaccgcaagtcctgtggtcttataatacaactcctcgatccacaactggcgaaacacccttctcgctttcttacgggtgcgaggccatggtgccagttgaaattggggcaggttccctacgcagagatgttttcaacatctcgcagaacgaagagaagcagttactctaccttgatcttctggaagaaaaacgcgatcaagcgcacttaaaaaatgcggcttaccagcagcgaactgcaagatactttctctaaggtaaaagtaaaagtcctgcgagcaggagacttggtccttagaagggtaatgccaaatacccagaacccaacgcatggggtctttggagataattgggaaggaccatatctcatcgcgaaaaaaataggtgacgccgcataccgactcgcagcactcgatggtactacgattccac

SEQ ID NO: 335801 - DNA, 617 bp, Cannabis indica
tcagggacagaaaatcaatacccaactccccatcatcctctccctcaagtgaaatattcgcatattgttcttccacctcctaatacgatgaactactagcagccatgagaatttgtaattgcctaccccaaccctttaatgaccacactccaacaaacaaggccccccaagaccgtaggacaacccgaacccaagaccctaaatatgcccaatgaatctgttaaaacggctagggtttgaacataaaatttattagaaaatattaatatatatgtatgatgattggaggttgaaagaaagatataaataattaaagggtattaaagtaatttattagtggaaagccaaaactatttatacttttataaaggttatagatatagtttttaaagtgtttatttggtacaccacgttagattatattgtatatagtaatttatataatttttaaggtaaaatattattttggaacctatgttttgtaaacgttatcaattagacattttattttgttaaataacaaaatagatcatgtattttcaaaaacggtgcaaataaaaccctgaactcaatttttgacaatttttttaatataaccaacttgaagagaattccta

SEQ ID NO: 335802 - DNA, 1014 bp, Cannabis indica
atttgatcaaaatatatttgtttccattgtgaataaaaacgcaagcaaacacaattgtattaagttcgaatgaaaatagtacaaggcatttaagataagagaaaacccaggtcgatttacaaacttgtctttacaaaaattccactaggggcaaaccattaagttttcttccgaaataaagaatgtaagggcggtcgataaactacagaaagaccgtcttcatatagctcggagaaagaccgtctacacatagcttggagaaagaccggctacacatagctggagaaagaccgtctacatgtagaaggtctccacctctgcatagacctcattctcctcattagaagatgccatttcctgctgccgagacctttttcccagtctcaggaaattcctcaataccagagagagattggcccaaaggtcttcttgtgcaggcttgggtcttgggttgcctgggttctttagaatctgaaaccacgccaactttccttctgaattcacccaaaacaatgccaactttcctcctggattccttgtcaccttagatctatgtctattcctgtggagacagagataaaagattaatggagaaacaaaaaataataataatccagttcaaatcacaatttacaagggataatacttactctcaacaatcacttgtgaggatcgcccataacgatcaacggtgttcccttggtttggattgatcggaagctccttagccttggaatccttcttttttaactcaaattgaggtttgaaggtcctgggaacgcatagagaagagaggtagttggcgaatttcggtattatgaatctagagaaataaatttctgaactcagatggggcatcttgacaagagaatgacaatccaatctcacgatgaaaataaacaaaaaaccaaaagtgtgtggtatatggcaagcctaagacatcattttatactcaaactccagtgacaagaaggccaaaagttaggagatttaacggttgagagtggggcagaa

SEQ ID NO: 335803 - DNA, 523 bp, Cannabis indica
tttaaacttttacaaacattatcaaaatacatttataaacttgttgcacagcgactacaaaatataatccaagatgtcccgagacctaacactccaagtcgtgtcgtctcgacatgtacaatcactatccaagctcggggctcactcctgttttgctttcgcctttcctttacctacacatgaaagtagcaaatgtgagtcaacaaactcagtaagaaaagcatataacaaataacgtatattaccgacttgtatctaggtgcccatacacctatccagaaggctaatcagatgagtaagaacgttcttcactaaggtacaacccctataccatatgcactacgtactgctactgtacaagtgttagtaaggtttgtcccgtacctcgagtaccactaagtgttataccatatacactccgtacctggccgtagtaatgttggtaacacctactgtactttttaaacatcgtatgctatacattatgcactcagtaccgctaccgtactagtgttggtagtgt

SEQ ID NO: 335804 - DNA, 1103 bp, Cannabis indica
catccttcttgctaagtgagttcagagcgaaaagagaggttcttggcttcaagtttgctgaagtgccttcatcaaaactacttcttggattgacgttgctcgaacccacatatctgactcttgagtaagtttttgatttcctttatgcttatgtttacatttcaaatgttttttcgactttgctatagaaaatattcaggaaaccctaggtcgaaaaacatctgcgattcttcttcgtcgtggcttcatgcgattttacagccataatccttgtttttttgaactgtgtaacgtctgtcttccatcttgcttattctaagcttcatgaaattttttgccttatctcgagaaaatttcaaacttcttgagctttgacttctctttgaacattcttgttcttgaatctgttgagtactcctagtcggcatatttgcttgtttatcgttcgatattccgacaaaacactcatcttgtgtgttgtctttttatagatgaactcaggtgagttttgggagaacagacatcgggatgactaggacttgcttcaactcttgcacgaggatcatcctcgtcttcattctagccctccttcctctagtgaaggacattctcgaaaccttatacccaggcatagaatgatgcctcatacaaagaaaacaacgcatctggctggcgcatatgatcctcaagttgctcggcacaccactttgccaagcaccgaacaagatccagccgtccagatggagggggatcatgaaggggacactgaggtccagcaaatcgaggagcagaacgatgtacgtcctcgaagttcctccgaggtggaggaagaggcagaggttgaacccccaaactatggggagtacaacgaggttggggagccagtcgatgctgacggagacatgctggtagagggcgtcgactacgtcagtgatgaacttgctgccgcggtttctcatagaaggtaaagtgccttgggtgccaggtgggtaagccctctgtctagggttactgaggcgtgccttcggactctcggctagggcggatacctgggcgaattggattaccacattcccgcccacaacaatcgtgtcacaaaccct

SEQ ID NO: 335805 - DNA, 581 bp, Cannabis indica
cgagagtacctatatggtttagataacttatagaatttctgtgtttaatgcatgttacatgtttaatttatcacgagagtagaaaatttacatgtaattgagatttatatatatgagaagactataaattaccttagtaaatctaatattgcatagacattgataataggaaaataatcatattaggacataatcaatagatacaattaaaatcgaaatccctaacttttatttattaattttcctattaatttacttacttcctgatttttattgttcttattgttttcgagtttcaattttatctcaaattttatttagccaagtagaagtaagagtttattttaaaatacttaacttcaattcctgtgggattgacctcactctttgtgagtaatacttgttcaaacgatacgtatacttgcgtattgcaaaataccacaacacttgtcgctggagggtgctgagcttgggacttgttgtgcgttggtgttaaggttggttctcatgtgtgtgtgttttaggaaaaataaaaaaaaaaaaaaagttaagaaaacaaaataaaataatatgaaaggaga

SEQ ID NO: 335806 - DNA, 1453 bp, Cannabis indica
gacgtttctcgaacccagatactcgaatcttgagtaagtttctgatttcctttgcatgtttacatttcgaatcctagggttagaaacttctgcgattcttctttatcacctcttcatgtgggtttacggccataaagcttgtctctaaactgcattgcgtccgtctttcatcttgcttattctatgcttcatgaaattttttgccctaactcaagaaatttttttgacttcttgagttctgacttttcttcagacatagccgttctttaatctgttgagtactcctggtcggcatatttgcttgtttatcgtttgatattccgtccaacactcatcttgtgtgttgtcttttgtagatgaactcaggtgagtcttgggaacccagacatcagatcgaccaggatttgcttcaacttctgcacgaagatcaccctcgtcttcgttctagtcctccttctagtgaaggacattcttctgaccttttacccatccataggatgatggctcgtacaaagaaaaccaggcgtctggccgacgctactaatcctcaagtggctcggcttgccactcttcccagcgccgaacaggattcggccgtcccgatggaggaggatcgtgagggtgacgctgaggtccaggaggttgagaagctggacgatgtgcgttcgggaagtccttccgaggtggagggagaggaagaggttgaacccccatattacagggagtacaacgaggctgggcagccaatcgatgctgacagagacgttcaggtcgagggcgttgactacgtcagtgagcagcttgctgcggcggttcctcataggaggcagggtgccttgggcgccaagtgggcaagtcctccgtccaagattacagaggtgcgccttcaaactcttaaccaggacgggtacctgggcgagctggactgctacattcccgcccatactaatcgtgccacaaaccctgacaaggggatgtgcgccttgtcaggggcccatggccagcaaggagcgctgatgtccttgcacaagtacttcaaggatgtgccagacttctttggatggaggaggagaaggatgccaaggagggggagctttcggccgaggtggataggttgaaggagaaggtcaatgccttggagacagctggtctcgagctcttcttcgatttctggaaggctaatccccaggaaaactttgactacttgggcgaagctaaggacatgtaccttgagtactacgcggcccaagtggcttatggtgggaacgaggcggctgcttcaaccttcggacaagctgcttcaacctccggccaggctgctgatgtttctcctattcaaacaacagatcctcctgctccaattggcccagaaaaactgaaccaagagcctgggactccatctgtttaaacaattatttttatctcttttttttatatatcttattcggcctca

SEQ ID NO: 335807 - DNA, 631 bp, Cannabis indica
gttaattaaattttaaccatctattatgtgtagacttggtgggttatagttgagaaggagcatctgaattggttagacgtagtaacaattcgatcaatcaaatttgactagtcaatttccatataaaaaaaatccttgtaaacaagttggtgtggggtttctagctatatacttcaaattttgacttctagggctttcgagatggtatagcccatcagtatcatatgaatactagaggtaaaggcttgtatgatgcattgatgagatatgcatctacaggaaaaacaacatgtgaaagtaatttgtagaacagtgttggaacataattgcatctaaacaaacctagtttattgatttgctttccctcttatttatcatcacttttattattagtttttgaataagttgtttttccttttcccatttacattatagttctcatatgaatattatcgtaatgtatttattagaattaaatcttggtccatcttaataaccctcactttggaatggaaggaaatcttgctatatggcagggtatttgtaaccagcatagcttgtaggtatgttagaaaaattggattcagtttgcattatggcgtaggctccagagacttgtgtggtagagtca

SEQ ID NO: 335808 - DNA, 1150 bp, Cannabis indica
ttagcattagggcgttacactccttgttaaaaaaaataaattcaaaaaaaagtttcaagaagtgtaattaagagagaaaaaaatatttgaattgaatagattttttaaatctaagaaatgaaagcagtttggggattgttattgggttttaaagtgatatcgtgttgattttgtagtgcttatcgtataattgcatctaaattacgttgttacctacccatacctaagctattgtcacaagtctaaaaaagtaattttgatttttgaacaagagttgtctacattggtagagaatggtaagtaatgcaaagatatgaaatattaaatttacttctttggaataaaaattcagcaagtataagttgaaatatgaaaaaatagaagacttggccaaaaaatgctgtaaaaattattgtttctaaaggaattctaagactgcacacctatttggagtggtcgtgtaactatgctagaaatgcatatcaagagaactttttatttttgtctattcgattggcaaaaatcgtcgagcttaggtcttaattgcgattttgagaggggagacttaattttttgacgactagaattggaaagaatcgttgagaagtgctttgaatgaagactagatctagagtttagagttcttttcttttttttcttttacttataaatgttaatgtcatgtttatggatttcttagtaatgaacatgaactaaattttttatcgatttttaattgaatctcttgaaactttattataaattaatgcaagttttctattttttcatcatctaagatctattcaatttgtgtatattgtgaatgttattaattacgcacctcttacatgctattaatgaattaaaattaaaacctgcgagaattgaatatgctaaaaaaaatttacatagattttaatgtagaacaaaagtatcaaatcggtctatataatttaggattgcgttcattgttttcaattgatttaatttcttatattgatataaagaatttgcaatacattgagtttcttaacccgaatattaaacggttttgaatatcttcatcattgattgaataataaagtggatagtagaggggattagaatccataattttttatttactagttgggtctaacgtgcttcgcac

SEQ ID NO: 335809 - DNA, 705 bp, Cannabis indica
tactaatcttacctcgattccgaattcaggtgtgctggtaaacctgagtggaacaatctgcttggcgaattataggctcctaaatcacatcaatcacaacactgataagcgacatgctaaatcacttctcggggacttaaatttgaaactaaaagtttccctatcgataaataacatgtcaatatcctaaataacacaaaaatgggaaaaactagggttcctaaatttgccccaaccggcagaccggttccccaaccggaattccggttctgggaaaaattcctggaagccaactggaattccggttcctacaggcctccctgaaccggaattccggttcagtgcaggaatggttcaaaatttcatcactcgaccaaaacaacctcaaaccaatccaaactttccagacctgttctatacaccatagagaacatttcaaggcaacaaaacaactacccaaatacagaaacaaatcccaccattaatgagccaagcttgagttcaaaactccaaagcttgctcaaacaacataacagcccttaaaaccacttctaatcaactcaaacaaacataaaataactactgaatcaaccatcaaccatcaacaacaacagcatcaactaaaattctacaacatgcaaaactatcatctttccttacaactcaagaaaataaaaaggaggttgctagaaattataccttggc

SEQ ID NO: 335810 - DNA, 1230 bp, Cannabis indica
ttcgtattcttctgtagtaaatattagtgaaactgaaattttttaatcatatatattcaatttcaaacaaaactctcagcctgcctattagtattcacgaatcgactccactccagtggtcaccctaggtcttgaaactcacccacacccataaataacaagagttattatttgataaaccaatttgataaaagctattatttgaaactcacccacacccataaactcaaggctgccgtgtgtttgactatgcccactccaatcgtcaccttggtcttgaaactcacccacacccataaataacaagagttattatttaataaatcaatttgataaaaggctgccgtgtgttcatttcaaaaaaaaaaaaggctgtcatgtgtttgacaacatagaaaaatgggaaaataatatattcaatttaattttatttcagctcatacattaaatttttgggctcaacccaataggatccgaacccgattatgcccaacccgaaaaagcccgacccgatacccgacgcacctaaacacccgaaaaccgggttcggttgtgcattttcaagacccgaagcctgaaaactcgaacccgaaaatctgaaaactcaaaaactcgacccgtgtgcagccctactttctgtagcagagcattatcaagatctgaacttggatctctttctctccttcaggtttggttaccaccgtcttactcagtatgatcgagtacttgactcgctatgtgtaacgccctaatctatagggacgccacgtgtgtgattttataaactagtttaatactaatagaataattaattattaaaaaccgtgataatattaaaaacttgactaaaataaaacactaaaaatggacattataacggcataaaaagtgtgttccgggaatccctgttataaaaagttttgctaaagaaatatatacgacaaccatttaaacataaaatcaaaatacacagcagatacagccagtctaaaacaactcctggcaactcggcacgcaggccggcgaggtcaatatgtacattgctggagaagactgccacctcatggttgatctagcttttctttgcctttacctgcaccacatagcacccgtgagtcacaaggactcagcaagaaaagtaataataacaatcatatagtttattattcgaatattgtcatttatacacaataagaatcaaaccatcacactttgttcataagatgaaat

SEQ ID NO: 335811 - DNA, 1024 bp, Cannabis indica
ggttaacttaaaaatttaaaaaaaaactagaaaagagataggaaaaataaaaggaaaaaaaagaaaaaagaaaaaagaaagggaaatgatggatggttgattgatcggagtcataggtcaagcacgtatactcatgcatggaatgagtgtgcatgtagtaaaatagtaataaaataaaaagaagaagtaaaaatttgatatagccgtgtagggtattagtgtaataaagattgcattttgtattttgatgtaaaatttcttttttaattattattttgaaggttattttttttgtgttgttttaaattttttaattaaggcaatgccttattatcttgttaatttttaacttaattgtgtttatttgttgttattttatatatataaatatttgttgctatttagttgcatgaataattaaaaaattagagcatatttagcttttatatttatatttataattttttttttgtttttacttttcttttttggagttacttttgtgctatttaaataagtttcttttgtgttaaagaaatatattgatgtaggtgatttgtattttaccatatgtatggttggtaagagaaaagggaaacgaaagaaaagtttggtgaaaaaagttgatgaatgaatgaacttcctatttttggtttaaaataataatggatggaagagacatgaatagagaagaaaaaattaacaaaatatttaaattttatttttaacatcataaattattttgaattttttaaaaaaattacggttgtcctaatagctagaaaaaaaaaattataaaatttacccattttaatttagaaatttttacatgaaaaatccattttgcacaatttattacctaaatagctctacacgcctatgtctacatttttacttacaaagttggttttattacacaaataccacttagtcatcattccatccatcatcaatcaaatcctactctcttccctttcttttttcattttctatcaatcaacccatcatttcactctcttttttt

SEQ ID NO: 335812 - DNA, 1097 bp, Cannabis indica
aatcgggaccctagattggtcagactgggcttagttgagaagtgcctatattaggttcaatagaaaaagagtacagcgttcaacctcaaatcaaaatcacagagagctgaacctgagttgtctctctccccaagtccccgagtcccaatagaaaatgtcagtggtttattgtcacttgtcagatctatccaccggaaatcggaaatgaattttactaagttttccgaatgagtaaggtattttcaatttcctacattaatgtgtttttcttctttctgattcaattttcccaggaaccaaacgtacatggctattgatttgtaggaatgatgcaggcagctcgggaattactcacttctcaacaattaactgaaaaggtttcattttgcatgattggcgtaatgggttttcttagagctagcttgtttgttaaacatcgatgcctgtggtggctatgagggagtacgtgtacgattttgttcttgctttcggtcaagctcacgatcatttttcatcaataatttgaagatttgggggaagttttgaaaacgcgcttttggattttagatttacttataaaaagcaagtttttgacactacatctaacttttacagtagaactagtgaaatttcacttcatttagttgcaaatcatttgctttcaaaataatcggataattatgaagatgaacagaggtcggtttttgaagacttcgatctccttcgtatggttggtggtgctttttggctgcctttttgtggttctaatttctgttcttaggcttccagaggtgtcaaatagtagaaaggcaattgggttgtatcataatacaaaaaccagagaaagttcagagtctagctctattgggaaatttggagagaagatgattgaaatgttgcctgaagatacttgctttcactgttttttgttccttcagagagagcctttgaacgagatttaaggctaaggaaaacgaaaagtctggttgagaagatgaatgatgatcttaatgctgtaatttctagagttctgggattctcggcagttccaaggacaattatcacagatgatgtatcttctggtgaggtagattttg

SEQ ID NO: 335813 - DNA, 676 bp, Cannabis indica
attaataaaataaacacatataaaattgtaaaaaaccttacattagtggtagcagaatataatggctccttccgttagatctttaacccttgttcctttctgttacagagtattaccaagatctgaacctggatttccttaaatgatagaattcttcacaatcttccacactatgattgagcattgacttgaattgtgcgagcaagtgttatacccgaaattcgaccatcatgtcaaatgaggtcacgtgtcaaattaggaaggatgtgaattaatgaatgtaacagtaattacatttaaaaatagaataactcattaaatgcataattgacagagtatatgtacaacttgctgactataaggtcttacgcgagataaagatatacaaattgttgcctcgtgcattaacaagaaagcatacgacattggatgtgcaaggcgaggcatcaacttcgttacgcagaagcgatgagatttacattatcaaccttggaaagatgtgggaaaaggtctagctcactgccagagttattgttgctatgttagaaagatatgatttacaacgtgtttaatccacgattaccttgacctggtaaaagaagacctatcatagctatgtgatattcaaatattaaccacatttattttacgtggtatgtaatcaaactccacgatt

SEQ ID NO: 335814 - DNA, 520 bp, Cannabis indica
aaatttgtacaaattaagggagagtataaattttgatatggggtatattattaagggaaaaaagtgaaattttccattaaatattacattcattgaaataaattgacatatatcacaaaagttagtgatttgctacttcgatttcttaaatgatattctttttaataaattagagagaggacttgaattgtttctttctattaaaaattgagtctaaatagtctttcaaaaaactacaatttagaaactatcaattattcatttattttcttataaaaacacatgaattttttttttgttaattctatttctaatatttattacaaaatcgtcgtctttctctatattttaaaaattgaaaatttatttctaattttaatactattactttgtttaaaatattatatcttacattacatgagtataaaatatatatgtacgaaaaagattataaaatttagacaataccgcacgacttaatttttttttttttgtagcaaaagatgatttattcattcat

SEQ ID NO: 335815 - DNA, 534 bp, Cannabis indica
gaatttcagttcaattacacccttgacagatttcaatttattttcatttagctcatgaaaccatagaatacaattaactaacaattaaaccattttatgcatgccaaatacaatcatcaatcatcaatccactatcccagaattccatatacttgcaatacttattattctccactaatataaattaatgcacaactaagaatcagaaggtcattctaggcttgcaatgttaggcttagggtaaaggtagttgaaatggtcatttaggctttcctataccataagcttctccaatcatgccacccaaaatatttttcacacaatctcaatacccctttctctaattacatgagagatattactattttcttccaacaagattgcaacaactttatatttatctttttctttctagatttgacactggttatcagattttctttctttttttcctttttcaagttgttgccaatcaaaaaattttcacattctcccaattttcacacttttttttcacacacatacaacaaattt

SEQ ID NO: 335816 - DNA, 715 bp, Cannabis indica
ttctctttctttgttcgaccaccacaaaaccaagggggaaccagcagatttcattctatttttttggaattcaacaagtaatcttagtgtttccaagaggaggtaagctctagcaccctaattctttagttttttaacttgaagtttaacttgaatatgcaattttgaggtgtaggggctgttagggtttgtttgtgttataattcgatttctaagtttaaattgagttacaaataggttcttgcagttggttttgatgttttgtgtaatggatgcacaagtttgattttgaaaactcaagcttggttcatccatggcttgtttttattttgtgtacatttttggattctattgcttagagtttgttatgggaggtcaatataggtgttctggaagttttggtgaaatttggacacgatttgagcaagttttgaattgtttggggaaacttggtgcaacccggttaactggttttccagaacctgtaaaaccggttaaccggttttggtaaattccccaaacaattccttttgtcgattcgtgtccattttagagccttttttgggtgattccatgtttcttgggtattgtagtttcagttattaatagcagaaccttaagttggaggttcgggtttcccagattagggttttgggcgtgttatttatacgattatgctatgtgattagggcatctatctatcacgaggttttcc

SEQ ID NO: 335817 - DNA, 258 bp, Cannabis indica
aaaagcctgaaggattgggcagcggcctgcagcatgacatatctttgtgaaaattacattaaatatgagattttgtaaaaaagttacaaaaatatgacatttataggtttgtcacttttctatgacattttttcacatttaagattttttatggtatttgatagggaattttacacccattattgttttttcccaatttctttcttttatactgttacacgcctaaattaacttttatactgtttttttttcggcagt

SEQ ID NO: 335818 - DNA, 699 bp, Cannabis indica
aaaactacatgtaaacataaacgacttataatctttcgttgataacaaaattgattagattgaaatgggttttatttagggcataaaatcccaacatcttcttcatctacagaagattcttcttacaaaatccaaacccaatctctctcttttctcagcacctatctctcttcctctcaatttttttctctctgaaactctcaatctcatctctaattcgtaagttctatcccaaaagtcaaggtgatatttataggcttaagattaagatcctaaagtcggtggctgcaagaaatgaggttgttaagttagttagaaataaactcctctttgagtgaagtctccatgtcaacttaagtaccagagcctccgagaacataaacgagcttccggactcgcagaccatggacacttgctgaaagaaagtattgcttaccgtagtgagtaggcaccttgtatggtccccaaagatcaacatgcacatattcaagcatctttttagctgtattccttggtcgagtgagcttcagcttatgttgtttttgttaagattttatgccctaaagaaaactcatttcaatataatataattttttgtcaataaaagattaatagtcatttatatttacatgtagttttcatgtttatggtttaatgtatacaatttctgttaaatccagaacatatagtgttgggttt

SEQ ID NO: 335819 - DNA, 773 bp, Cannabis indica
gtaaaataattccaacaatatccttgaagtaaatacatagataaactaaattgcattgtaaggagtcctaaccactttgttccacctgtgcaccatcattttagagtggatgcatttagtaaaatttacttgctagtcttcttatagcacgagactagcttcttatagcatgagactaacttaggtcgagaagacattgcacttttagctaggggagagtcaattacgctaaaattaatggtttggatcttcctgatgtcttgcacgataattttttgtaaaaatcatatattttgctatggccttgtttgatggatattttgtttattttgtgtagatcaactagccaccttacagatggggctattggataggttcctgggtaacatcaaatctaggtctaatgacattctggaggtcccctaggaaggtaaaggataataaattaaagtttctaagagcagatctcagcagccaacacctttcgctttgaatccagagcctgcttctaaggctcctgcatggaaggcttgtctattttcatcatcaatctgactataaccattctggttgtggaacctttgaggtaggtttctttggagagctctagatgagacaactctgatcacgaccgatcgtgatcaataagaattactcaggcttttctaacagtggcaccagtaaaaaggcgggggtggagaccaaggagatgttcttgttggatatattttaccaggatttagatttactaacaagtatgtttcattaacatc

SEQ ID NO: 335820 - DNA, 497 bp, Cannabis indica
aaattccctaaaataatgaaatcaacacataaatgtttatagaaaaccttacattggttgcaacagaatcatatgactcatttcgttcagatctctaacacttgatcctttcagtcataaagtatctgaacctggattctccttcaattaatagaattctacaaatcttccacactatcttgagtactgccttaaattgtgtgggcaattactcaatcacacaaaattttgaaaagagaagaataaggattcaaatattatggtggttcatattttatgtaatttgtctatttttctcaacatctgattagtatgatttgtatttgaaatactaaattcttatcatcttcaaaagcataacatagttaattgtcctttttataaacttggaaagatgcatgcattagaataacttaatttttgtataaaatattttagtttcttgtatcttttttattaaaaaaaaaggagtcctgtgacttgacttatgggctaag

SEQ ID NO: 335821 - DNA, 1301 bp, Cannabis indica
agatcctggtaaaataaattccaacagttctattgtccttctcacaccactagggcgatagaataagatagagttgtctattttaaagatgaatttggttcaagtcaaaggttaagagaaattatattcagggaaaaacgaatttgtgtccctttacctattgctttcgctttcgctcctactaatgatcctgtgattgaacaaattctaacagaagcttatgatgaacctcacaatcatatgcaagatgaaaatcctgatattgagggtggtgaagttgtgtcgagaagatcagagagagctcacaaacttgccattcatgatgattaccttgtctatttgcaagaacatggttatgatgtgggagacgcttttgagccaattgcttatcaagaagccatgaggagtcctcaatctaagctatggttgaatgcaatgacagatgagtcaagttccatgttgcgaaacaaagtttggattaatttagttatcctaccgaaaggttgcaaacccattggatgcaaatggatttacaagatcaaacatgactcaagtgggcaagtagcaaggtataaggttagacttgttgctaaagggtataggcagagagaaggtattgattttaaagaaacattttcacctaactctaccaaagattctttgcgaatcatcatggttatagttgctcattttgatttggaacttgaacaaatggataagaaggctgcctttttaaatggagatttgatgaagatgtctacatgactcaacctattagatttgaggagcctagcaatgaacatatgatttgtaagctcaataagtctatttatggacttaaacaagcatcaagatagtggtatctcaagtttgatgcagttgtcattgcaaatggtttcatgaaggatatgaaggtcagtgggaacaatttcattttcctagtactgtatgttgatgatattttgattgcttctaatgataaaaatttgttatctaacacaaagcaattattatccaaccattttgatatgaaagatcttggtgaggcttcatatgaacttggcagatcctccaagataggactaaaggtattctttggttgtcttagaaaacttacattgattggatcctgaaaagattcaatgtgcatgcttgttcacctggaaagacaccaatagtaaaaggtgacaaattctcaaggggtcaatgtccacaaaatgataaagagagatgatgaaaatggtttccaaagggtcaatgtccacaaaatgataaagagagtgatcctggacttagccatt

SEQ ID NO: 335822 - DNA, 951 bp, Cannabis indica
agagatactgttgtaagagctataagacaggaatcttcttccttgttcttaagtcaaattattgctttattatatattcattacgacatatcgtttatcgcttctcaaaaagactcattgtcgttggctaaaagcgaagtcaataataagttttgatataaagttgttaagtatgtttaagcatgcgcggtaacgcttattagcattaatcttggttggaaaagattttaaccatgagaaaaaaatggtcgcgagtgtactagaaggtgtattgggggcgatctagtaagaataactgcgagcttatcaggcttggagctggtagtgtgggtatgaatctttcaccgccacaagattatgaacaaatgaatgccacgaagtaagagattacctgagtggcaaggtattagaacttacatagttgatcccgggcagcgcggtaatggagaatgacactaagctggaccgaatgaaaaagttttgttttatagaagtggctgctaaggccgctaggaaggctaaatccaattgaaggtggaaagagtatatcactcgaaatgtggagttgtctgtctttatgctcagctggttgagctaacccttactgctaagggtgcaaggactagatcacaaaagaaataatataaagagagattcatgaaagtaaatgatcaattttggatcaggtaaatggtgtttaccctaatgaactcaagggaaaggattaccaacccaccagttatgggtttagtaggaaaaatttaaggtaatgttggggattggattgacttgtaaagtatagtgtaaacattgatcgtgaaagaaaggtggcaataaaaaggtgaggatctatttgtattcttgtggaaggttcaagggttccaaaatccattaatcacgacatttaaggcaaaaagtttagtatgggatggatgtaccaacctttcagtt

SEQ ID NO: 335823 - DNA, 792 bp, Cannabis indica
gattcaaactactgtccttcatgaacgcctacgccgggtacaaccaaataaagatgcacacggcggaccaagagtgcactagcttcaggaccgataaggggggtataatgctacttaccacagtcaaggatgcacaagcagcgaaccgcttgggcgcgcaccgggttagctgagacacaaactcgtcaatcatctccgcggcaaaaggagccaaggtaggcccgaggaaatgattgaaccagtccgacagggggtccaagtttagatcccacgggttctggtagttctgatcgttaagggtattttgcatttcatctcgcaaaacccttcgcaggggtaaccatctaggaagaagttggaggaagaggagcgtcaggagtgtgagctccggcaagggtggccaaaattgcctccatggggttagctgctgcaacaagagaaaagagtaagtgttaaaatatctgtgaaagcagtaaacacttaagaaagcaataaagctagtcctaccctgactctctaattcggccctagcaaagttctgaatcttaatgttggctgcatatcccgagatagctatccgagggccgaaaccagctagaagaaagataggccgaatgatccagggggaacgggctccggaggtcgagaacccatccgggaccgacctagataatctcctaagttggagaaataatactcctttgcatgatccccccaccgggtcgagggcatcctaaacctaaggagacgttcatcgaaccctacaggcctaaggctagcatattcgctaac

SEQ ID NO: 335824 - DNA, 703 bp, Cannabis indica
tttttcatgaattatttatgttatttataaacttaattatgaaaaatatttaggtagctcagaaaattcaaaattaattatttatggcttagtacagactataaagtgagttagaatggttagatttggttttcaattatttttgtatttttcatgaatttatttagttaatgctttaaataattatgaaaaatagttaagtgatgctaaaacagtaaaatgtatttttgtaatgctatttactatctttggtacgaaataaaaaggtttttataatttattggttgttgtaggtatttattataattatttgtgactaattaactatttaattggattctaaatataataaatagtcaaaaaaaattgtgtttactttttggggaacctttaatataatgctaaaatataattatagtgtctagaattaatttgagactatgttgagatgttttgctatttttggttaattattaggattttattcatttttaacaataaatttatacatactcatggatagtatttcacacatatttctaagcatattgaatatgttttatgatctgtataaatggttaagaaatatgatagcttctgatttcgataaataattacatattggtatatttgttaataaaaggtattttttagtgaaattttacgtaaaaatgtatttgtatgagttcatgttttacgttaa

SEQ ID NO: 335825 - DNA, 509 bp, Cannabis indica
tgtatttcacaatgaacacacatgtaacttgaatgcgagacgttcagatcaccgtcaagcagcaccatgggtagttggccaccttattaaggggaagtacaccaaagatggaactaagtacaaggctaaagacagatagagggacatgtttgacaactatggtatccagatgaattatgtgaaggcgtggaggtgcagggagatgagacttacgtatgctaggggtacgcttgagttttcatacatgaagtttcctgggtacttgtacatgttggaacagaagaatccaggtactattactgacttgtacttagaggatgccgaaacgactttccttggccgtgttattcaagttgtactcctcaaaccgagactttatttttgcaaaagttccggtgcctctgtaagtaacgcgtccagtaaaatgcttaggtgctggaattatgagtctgggagccatttgaaaaaacaaaaaccaaaaaaatattactgtcaaaaaattaacaaat

SEQ ID NO: 335826 - DNA, 2116 bp, Cannabis indica
tcttcttttttgttgaacaggctggaaattaggatcaatattcaagacgtgtgaaattatagaaggatcgattccgaccatgtcctcatgtgaccatgcaaaaatgtccaggtctgctctcaaattttatcaatgctaattttacttcgagcagcaaaccttttccaatttttagtctcctggtcggaacatttgggtcaattctgatttcttctagttcttccactggaccaacatttgtatttggttccccaagttggggatccacatcttcatccccgccttgggcggttccctatttagcaatgtattttcccttgtctgaactctgactagaggatacttcctttctagccttggttagggcaaggttgtaacattcccgtgcaacatgttgatttcctctcaggcacccaaccccattctttgttggaaacttgaggcacgaatgaaatatcgacgtaacagcctttaagtcatataaagctggtcagcctaacatttcgttaaaggttgatggaacatccaataacaaaaattgtgtcattacagttatgctctttggagttttcccaacagtgaggggtaggcaaattttccctagaggtgcaatactctggctggagaaaccatatacgggctgaagacagggggttaagtctttgagttggagccccattttttgatatggtgttttgaacaagatatttgcagaggctccattatctatcatgttttgggccaccattttgttggctatctatacttccacgaccaacaaatccttgtgcgggaaatttactttgataccatcctcttcgttgaatgttatggtgggttctgctgctcgcggtatttttggcttcctttcttcgacggccaggaccacttcctttttctcatgctataatgttcgagcatacctttcccaggctttgcctgaatctccagctatgtgcgggcctccaataatgacttgtaaattcccttctacttgtggtggcagtaaatcttgattattgtctgtctgggtggccctccgatttgatcagacttgacatatttttgcatgtgtgagttattctttctaattagaaattccatttccttcttcaaattgttgcattcattggtgtcatggccataatcttcatgaaaacggcaaaacttggacatgtctctcttacttatgtcctttttcatgggagcaggtttcttatacggagctactgtctgagtagccatgtaaatggtttccaaatcttcagtcaagatagagaaagcagtgaacttagaagaattgtctctaagggcctgttcggccttaccagcggactttccctttttcccattaccttatttgttgttgttgttagaccttttaccgcccgatcttgaattactcgggtactgggagtgctaaacggatgttccagtagagggagcttgtgattggtttggtttaagctcgacatctgctcgctgaatggcctcttcaagcttgatgaaaccatctgcatgatcgaggaagtcactcatagaatctactggtccgtctctcttgatgtccttccaaagctctccaagaacttcaatgccccccagtatcgcaattaatttcccttctttggttaaccatgcaacttttgtcgcctccgtcatgaatctgctgatgtaagctcggagaggttctcctggcctttgcttcactttgaccaagtcctctaaatgcaatgggagttggcgagataaagagaattgtgcatggaattttgaggagaaattcttccaagagtttaaccttccaggtgccaacttgaagtaccattactgggcggcttcagagagtgtggcaggaaaaactctacaacatacatctcctcgtactccctgtaggtccatttgcatttcaaaatatttaagatatgataagggatcttccttcccagtatacatcttccaggtcggcatcttgatcttgtggggcaattctagagcattaatttctggagagagtggggatccacgtgctctctccaacttgaggtcattgttcttctgactagccagaccttggaacatgttttttagttcatccaactgtgcttgcacggat

SEQ ID NO: 335827 - DNA, 503 bp, Cannabis indica
ttgatgttataagttgaagctctagccattttggtgtgttgttttgaggacgttatagctttattgtctaaatttccgagggcagtttgtgctcgtgttgctcgcttactttagcagttcatggtttgacaagcatgcccttcagttagacgatgagctatcctggttcgatgaggttcctgcgcagtttgtggatatatgcatcgtaaattcatgagtgattataatcactacgtcaaaaaaatacattgctaaaatctaggaatgcatatttctctcatggggatggggccttggggggacccacccctaatggggcgggtaaggctgcacacgagtcaggttttcgggtttccaggtagtcgggtttgggtttttagatttcgggtcttgaaaatgcacaatcaaacttggttttcgggtgttcgggtatggcaagtttcgggtcgggtattgcgggttgggcgtggtcgggttcaggtgttattgggctgagcccgaat

SEQ ID NO: 335828 - DNA, 895 bp, Cannabis indica
tttggatgaggctggaggacactgagtagctctctttctttatgcaactcatcaacttcagcttcatgttgaccattatcccatgccaaatgtaggtgactaagagactttttactctttaatgataatgctgcatcataaacttcctcaagggtacgaacattttctagtcccttaataaaaagactcccgtgaagatcttgaaactctttcaacaacttgatgccaacagaatctctatttcttcccacaacaaatgcattaagtgtttgcagattttttagctttcccaattgcaatggcatctcttctaaatagacagaaacactaagatgtcgcaacttgattaaagttccaatatcagttggtagtctggtaacactggtacattcctccaacaatagtgtctccaaattatacaacttgcatattgtattaggtatctcttcaatattttcacaatctaacttcaaatatcttaaatacttcaaattgcctattgaatcaggaagcttggtggtcttaccgtcctttatggatagtactctcaagcttgggaatgacgtgtccaagtgcttaatctttaacaatcttagttgatgtcttgaacattgttcccacaatatggtgcgcaagcatttggctttacataactcctcaaattccttaaggtcatcagcttttgcacactcttgcatgtacgaaaaatgacgagccttgtcagaacatttatttatattattcatcatataacaaaactcaccagaaacaaatatcgccaaatcatgaataagatcatgcatgagaaaagttgactccatctcatagtatttatttgaatggttgaaaaaaatgacatagaaattagatcttcgaaatactcttactccaactt

SEQ ID NO: 335829 - DNA, 722 bp, Cannabis indica
tgtacaatcccatccgagctcaggttcactcctgttcagctttcgcttttcctttacctacacatggaagcagaactgtgagtcaacagactcagtaagaaatgcatataacatatcatataatttccgacctgtaattaggcgcacatacacctatttacaaggcttaacagattagcatgaacgttcaatactagggtatagccactataccacatacactacgtacctcactgtacgagtgttggtaggatttgtttcataccctgagtaccactgagtgatataccacacaccttagtactttcccgaacctgtgttggtattactgtactgtactcacagataatatttactataccaacgcactctgtaccataactgtacaagtgctggtagtgcattgaaaaacttgagcatgcatatacacataacatatacatacattcagataatcatatcacacattatattcagttcttaccttatttccgaactcaagtgtgctggctgacctgaacggaaatcttgtgctagatggatgccctaataacattttaaaaccgggtaagttacatgattaaaaccctaatctcgcgatacccaaaaccttaaccctacgttctgctcggctttccataggttattctaactctggaaatgggaaaaacacccaactaaggcactgcaaagacgaaaattgagaaaatgaaaggcccggg

SEQ ID NO: 335830 - DNA, 548 bp, Cannabis indica
actaaacaataaaaaataaaaattaaaaaataaataatggtaagtacgagagagagagagagagagagagattgaagtgaagaaaaaattgcatctgtcgaagtcagcccaattgtacatcgacgttggcgagccaaacatcggccacaaatggtgcatctctggccacgaacatcttcagacacgaaatctttgacctttctctgtcacgggtgactgtgaaagttgctcaaccgctcgaccctgctccgtttaggccaccgtcagaaggaaatgacctcaccacgatatatttgagttctcgaagcctccagatctaatgttttccaagttctaaatctaagattttcactctttcttttggatctaagattttttttttgtagattagatctgagattttatttatttttataagatcttggattaagatctaagatcgtgacgagggtgatggtagtggtggttttggttgtggtgggtggttgttttagtggatggtggtagtggtgataggcttgatgaagaagaatgaagaagaagaaaga

SEQ ID NO: 335831 - DNA, 820 bp, Cannabis indica
aatacctaaggatttcagttgtaaattagggtttaggctctcctatacaaaagggccttaactctaacctaaaagacctaagtctaattctaagtccaaaatcctagtctctcttcctctctctctctctcttgtacatgccgaagtggattctttctttctctctctcacatgcctctaagaccatatctctctctcattagagatctacctacttgatccatactttgtaaccttaaagagaacaacatcaaatcctagctatagagatgtgaatagtattatctcaaggtatcaatacaacaaaaaggggagcaggtcattacccgctaaataagggggtcgaccctatataaaaatctttatgttctttacttttgagttctaatcgtgtaacatgtgaacattagattcatacgactccactgttggccacttttgaaggtcaatagtttcgtgctttcattgagagcgagttaatatcatatttgatcaaacaccatggttaacacgagaacaactctgattgcaccatttgcatctttgagtcttcctcaagtcccacagactacagatcctgatgtccatattccatccacgactagaattcccatgaacacagtagatgttgtcaatcctgacaccacagctggcaccacgaatcttgccactacagttggttgggatggcaaaaaaatcctggtggatttgaacaatcggctcctgcctccaagggaggaccctccacaagcacctccaactaaaggaaggacccttcggggggttgggttttgtgccctaaataaaatctatttcaaaa

SEQ ID NO: 335832 - DNA, 598 bp, Cannabis indica
taaaaataaaagaatattctgttaaatttaacgatgttaataggtttgatcgcccgttaacaaataaatcctataattaaacccaataattaaatccaaaaaatcaaataatttttttttaaattaaaaaaaaaatcatcatagtcacatatctctctaacaaaccgtatatccccaaattatcaaattcaattctcacgctttggtttacgatcaaccaaaggcagctatggctttgcactccgtaagtctttcttcttcttcgtagtcttctttttcattcattgatttttgttacaaatttcaaatattgtttgtggacacttgcagtacgcctacttctctatcaatggccattccaccataactccctggtgccatacccttaatcgattaatttcaggtcacaattaacataaatttaccaaatttactcatcttcacaccactgttaggggattacctcctcacactactttgctttgctcatcttctcgattatattgctctgcttcggtagcacgtcttccattgatgatggaccagagcaaccaccaagcctcgctccgattcttccattaacgtctccacaagacct

SEQ ID NO: 335833 - DNA, 528 bp, Cannabis indica
ctacatgacataaaaatgcatctctgaattcaataataacagtataataaattatttaaatagctataaataatttcataattaaacgttattaactgctaatttccaaattaaattaagcggtctttacatactgattgttttatattagtgcaaatgggaatttgttaaattttgtgccataactaaaactctatttcaatgtaatcttgaatattcacagtgacacttaacagagcattttaaacgaaatggataaataattaatagaagtgatgtttggagggttttaccaccaaaaatcaatttatgtgattaagtgtcactaattatatagttgaggtagttttgctgctaatatctcagtttttttgcgactaaaccctctcaactatcatttcacttgcacttaatcctctcaaccatcattccacctacacttaaccctccaaactcatatatttaaaaattataaaaattatttcaaaatttataatatatatatatattttttaaatattttatttt

SEQ ID NO: 335834 - DNA, 760 bp, Cannabis indica
attttgctcagctcttgcctgtaatttaacatatagttattgttagcaaattgagaaaaaaaatattatgtaaacaagaaaaaatagtaaaattttcaattaatacctgttgtttcgggtctttccagtatgtgataacctctgcccacacctcccgtgtcaccatatatatatatggatgtgatctcctgttagcttcttcctccccatattttttaatattctccttccatgccttcttcgtatctgatctctagtcatgtaatccttttgacatagatttggtgacgtaatccacgaaaatagaattattagttggcaactcaaacttggtctgaaaaaaaaaataccgaagtcatatatattgtattttttatataatgatttcgtttgatgtattattacaaaaattagaatgttaccgctatttatcccatatagtttgaatgagtgtagcctcaacgtcctcgaactcaaacttgttcataggaatagtattgtgaacaagaaactttatgtaattgttaaacttgttgccaaagtcatctacaggggcctagtcgccatatgaaatctaaattttaatttttgacctcgtggcagcttggccagttcttgttcaatatttttttcccttatactttcccctaactccctttttctgacctccacttgaacctgcatcagccattctacaaatacaagctacgaataattaattaatcttactattgatgaaagaggcatgtatttcatttaa

SEQ ID NO: 335835 - DNA, 800 bp, Cannabis indica
gttagtccagccgtgcatgttggacgactaaaaaatatgttccaaggcctagccggtcagaggaacaatgatctcgagttggaccgagcacgtggaacccctttctcccccgagatcaatatcctggagttgccccacatgtttaagatgccaaccacgaagatgtatacttggaaggaagatcccttatcccacctcaagtattttgagatgcaaatggatctgcaaggagtacgaggagatgtatgttgcagagtttttcctgccaccctctcggaagccgcccaacaatggtatttcaagttggcgcccaaaaagtttaactcatggaagtctttctccttggagttccatgcacaattctcctcctctcgccaacttccattgcacctaggagatctggtcgaagtaaagcaaagaccaggagagcctctccgagcctacatcagcaaattcatgacggaggcgactaaggtttcacggttaaccgaggacagaaagttttccgctatactggggggcattgaagtccttggtgagctttggaaggacataaggaagaacagaccagtagactcgatgagtgattttcttgaccgtggaaaaggttttatcaaacttgaagaggctattcagtgagcagaaggtgaacaaaaacctggcaagtcaaaagctccttctactgggacatccgtccagctcccccattactcaagcaattcaagctcaaatggtaaacggtccagcaacaataataggcaagggaatgggaaaaagggaaagttcactggcaaaaccga

SEQ ID NO: 335836 - DNA, 689 bp, Cannabis indica
gtcataatcttcaattctattataccaaatggcttcattgtgaaagtgggcagccttttttctattggtaagattagttaatcatatatgagaccattagaacttattcctcccttaaaaattaagagcactgagcactatttcatttgtttatttcaaacatccaatattttgttttgaaaaatgcaggcttgatataggagatggaaaagaagttaacctagagagatgccctcgaccgaagcttcatcagcaatgcatcaagtatcttggtcctgtaagctctatattccctcatgatccctcttttatgcccattaatagtcttaaaccaaacataaaaatggaattagttaggtccctacctaggacattgacatgtactgtgcaaaggcttatgttttgcttcaaaatagtctatcaagtttgaatttgagcccttaacgcagtttatgggcttgttgaggcttgaaaaatagaaaactgagttgttaatttgctgatttgttctacaggcagaaagagagatttattgcaggcttatgtatttcatgggagtcagcactttacaggaaatggtgagtcatatgggagtcagcactttacaggaaatggtgagtcatagccttcatgtctctgtgattttttttttattcttgtactaatatctaataggcacatacaatgat

SEQ ID NO: 335837 - DNA, 865 bp, Cannabis indica
atctattgtctaagacaaagcaactattactgaccattttgatatgaaagaccttggtgaggcttcatatgtacttgggatacagatccttcgagatagaaccaaaggtattctttggttgtctcaaagaacttacattgatcggattttgaaaagattcaatatgcatacttgttcacctggaaaggaaccaatagtgaaaggtgataaattctcaaagggccaatgtccacaaaatgacaaagagagagatgaaataaaagtagttccttatacgtcagttgtgggtagcctgatgtacgctcaagtatgcacacaccctgatattgcttttgttattggcgtgttgggtagatacttgagtgatcctggacttagccattggaaagcggctaagaaggtcatgcagtatcttcagggtgttaaggatcatatgttgacctatcggcaacctgacattcttaatatagttgggtttagtgacgtcgattatgccggatgagtggatgataagaaatccacatcaagctacatttttatgattgctgaaggagctgtttcatggaaaagtgtcaaacagacactcacagcatcctcaacaatggaggcagagtatatggcgtgttatgaggctacttgtcaggcaatatggctgcaaaatttcatttcaccattgggtgttatggactctatctcgagaccgctgaaattgtattgtgataattccgcagcagtagctttctctagaaatgttagaagtacttcccgttctaaacacattgacataaagtactattttgttaaagagaaagttacagagtctcttatttccattgaataaacgcctagcactggcatgttagca

SEQ ID NO: 335838 - DNA, 1041 bp, Cannabis indica
atctctcttttcgctctgaactcagttagcaaagaagggttgtgaaaatgagtttatgtgccaatgctggttgatattaataggcaagtcacgaaaagaggtaatcatttcaaaggaacctcagacgcctcagtttccctccttaaaagcaaatatgggaaataaaaaataatcaagtgcagccatcagccgtggtgaggaaaaattggattttgaaatattaattatcagagcatttattagccgaaaactgaagggacgcccattcagcctcccatcgagtctcagacagtcgcacttgacacgtgtccccatccaaaggtagaagcagctcagatgaagtctacatgcaacttcggaagtcccgtacagacttgggggcaaatgttatcccaatttttgcactcttacgtggcatcgcataatggtgacacgtggaatccacttggagtatctgctcagagggtacagtccgagcaggatgcctcgctggcatgaccagagcaaagcgatcagcaatccgcgcagggtaaccaatacttaccgaatttagcttttgcattgtgagtcatcaacgaaatccctataacttggggatcagattacagagatatggcatacccacgatcccacgatcagtgtattctacatttatcccacgatcaatgtgtttcgcatatatcccatgattaatgtatactgtatggatcgtgcaatctttttgcttttatccattgtaacgagaggagaaacacttcctctccaatttcatagccctataaatagtgatgcatattcactgggctagaggtcgcaaacagtttagtcaagactattccctaaagatattatctaagaatacatatttagagatactgttgtaagagctataagaaaaggaacctttctccttgttcttaagtcaatacaagcaacgaggattaggctattaccgaactgctcggggctgaacctctataaaattcttgtgtctttatattactttattatatatcgatttctataaatcacttatcgctt

SEQ ID NO: 335839 - DNA, 880 bp, Cannabis indica
accactgcatattgcactcctcctttacttttgggttatgtccgatcaggtcaattccccaaatggaaaagggtcgcggactctgcatctgagtgaactcgttaggtggaactcgaggtatctttgaaaatctctggcattggtcacacttcttaacataaaattttgaatcttcaataatcgttggccagaagtaaccttgccttagaattttcttagataagctttgcccggcagcatgatttcgacagcatccgtcgtgcacctaagataggagtcgtgcagcctcttcttgagtaacacatctgagcaatggcattcataatcctcttctgtacataattccctctactatgatataccgtgcagctttccttctcatttttcgagcttcattccgattatctaggagtttcctagagtcgaggtaggctgctattggtgtcatcaagtttggggaagtatcgatcatttcgatttcttccgttccagtgatgctaggctctttgaggaattagataggaaccaagttcgccttgtcacttacattgctggttgccaatcgagctaatgtgtctgcagttgtgttttcttccgttagaatttctttgagactgtagcttttcaattgtgcaagcagatcatgtatttttctcaaatattctatcatcttttctccatgagcctcgtattctctggatacgtgatttatcaccagctgtgaatcactgcagatttcaatgtgttcggctttcatctcctgggctagctttagcctagcaattagagattcatactcggcttcgttattagatgctttaaatccaaagttgactgcagcgtgcaggtgtttccctcaaggcgtgacaagggcaattcc

SEQ ID NO: 335840 - DNA, 979 bp, Cannabis indica
gtaccatgaagacatggagaaacctaatccaagccccatgagttgaaattacacaaacctgcaacctggaagccaacatgggctcttacgggttcacccgacacccaaattgacattctcaactagagtttcagtttttgggtccatctgagttaaaaacgggtcaaaacctacattggtacatcaaatagacataccacagacatatttaaggcatcaaaattaaaattagagcaagttgatttttgagcacctgggtccccgggcccccaggcccccgagcacccagcacccaggttgacaagctgtcaatttggaaaccttcccattatcagatcagcaatccaactttttcatcttcttcatcttcattaaaaatggggaaatagggcctggggcgcgggttgacattttgtcaacctaggccattttaaatagagtttttcagtttttttcgcatcaaaaataatgaagattcaagcaaacttggagagaaaatcacaatcctgggaccctagaaatggggtcaagcacccaggttgacctagtgttgggcccaacgcccaggttgacaatcaacctgggatgctactttcaattgctctaatgccaaatccaatgcaaccattgaattcggaatggtcaataatagagtacgagacctcatcctcaagttcagaagccgtggaagtatctaaaatgaaatcctgggagctcgcgagtaagtacctagcgcccaggttgacaaaagacctagtgcgctgggttttgcttatccgaatttgacgctattttcaccatccatctggtcttccacaatgacaaagatttatgaagacagagaagtcaaattgaaaacttttcatttctcatttctagctcactcggaaatgaagagctttgagtctctcattcttggaatgcagcaacatctccgagaatcgatgactagctttgccagaacatataaatagactaa

SEQ ID NO: 335841 - DNA, 742 bp, Cannabis indica
aagcgcatttaggaggaaacaaggtaccccatcatcaagaaactggttttctgccttctgatggccttaagaaaattaaggccatatttccaagcacatccgatcaaggtactgaccaaccacccgctccggcaagtcctcaaaaaaccagaagcatctggaaggctcctcaaatgggcaatggagttaagtcagtttgacttacgctacgttccccgaatctccataaaaggccaagccttggccgactttattaccgaatgcaatgaagtcgaggcaaccaaaaatgcgccaacaccatcggtccccacatagagagtatttgtggacggagcctccaatgaaaattgatccggagcgggagtagcaatgatatccccgaccggactgcgactccaggcagccctacggttcgacttctcagcttcaaacaacgaggccgaatacgaggccttgatagcagggctgtggttagcaaaagccgtaggggcgcaaaagagtggaagtctacagtgactcccaggtggtcgtaaatcagatatcgggagtaccaaacacgcggtgagtgaatggccgcgtatgtaacaatagtccgggagctgctccacaagttcacggactacaaagtagaaagaatcccccgggaaaagaacgctcacgcggactgtctggctaagttagcttcagatagtgaaatcgaaggactgggggtagtaccagtggaacgcttggcagagccaag

SEQ ID NO: 335842 - DNA, 620 bp, Cannabis indica
aacagtctgtgtagaagtagaagttggaatagcatttggaaagacacctaaagacactgcatttttagaaattggtgctggtcatggctcaacatgaggaggttcttgtggacaaactaaggaaggacatgcatgattgttgttagtaataacatgtgcattaaaagtagtagagacatgagctatatcagaagagattggtccagtgtcagattgagatgaactgcttggagtgacctcattagttgggatataatcaggaaaatttacaaggggtttataactcaggtttgagaaatatgctgaaggacaactgatggagaagctttagagaagatagtggactacataagaggggaagggacgtgagaagtggtaaagcaataaggaaattagtttcatcaaacaaaatatccctagaaatgtaaatccttccatccttagccaagcatttgtagcctttattgttaactcaaacttttagatctccttgttttgatgattaacaaatatttgattattatttgttactaatgatttattgaatttgtagcaaatttaaaagagaaaataaatattttggtatttttaccaaacttttgaaagcaacactaaatgga

SEQ ID NO: 335843 - DNA, 1555 bp, Cannabis indica
ataacatatgcatgacattatactaatcttacctcaattctgaattcaggtttgctggtcaacctgagtggaacagcttctcagcgaattataggctcctaaatcatatcgataacaacacgcgtaagtgactggctaaatcacaaccgggacttaggttttaaaccaaaaacatatctacaacaacttaatatggcaacaccctcggttttacaggtacctgtaaaaccggttacccagttttttgcaggaaacccaaaaaatttcaaagttcaacaaaatcgattccaaacaaactcaaaccttccaaacctgcatattataccccaataaaccatttccaagcaacgaaacagttacccaagctcaaaatccaaaatcaccattaaagctccaactttgagttcttctaaaactcaaagttgggttaaacttactaacaacccttaattcatgctcaaaacaacatttctaaacatattctaaccttagaaaacaacataaaacaactacagcaagaacaacaacaactatctcaaattcatgcaaaaaatctctaacttaaaattcaagaaatccaataaggttgtacaagaagcttacctagagcttgagaccaccaaaaacctattgaatctagcttgaatttcagaaagaaaatcaaaccctagcttcctctaggaatttcgagagaaagaaggagagagttgaaagagagtctttttcatgtattttttccttattttttaaattaatgagtaaaagaaattagttttattaatttgctacagccaacattaataaagaaaatcaaattaataagcttaataagacccacataagacaaaactaaaacttaggcaaaatgaccattttgcccttccaccctaaaaatcataaataaccactaaggggtattttgggaaattctaaaatcctaactactcctgacattcccaatgtctaactttatcatcccgctataccaaaaaaaactaggtggtacaagaagcttacctagagcttgagaccaccaaaaacctgttgaatctagcttgaattttagaaagaaaacaaaaccctagcttgctctaggaatttcgagagagagagagaaggagagagttgaaagagagtctttttcatgaattttttaaataaatgagtaaagaaatttgttttattaatttgctacaaccaacattaatcaagaaaataaaattaataagcttaataaaacccacataagacaaaactcaaacttaggcaaaatgaccattttgcctttccaccctaaaaatcataaataaccacaaaggggtattttgggaaattctaaaatcctaactattcctgaaattcttaatgtctaactttatcgtcccgctatactaaaaaaactaggatgtgattctaatagccaaacaccgcgttccaatgttgctgggcacaaagcatgcaaaattatgaaatttctatatgtgacataaaaatgcattttcaattcaaataaatcatcaaaaataattaattcaatactaataaataattttca

SEQ ID NO: 335844 - DNA, 759 bp, Cannabis indica
atagaaacattgttctagtttttaaatttctacgtagttgcattatagttgtattaacattttgctaacactctaaaactagacatatcaatgattataaaccgtcaacggtataatatttttttatgatatttgcaggtatttcatatccacaatctaacacaaagctctttaagaaaagattataacatggtcagttttattaatatattcatttggttgttataaagttaatttacagagttctaacagttgtttctccacataatattattaaagtataattgattgttgatcagtgacaaaagaaatactgacaaatattttcataacgatgcccattcaaattttgtatttctagttccagttaagttgtatattagttgaataatagttgtgctactacaatattattattattatttaaaaaaaacaaggctcaaaatttgtaatacacgactcgtacagggaaaactcgattgtggtaagtaataataaaagttagagaaatgttagggcaaaactataaagaaactagaaagaaaccttcgtactctcatcagcttggttcttccctttcttaacttcagcgagagaaatattttcagcaacattaaccttcgatttgttcttaacagggcgacgatcactttttttataggtagagtaaagtctaaatcattatcttcaacaacaggccatttgctttattttattatcttttttttgaacagaaggaatctcacgaattatcactgg

SEQ ID NO: 335845 - DNA, 768 bp, Cannabis indica
gtcgggtactaggtcccagtcctagttctgttgcctaggtccctatcccgtttttgggttcaggtcccggttcttgtttaggtttgggtcccaatctaggttcgagtttgagtcctattctttgttcgggtataggtctcagtcttggtttttatctaggctcgggttcgagtttaggtccttgtcgtggtcctagtccaagtccggttccaggtccagttgtgattcagagttcgagtttgcgttcgagttcgggtcggtgttcgtgtcctggtccgagtttgggttcaagctgagatttcggtctaggtcgagatcatgctctgagtttgggttagggtcctcggtcttggtctagatgcgggtctgagtcccatgttccgatcccgatcagagtccgagttcagttccgggtcttagtcctgggtttcaatcccgatctgggtttgagttttggtctgggtctaagtctaggtttgggtctgatgggtatgggtttttcgaatcccagcctgggtccaagtctgagttcgggtcccaggttcaggtttgggtctgcgtctgggtctgaatcctcgtccaatgtttcgatcccagtctgggtctgggtcagtattcggtttcgggtttgggttcgtgtccaagtctaggtctgaatcccagtctgggtcaagggcttggtctgggttcgggatcgagttctggatttgggtttgggttcgagttcgtgtctcagtccttgtaacaccctaactaacttaggcgtat

SEQ ID NO: 335846 - DNA, 682 bp, Cannabis indica
gtgtctagtgtacttttctacgtgttatatagctattaatataactaagtatcaggtctcatataatttaatgtaattatttttaaaaaatactgttaaccaattataaaatagaagatgttagacaccactagtgtctaataataatactcctaaataaaagggtgataacagactaattgttcacatgtttcacgacacacgttttttcaatttttatactttttccatttaagttagtgggaattatatcatcattaaattgcttgtaacaaagatttctttatttattttgaggaaccaatttaatcattgttttcaattttgaaagtagtgacaacattaataatcattattagatattatgaatatggacaacacaacaatattaattgagattatgatgagagagtgaacatacatagaatcttgattttgatgagctagatagagtatcatttttcaaactaattaacactaaaacccagctacctttctaatcctttttcccttagcttctgaggcatctcttctttctttcttctccttctcggctgagacacctgtgccgctcttggttgggcttcgttttgggctttgcgtgctgctggcatgagttgggccagatggtgggtgtctcatagaggaaattacactctatacctttttatattgttctctt

SEQ ID NO: 335847 - DNA, 887 bp, Cannabis indica
aatttggttaattattaataaaagaggcatttttcaacttaccccgtgtctcataagtctagatttgggcctttgagattattgggctcagatctaagagctgagaagtgaacgagaagttgaagaatatttttttatatttattaactaaatttacctttaaataaaatttaatttaaatattctttttttttttgagtattatacttaaattatcctcatactctcacataatcaagacacaatttcaaatacaatagattgtgttctctagagatagatgtgtaagtttataagaaaattagagcaaaatattagttagagaaaaatagagacaatcgtgaaatagtaaaagtaaaattggtagattgattttaaagagaggtaaacataataaattataaaagaatggtaaaaatcaaaggcatcaatttaaaagaaatacgtagtgtaactacctcaaagttgggtttctccgatgaggttgtcgatgggtttggcttagtaaatatttaaacaaaagaaaataataatatttaaccttgaattaatagtaaagaaaaagaactttcatttctctttatggtttcttttggccaaagtttaaaaaaatatggttctttttttaaaaaaattatcttatgagaaaagtcaaaaacaaataaatgaataaataatatgggaaaaataatttagcataactagttacccagataaggtaactagataggagatattaataatggagatactgaaatagaattgatgcgcaagagtcaactcggtctaattgcaagcagttctgccacattaaccaaaaaatcacctaacacaccatatgaccaaaccagccaaaccacacctgcaacatcctgtatcactccacc

SEQ ID NO: 335848 - DNA, 708 bp, Cannabis indica
attaacacatccattcctcttgataatctctggaacgactactaattctgcatcctaatatgaatctttctagtgtactttgtcctcactcgtacgctttctgagatgactcaccagaagattttccatcttgagatcaccccaacttaagtatgcttaactccaagataagctcatggtgggttatcagaaagtaaatgcttctttgtcgtccctaattatatttcttgttttaattctttcgttaataaaattcaattgccatcactcccttcattaacttgaggaattcccatcttattgtcaacttgaatcttgttcatttctacttattttaacttgcatcaatttctcttgaactgacacaactttaaaatttcccaatcacttaaagttaactaccattataaagtgaattaatgtaacctatacggtagaggcaacattgctcataccaggtacccataactaaactagaaatacacatttcccgaattctcaactaataacaattaatcaaagatcattccgtgatcctgaaatttcttttctgtgtttggtagagatcttgatgatcttttcaacacacccagaaatatacatacctcaagtatattctctgttatatttgataacccattggtacaaattaccataccaagtgaatctctcgttgatgatgttaattcatcaacatctgagactctc

SEQ ID NO: 335849 - DNA, 747 bp, Cannabis indica
aaactcaaaatttaacagcttataggaaaatgaaatattgtaagtacctgggtcaacatttgggatgctctttaactaatctttaacagagacaatcttacgccaataccaacttgcttcaagtggggcgcattatgacgaagaaggtgatgaaatacatgcatgtatatgaataagaagaaaaatgttctctatgtaattttttattttgtgtgaaagtacctgatgagtattcttcatctttggtagatatatgatcaaattaaatttgcttaagttagagtcttacaattatcacatattgatttaacatattctacaagtgattatccactttgttttgccgacgaaattaagttcgacatctattatgatcacaaggtaattatatttgtttttcaaattttattattataaaatggttgatgttacaaagctagaaaatctctgattaataatcatagaaagttttgtagtaatttaaaacaattttttatgttagtccaactaaatgtggtcaatatacccatttaaacaatatatgataattagggtactatacaaaaatgagttttagtgacccacgcaaagcaacgctaaagatttttagtgactctttattgcgggtcactaatgtgggtgactaaaaaagtggtatagagtctctctttattgcgggtcactttatgagataataaaagatggcttttgagaagttacatcttttatttgattataagagataat

SEQ ID NO: 335850 - DNA, 504 bp, Cannabis indica
tgattaacttgttgacagatccaatgatttgattttaatcatagtccaattgtcaacagatcttataaataatttgtaacaggtaaattttgtatttctttcatcggtgtaaacttagaaacacgatagggcccatccaaatcaatttgacttgtgtgagcctatatatttgcttatggacttagatgcatagaagtccatttatttctagatagataaatagactaggttgttaaaataaaatatcacccatatgatagtttatttaagaccaattagtattgggcttatttaatgaataacaattatttaatgaaaggttaaattcctcttctttgggccttgtgtgagagttaggggaccattaaaagtgggtacgatatactgaacccagccctctctcacatgaatcaccccaattgtgcaggcccatttgccttatttaaataattgtattaggctcattatactagtttaacctaattaaaattgaattagcaacat

SEQ ID NO: 335851 - DNA, 1161 bp, Cannabis indica
tgtaggaattttttattcctaactaatccctacacacagcaaagtagtagtcaaaagcaaggttaatttagacctttacccagtcaaaccacctttttgactccctgccattaaatcaaacgacatcccctatttccaatttatacaagtcgtatgtatatcaatctgaaaccctaaagacacacatatatatattctcttttggcatttaaacacatacggcacaagcaaaataaaccctagcagatctccttctttgttcttctctctgaagaatacagagacatcaaccagaaaaataaacccagaaaatcaaccccctacccagatcaaacacccccaaaacttaatcccttaaacccgagcaccttcttcgttgttcttcactgaagaacacgaagaacaccacagataatacccagaaaaatagcttccccaaactgattttaacccagaatttataaacacaaacaacaaagatgaagcagaaaagtaaagagaagaaagatagcaccggatttatagaggttccccaatgaaatctgggtacgtcctcttgagctcgcctcttccactatagatcttcaatgatcaagagattacacagcaaggattccaactcacagcattttgagaggtaatccgaacatatatgtatatatacagtgtttgatctttctctattttctctctctctctgtctctcaaaaatcacaactaacagcagtgtgtttttcttctttgcaacatgaacaacatcatcccgagttgtggatctccaaacccaaatctagggcttcaaggcaaacccgctgtaagcctcaaccacgaactcccctgttcatgttctgtgtttttctggagaagaaatttgaatctgtgtatctttttgctctctgttgtatctgatctgagttttaatttgtatattctgatcttgtattgtgttgttgtatttctgccttttatatatgttgtagtagtggaaaaaacagagaaaggagttggttacaaagtttaataaactttgtaacaaacttgctgatctgtcctaggtatttagaggccaaaggccacctaggatttattttactgtcttgtaatctctttgtaaaaaatctggttttacagtgtatagctaatatggggtttacttcaaca

SEQ ID NO: 335852 - DNA, 649 bp, Cannabis indica
agtttgaagaaaagtcagaactcaagaagtcaaaaattttctcaagttagggcaaaaaagttcatgaagcttagaataagcaagatgaaagatagacgttacgcagttcataaacaagtgttatgactgtaaaatcgcacgaatacatgataaagaaggatcgtagagatttctgggcctagggtttcctaaacatttttctacagcaaagtagaggatgcatttgacatataaacatgcaaagataagcataaaggaaaccagagacttactcgagggtcagatgtctgggtgcgagcaacgtcaatccaacaagcagtttgtatgaaggcgcttcggcaactttgaagtcaagaatctctcttttcgctctgaagcttacttagcaaagaaaggtgatgaaaatgagtttatgtgccaatgttgtttggtatttataggcaagtcacgaaaagaggtaatcgtctcaaaggaacctcagacgcctcagttttcctccttaaaagcgaatatgggaaataaaaaataatcaagtgcagccgtcagccgtggagagagaaaatcgaatttcgaaatattaagtgtcagagaatttattagctgaaaccgaagggacgccagtcagcctcacatcgagtctcggatggtc

SEQ ID NO: 335853 - DNA, 912 bp, Cannabis indica
cttacagctttttgatcatgtatataacagttaggatcttggacaatttgctagtgaaattcctcatcacgtcctaagataagcatttgatgcccctataatcttatatgctctattttaaaaattatattaatatttcaattcattaacataaatatatataacatagttaattaaaagatttattacatgaagagtgattaaattcttacatttccaatatagcattaatttatgggaaactttgtggccatgtatagggtctaaatagataattttccctggcgcaacaatctctagcatcgaacgcgcataaaaattatattgggatatacgtaagatagtaaaaaataatttcatgttataatatagaaaataattctaaattatctcttaaatagtgtttgcctgatattccatggaataaagaacatttggtgttagttactcatcaatgataaccaatgagccaatccttggatgcattctcaaaagactcttccttctctaaatcgttgataccatcactgcgagaagctctaggtcataaaacttgaaaattcgtctcaaatcatttaagctctcccagatgtgtctgcattaaattattagatattagtgttttataataatttcagtagaatttgatatataaggttaattaaattaaagaagagtatacatcattccaaaagcattccttaaggttgtcgatgaagtcacacaacgccacctattgtaaatcttatctagatatcgtgatctgggtacgaggtgctatgaatctacgagtacccgaagtgggatcatctcatgtttatccttgacttttaaaagttctttaaccatttatttaagtgacttggagattggtgccatgatctctagtgtgaataatagatctgcttgatc

SEQ ID NO: 335854 - DNA, 1694 bp, Cannabis indica
gtgttagtctacaagggtggtgctctaaatcccgtaggctataccgacttagatttccaagcttatctttatgacaagaagtctacaaatgggatggtattcactcttaggggtggagtagttgtttggagaagtgtcaagcaatctgcaatatttgactctaccatggaggctgaatatatagctatcgttgaagttgctaaggaactggtttggctaagaaagttcttcatagaacttggtgttgttctaagaatggaaaacaactagtgttactttgtgacaacactggtgttatagccaacagtaaagagcctcgaagccacgagaggagtaaacacaatggaggaaataccacatcacgagacaatatcttgcaagaggtgacgtgtaggtggaaaaggatgatactaaagacaacctagtctacccattcaccaagactttgacagagactgcacttgaaaaccacagagagaatctaggattaattgacattaactgattattttatgttagtgcaagtgcgagttttttgggttttgtgctctaattaaaactttatttaaatgtaatcttgaaaattcatttatcaataaagaaaaagatttattttattacatgtttaatgtattacttggttaacatgtttatttcatgatcatttgtttgatttatgaattcatctaaatccttatcacatttttattcatgattattgtgttgtctacacagtgtaaagtaatcaagattatgtgattaaataaagtcccacgatttatcagtacaaaagatttctactgatatgataatcaacaatatagtttacttacaccttagataagacctttctagggcattggcaaagtagcttgggttggatgtattattatacatcagacttgaccgatattgaacttgaataagatatgataaacttactgtaatatctaagtcaatatcacttagttgatcttagatcagtgatctcaatcctgagatggttaggttatagttaattatattatttgtgttctttgatttgttcattaaagtggaccaatttgatcttcccaatacttacagattaagaatatggtagtttatttgagtgggagaaccaatcatagatacagaatcaatagcttctataaatgcatagaagtgaaatgatgatttccttcgagcttagctttatagagataaatggtggagaactcatttttgtaattatattactttactaaaatatcatttataggtagctaagtattttaagaataaaatacattgaagggtacaaagtaaatttgtccctactcgatgtagatcatctatggaggattgttaattatttcaattataacaatagataattaatagtgtatctatatctcagaacatatcgagtgcaattccaaatctatagtagagttgggaggatataataagttagagaatttacttggtaaattctagaactacttattgaaagcttgatttataggcccatggtcccaacactagttgagatgatactacatgtagactcagataattagtattaattaatcaattataattctaaattagactatgtcttcattataaatttttactaagatatggcttaattgtgatgaaaagagattttagggtttatttgttaagtaagagactttgtaaggtctaat

SEQ ID NO: 335855 - DNA, 600 bp, Cannabis indica
tatatataaaatataaaaaaaaacattttgcattaatttaataaataaattgttgtcacttgagttgacaacatctaatctaatagaatagttatttttaattgtaattgaatatttaattacaattaaattgaaatgaatgttaaaaattgaattctaattaaattagattatttatataaagtattaaatttaataaataaaaaaaagttcatatttaatttttacatttttttatatgtttaagttaatattaaaattaataagtgtgtaattgtatatacagctaaaatatgatccaattgaattagtaatatttgaatagattggattatattttaagatttaaagacgtgtttggtacgccgtattgtattgtattgtattatgttggattgtgttgtattgtattgtattgtattgtattatattggattgtgttgtattgtattatattagtattatttaatacaacacttatgctcaggccgaccctaggcataggcgggctaggcccgtacctagggcccgcactttctggcggcccaaaataaaaaaataaaaaaaaaattattaggcttttatttaagtaaaatttaa

SEQ ID NO: 335856 - DNA, 508 bp, Cannabis indica
tatttatacaaaaatatgactaatagaatgggaaaataaatcaatgcaataaaagaaaatataaccaagcattaatggtgataattaattttgtgatttggacatccataaataatatttcataacactcacccttggatgtccataacaactgtctcattaaaaatcttgatgaaaaatttggtcaaaggaaaaagagtacagtataaactaactttccttcatttaggcattctagagatcttttaatcgacgaactctaatcttgtgaaccatcttctcaaatattgatgttggtaatgactttgtgaataagcctgcaaggttgacacttgattgaatttgttgaacaccaatatgcattctcttgaaatgtataaagaagaatttggtaaaatatattttaattctatctccttcaatgtaccctccttttagttgagcggtgcaagtaatatttatcttcatagagtactacttgtgttgatacttctttattgagtgcaat

SEQ ID NO: 335857 - DNA, 1315 bp, Cannabis indica
aaatcaattattttcataaaaattttgcaaacatcaattaatcaccaataaacacatagatcaacatgaatcacatccaaataacacatacgtcgttttaaatccatattacttgaaagtaaatcaattacagtggctctaaggccagttgttggaatatactttactaggatctagatttactaacaagtatgtttttaacatcctaatattaatttctaaaacgattaaactaaacacataaaaggtatgagaaatcttacagtggttgcaacagaattaaatgactcctcccactcagatctctaaaacccgtataccctccgtaacaaaagatcaccaagatctgagcccgattctccttcttgttgattggattcttcacagtcttacatactatgattgaggaccaacttgttatgtgtgggcatgtactcaatcactaatggctgaatttattttgtgaagaatggctttggtatttcaaaaattcaagaggaagaggaagaaagaataggtctcaccagaaagctaggtttttagctttggaagcattagttggatgatgagaccttagctatcctttatactaatttccatagggttaggattgatttatttagaaaaaaaaaattgataaaaaaatggagcataaaatccttaagtggccggccatgatatgggccccacacaagtttgatttttgccatttttctcaactattttatctattcttcacaaataccacttttgcaacttcaaccatataaatgccaaaactatttatttaataattaaaataattatcaaataaaattgtcatttataatatttactaattagactccacaaagtctcttaattaataaattaaccttaaaataccaattcttcacaattaagacataacatagtgaaaaattcataaactaaatataaactaattttagaattaaaatcaattaattgagtgttacaagcagtttgtctcaactagtatggggaccatgggcctatataaccgagcttccaataagaagatctagaatttaccaagtaaattcactaacttactaatttctcgttgatccacaatagaacttggaattgcattctcagttacatagaacgctctatattttccactacatttcatagggacaaaattaccattacaccgtttcaatgtattttatcgctctatcatttatctctatttatccaagctcaaaagaatcattgtttcacttctatgtccggatagaagctatagattctatatctatgattagcgctcccactcaactgcactacc

SEQ ID NO: 335858 - DNA, 686 bp, Cannabis indica
gaagaaaactatattaaagaaaacaaaccgaagtcgtcgagtaatggagcctccttcagcaaacaacgatatctcacacaaaacaaatttaacggaacaaaataatcacaagatctcactaagagtttagtgacatgctctaataccaattgaaattctgtatttaaaattactaatttattatttaattaatcaattaattaaatgcaaaataataaatatgatactaaaacagtttattctataactacaaaatacaattctgtaactatagaataaaaccagaaaacaaacagtgtaaaaaaataaaaacacacaagatttttgtatgtggtatcaagaatctttgtagattgttactagtccacggggtcatgcccagagataagattcattagatagatctcaaaaatacaaagtaattgacttatgcgtaaatagactctctcttattgtatgccccaagtttgatgtattccaccttctaatcaaatctttttgaaactttaagtgctcccttcgatctccttgaagagtgtttgtttcctctcaaggcaagagttgaaaagcaatctcctgaaagcttgtagaaccttctcctgaaggtagcactgttgttcttcttcttttacagacttgaatacagactcaagacaatacaaaatatatataaatagagtaagaga

SEQ ID NO: 335859 - DNA, 451 bp, Cannabis indica
cataacactcttcttttattttatatttttttttaatatatttttgagggccccaaaatttaattcgtcttggtcccatatatttttagggctggctttgcttatgcttgatattgacttgtattaattatttgtgtaaagttataatatattttcaatacactcgactccaacaccaacgtacgggtccgggtctggttctggttcgtgggtccgaggttcggggtcctaaggtttgggtcgtcgggtccgggtccaaggtcccggatcgttgggtctaggtccctagtctgggccctaggtcctaggtctcgtgttcgaattcgagttcgggttcgggtcctggtttggatttaggtctcgggtcggggtcggggtccgacaatcggttcgaggttcggggctcgagtctgggtccgggtctggatcttaggtccgggtctgggtcgtg

SEQ ID NO: 335860 - DNA, 555 bp, Cannabis indica
tttggtgtgttctctccatttatttctgcaattactattgtgtttttgctattttcggtttggtttttctggtttattgtgaatcgggttgggctgtaattttctgggtattgtgtttgttgttcttcgtgttcttctgtgaagaacaacgaagaaggtggctctgttgaagagggataattttctggggatagattcgaactagggtgcaatcgggttgggtttattctctagctggggttgtttttctgggttatttctggtttgttgtggctggtgttcttcatgttcttcatagaagaacattgaagaagaaggaggattttatttctctgctagggttttgttagtggaggccgtgtataggtttgaatgataaaagagtatatatatgtgtgatacatttagggttgctgtgatatgttaaaaacgacctgtagtattaatttaaaattaaaaagggtctgtcgtttgggttggttccaggtcagagggtcaaaagaaagctttgacttgtttttccttttgctgtggtgtagggcattaaatcctaca

SEQ ID NO: 335861 - DNA, 602 bp, Cannabis indica
aattgaattcattaaaatagaaataattaagtatctacaataaaatcaacttaattataaattctaattaaatatctaagaaaaatattgttagtctaaaattaattcataaattaattttcaacttaaatatatttttcttatttaattaaatttcttgaaatagaaacaaataattaagtatcttgattaaaatcaacttacttattaattctaactcgaccaccgaaaataactaatatgtgacctgaactcaaaacccgttacagtcatttttgggctcaacccgacccgactatacggattttcagttagacgggttttttggcatcggttcgggttgggtcttcgggtttttcgggttggcggatctaagtatgcagccctactaacaagtatgttgattaacatcttaaatatgaatatctctaaaacaatgaaattaaacacgttagagtttagataatcttacattgattgcagcagaatataatgactccttccgatcagatctctaacccttgttcctttccgtcgcagagtattatcaagatctcagcctggatctctttctctccatcgggtttggttaccaccgtctt

SEQ ID NO: 335862 - DNA, 613 bp, Cannabis indica
taaaaaattagactaaaaatttttggctaattagtaattttttctcccgaactttgacatataccaaatcatgcccctgaacttttttggtcgttaaaaattcttcctaaactattagattgttagatttaaggacttttgtctaatttcattcaattttactgtttcagtgattgtttatgtactaaatcatgctccccggacattgatatctaccaaatcatgtccctcaaattttgatatgtactaaatcatgtctcctgaactttcatccatgttagaatttttttactaaaattagataaaattccctaaatctaacaatcttaataattcagggggaatttttaacggccaaaaaagttcaaggggcatgatttaatacatgtcaggggaaaaaagctaattagccaaaaaaaattctcgatgccgaaacattaagagatgcatgggtacactttttgttggggatatattgtagaagcagtctataataagtaatcatagaatgggttattttgtagcaaaactccttatgttttaattttttacaattaaccccattgtctttttttttgtggcaaaactcctttatatttacttttctttgcaa

SEQ ID NO: 335863 - DNA, 620 bp, Cannabis indica
ccatcgataaataacatggcaataccctaaatatctcaaaaatgggaaaaactagggttccaaaaactgccccaaccggcagaccggttcccaaccggaagtccgatactgggtcaccaaccagtcgaccggttgctataggtcccccagaaccggaatcccggttctgtgctgggaacccgaaaaaatgcccccatgacctcaaaatcaagccaaactctaccaaactttctgctatacctgtacaatgcatatgcaacataattcaaccagaaaatcacagagaaaaccaatgaatctcaacttgccattaaagacctaaacttaagtttcaaaactcaagcttgctcaaatccatcatcaaagctcaaaactaacatccagaactcaaaatcaactcaaaataaaattagaattaaagccctaagcatacctaaacctaacagccactattactcaaaatcacaagttcaaactaagcaaaaagcttaaaaacatgaaaccaatggtctagggttatctttgattgctcctccttgaatccttagctaaatcaaagagaattaggaaggaaaagttggtccttgccctagttttgcctcagcggaaagagagagaga

SEQ ID NO: 335864 - DNA, 736 bp, Cannabis indica
cataaagcccatgttccatagatgcaacacaaatttgaatgtcatttcgagaaatggtagaaccagaactcgaaaaatctaatttgtattgttgcaattgtaagcatgaaacagaaatcaagtttctactgaaatttggaatgaataagacattgtctaattccaaaattctgttttgaaacttgagtttggcttttcctctagctctaaccgataccattttgccattaccaactttaagtttcaactctccggatttcaaataattccagttttcaagcaattgcaatgaacaactgacatggtttgtagatccagaatcaagaatccagatggatttatcattctctaaaacacatgattcaaaaactaaagcatcattgcttaaccgtttttggattgttcttattgctggttcaatctgttgtgaaggataatctgaggaagtggaatcactttctctattctcctcaactgagcttgaagtagtaggattgtcggagtaatgaactctctgcccctcagataaaataattcccagcttagctgctttctggaacttcatgttcatcatgagcaagtgtgaagtgttactctgaccaggagtcatattcacactttaaagttcattcttagagacatattctagatgaggattggggtgtgggttgtacattctgacactaaaaaaatcaataaatagaaataaattattggttcaacaaattcatacaca

SEQ ID NO: 335865 - DNA, 590 bp, Cannabis indica
aaaaccactgcggctaattctaggtcatgtgtcaggtatctctgtttgtattcttttaattgccttgaagcgtaagcaattaccttcccttattgcatttgaacacaacccaatccttgtttggatgcatcacaatataccgcaaattgtccctcttctgttggtaaactgaggattggtgccgaaataagtctattcttcaactcttggaagctttgctcacacttgtctgaccccgaaaattttagattcttcctaattaattttgttaagggtgtggctatttttcagaacccctcaacaaaccttctataatagcctgctaaacccaaacagcttcgaacctctgaggcggtctttggtctaggccatttgttcactgcagcatccttggcagggtctacttttattcccccgttagtgacaatgtggcccaaaactgcaacctcggacaaccaaaactcacattttttgtacttggcatacaattgatgttctctcagtcgctgcaaggtcaagcgtaggtgctccccatgttcctcctctgtcttagaataaatcaatatattatctatggatacaatgaaaaa

SEQ ID NO: 335866 - DNA, 1512 bp, Cannabis indica
tcctacctcgtttttgaccattttgaattcaatggtcgcatcaaatttggtatttgagcaattaaaggcagtgtcctaggttgattgtcaacctgggcgttgggcccagccctaagtcaacctgggcataaggccctatttccaagtattcgagattgtggttttctctctgagtttgcttgaatctttgttatttctgatgacagaaaaaatgcccagaatactttttgttgaacttgatcgtattgtcaacctgggtgcaaggcccagccccaattgtcaacctgggcgttgggtcccccttttcccatttagaaattttgtttggtccccaaaaatagttaaatttcaatattttctaaaaatgaagaagatgctcaaaagaattcttgaaaaacttcattttaaatagttcaggttgacaaaatgttaacattggcccagggctagccccaggtgtcaacctgggcgctaggccatattttttgtgcccaagaactgttattttttctttaaaaggacctatttcccaatttttgatgaagataaaaaagttgaatctctgatttgatacttggaaggcgcctagattgacagattgtcaacctaggcagtgggtgttcggggccccaagtgctcaaaaataaacttggtctgattcttattttgacgccttaaatatgtttgtggtatgtctagttgatgtccaatgcaaggtttgaccattttgcactaagacagtcccaaaaactaaaatcctagttgaggatgtcaacttgggcgccgggtgaaatcctaggttcccaagttagcttccgagttacaagtttaagtaattttagctctcagggctatgattaggttgctccatgtcttcatgatacaaaatactgaaagatagtgggttggactcaagttattgaagtccgaacttccatcccgaagatcttgaagtcaacctgggcgtagggctagggttcctcccaagtcgactgctatgactcgggtctactcaactctataacatcatctttcatgtcacgtgtcaaacattgatgtccatgtcaccggaaaaagttcccgggttaacaggttggtagcctattattttatggttattttaatcacttggagtcagttttagaataacgtccatgaatgtgcatgaatttattgagcacgtttccagctttctttcccaacatttttatcctattaaacacctattaaagtgctggtaacaactatgaggtgaagggaatttgactttgtaaagcgatcctcaaatactaaagtgctcatttcataacaattaattttctatcaacaagcatttgcaaaaaaaaataagacttgatagtttccaaagctatttccatgagagttctcttagtgcttagagatagggacaaataagctttttgacaaaaattatataccttgttcaagtcatgatatctccactaatctacactcaagattgtgagtgagtgtttatatatattcttcttt

SEQ ID NO: 335867 - DNA, 797 bp, Cannabis indica
gttgaccttaatttcaagtctgtcatgactgtaattaaggatattcaagaaaaagttaatgtcattcatcgtcggccttctgatgaggtatttattttcacaagtcttgtttcatatttttttctcctattattattagttgttttcctgttttatttcagttgcaatactgtttttgaaccaggttaagtcatctgatgaatttgtcacccaagatgatgatgatgatgatgaggatgatgacaagggattacctaatctagagaatattgatactaattccgatgatggtgatgagttgggtaaagatggtggtgatgcttctggagttgaatatgttgtttgtgatgttcctactgatgatgtgattcaaattgaggttgttgcaagcagtgaagagagggctaaggatgttgaaaatgttaaggccaaagagtcttgtgtaaagggagatgattttttcaatggtttaagtcagcttaaaattgatgatgagcaagttttgttggctggtttagaggatgttgttaaaatcaatgtaagtgtagtttatattctttgttaggttgtgttagcatgtctgtttttttttagttgcttgacagttttatgttagttttgcaacttttactttttgttattttcaaatttatatttcaggttccagattccaatccaaatgttgttgttggaaaggcagatgtcattgcttctagtgaagaagttgatgacactgttacttatactcctcttttggataagagaaagcgtgccccagcattgaaatcgccttttgt

SEQ ID NO: 335868 - DNA, 1131 bp, Cannabis indica
tccaacaattcaactgagaggtaagattgacccaagccctatcttggcaaaaaaatggtttttacaaagatattgaattttaagcaaaaatttataattttactgttacacagaatatttttacaaaaatactatatttttataaaacaaccgtaaaataacaaaataaaacaattaaaacaacagtggaataactaaaaaacaaatgtggaacaacagtgaaaacttaacacagtataaagtataaaaaatacacaatatttttagaaaaaaaaaaacacaatatctttgacaaattctgccccacaatgaaaaagaaaaaaagttaaaaatttcaatatgtggtataaaaactacaaaaaaaaaaagagtttttcttttaacacaattttttttttttttgtatagatagtgataaaaatctataatatggtatttgaaaaataattacacatcattctaaataaatctaaaatataacatttttgaaaataatttagtgcatgtttggcatcataactaaaaaactattttttatttttaaaaatagaaaattgttttttgaaaacaatttggcttgtttggccttgttttttgaaaacagttttcagaaaataatgttacaaaaaacaagaatttttaaaacaacaaaatgttgtttttagttttaaaaaccttaaaaaaccctaaccaaacatgatttgtttttaaaaacttcaaaaactattttttgttctcatttctaaaaataattttttgaaacaataccaaacatgctcttaggttttcttttgttcttctttacacagaaaataatcgtgtttatttaataaataatggcaaaattttaaaatatagtaattttgaaaataagttagaaattttttttatgataattacataaagcactatttttgtaaatattttatatctttacgttcaaagattttttttttaatttttacagtattttataaaaataatacaaaaataacaagaaaatttcataaaagtaacttcaaaacaacaaaacaaaataacatataaataacaaaaaatcaacaagcgtacaacatacaaatacatcaaaagaccgtatttttgtaaataaaattataaaaattataaaaa

SEQ ID NO: 335869 - DNA, 732 bp, Cannabis indica
atagatttaatgggtccttttccatcttcgtttaggaatttgtacattttattggttgtggattatgtttcgaaatgggttgaagctactgcaactccagctaatgttggtaaaacagtcttgtctttctttcagaaatacatattcactcgttttggaactccccgagcaatcattagtgatgaagggagtcaattttacaataaacagtttgaagttctgctatccagatatggtgttcgccataggactgttctaccttaccacccacagagtaatggccaagctaaaatttttaaccgggagatcaagatgatatttgagaaaacaatgcagagatcaaggaaagattggtcatgaaagttagatgatgcactgtgggtgtacagaacagcttttaaaacacctatcggtatgtcaccgtataggttggtgtacggaaaagcctgtcatctgccggtagaattagagcataaggcctattgagctatgaagaccttaaacatggagttagcagcagcatgagagaaaagattgctgcaattgaatgagctggaagaatttagaaatgaggcctatgaaaaaggaaaaaatctacaaggaaagaaccaagaagtggcacgaccggaacttagtcatgaaagagtttcaacccaggcagaaagtcctactttttaactctaggttgaaactatttcctggtaagctgaagtcaagatggtcaggaccatt

SEQ ID NO: 335870 - DNA, 974 bp, Cannabis indica
aacataaaatgttatttctgatctttattaataagtaaatctgactatattgaaatgggttttatttagggcacaaaacccaacagacacttatcaagcgcgaccgttcgagactcgatgtgaggctgattgggcatcccttcagttttcggctaataaatgctctaacaattaatattttgaaatccgattttctctctccatggctgacggctgcacttgatttattttttatttcccatatttgcttttaaggagggaatttgagaagtctgaggttcctttgaaatgattacctcttttcatgacttgcctataaatatcaaccagcattggcacatcaactcatttttaccatccatcttcgctaagtgagttcatagcgaaaaagagaggatcttggctttaagtttgctgaagtgccttcatcagagatacttgttggattgacgttgttcgaaccctgacatctgacttttgagtaagtttttgattttctttatgcttatttttgcatgtttacatttctaatgcacctttgactttgctgtagaaaatatctaggaaaccctaggtcctgaaacttctgcgattcttctatgtcatggcttcatgcgattttacagtcataatgcttgttttttgaactgcataatgtctgtctttcatcttgcttattctaagctccatgaacctgtttgccctaactcgagaaaatttcaaacttcttgagttctaacttctctttgaacattcttgttcttgaatctgttgagtactcctggtcggcatatttgcttgtttatcattcgatattccgacaaaacactcatcttgtgtgttgtctttttgtagatgaactcaggtgagttttgggagaacggacatcgggctgaccaggacttgcttcaacttttgcacgaggatcatcctcatcttcgctcaagcactccttcctctagtgaaggacattc

SEQ ID NO: 335871 - DNA, 578 bp, Cannabis indica
gcaatgttatgcactagacctgacatctgttatgcagtaggaattgtgagcaggtatcagacaaatcaaagacaggaacattggaatgctgttaagcatattctgaagtacttgaaaagtataaggcaattcatgttagtcgacaagggtggtgctttgaatcccgtaggctatacatattcaaatttttaagcatgtcttgatgacaggaaatctacatccaggatggtgtttacccttgggggtggagcagtggtttggagaagtgctaaacaaactgcaatttcagactctaccatggaggcagtatacatagccgctgcggaggctgctaaggaacttgtttggcttagaaagttcttcacaggactcggtgttgttcatggaatggaaaaaccactagttttgctttgtgataacactagagccatatccaaaagtaaagagcctcgaagcaacaagagaagcaaacacatagaaaggaaatatcacatcattagagagtatgtagcaagaggggatgtactggtggagaaagtggacactgaggacaacctagctaatccattcaccaaagt

SEQ ID NO: 335872 - DNA, 609 bp, Cannabis indica
ttttgctgcagtctttggtgccttagtcttgagttggggacaatcccttttataatgccttggcatgccgcactggaaacacccctgccctatacactcccccaggtggtgccttttacaactagggcactctgggtaagtgtatcggatcttaaaactaccttgccgatagcctcaaccctggttccctcgaaacctcttgttctgacttgagccactggatgcagtacgtgcctttcttttttgatcagtggccgagccactaccttccctactaaagcccgatgtaggaaaggtaggagccccgccaacaaccggagtctctcaagattctaaggtgcactttactgcaccctcagctcgcaatgccttatccaccatatcagcataggttgtattgtcgtcggtagtaatcattaggtcatatctgatttttgcatttaacccgtccaggtacttctctttcttactgaaatcggttggcacaattctcaaggccaaccttgccaagcgatcaaactgagtcgtgtattcagtaacactcatgttcatgttttcattttgagccagttgagtaaattcttttcttttggcacttctgactgcctc

SEQ ID NO: 335873 - DNA, 692 bp, Cannabis indica
cctctcgaattctcagctgatgatagcctgagcgaagatcgatcttagaaaagaccgtcttccccttcagctgatcaaacagatcatcaattcgaggtaaaggatacttgttcttaatagtaagcttgttcaactcccgataatcaatacacattcgcagggttccgtcttttttcttcacaaacaaaaccggagcaccccaaggtgagtagctcggtctgatgaatgccagattcagtaactcttgcaattgtatcttcaattccttcaactcagctggagccattcggtacggtgccttagatactagatccactctcggagcaagttcagtaacaaattcaatttctcggccaggtggcaatcccgacaaatcttctggaaacacatcaagaaactcgcataccaatctcatattttcaagccctgatgtcgcaggttggctagtgtccactgcagtaactatgaaccctagacaacctctacccatcaggtctttagcattcaacagtgatatttttcggtatgcgtgctccttgaacttcacccacgaacaccgcttagttaccattgtcaggctcaaacaccaccatcttccatttacagtcaatcatcgatccatacttagacagaaaatccattcccaggattatgtcaaaaatcagaaaattgcaattcaattaaattggcgg

SEQ ID NO: 335874 - DNA, 976 bp, Cannabis indica
gtgttgacaaatgtttctttatgcctttaaaagcttcctcgcattcttctttccattcaaatctcttattgcctcgcaaaacattaaaacatgggaagcatttatctattgacttcgagatgaatctgtttagtgctgtcattttccctgtcaaagcttgaacttcttttggctttgtgggtgaggacatctctattaatggctttattttttctgggttgggattaattcctctgacatttactatgaagcccggaaattttcctgaggaaactccaaaggaacatttctttggattaagcttcatattatactttctaagtatatcaaaatattcctggagatcctttatgtgatctatactttttattgagtttaccagcatatcatcgacgtagactttcatatttcgcccgatctggttctcaaacatgccattcaccaattgtcggtacgtcgctctagcattttttaattcaaacgacatgactttatagcagtaaagtcctatatttattacaaagattgtatgctcttgatcaaggacatgcatctttatcttgttatatccagaatatgcatccataaaagtcattagctcgtgtcctactgtcgcatccactaactggtcgatcctgggtagtgggaaataatctttaagacacactttattcaagtctaaaaattctatacaagtcctccaagtgtcgtttagttttgggacaagaactaggtttgagatccatgagggatagaaggcctcgtgtatgaagtcattagtcaacagtttatcaacctcttctttaagtgccccttgtctctcggagtttaaaggtcgttgtttttgtctttttgttggatagctggggtcaatgtttaaatgatgacaaattacactagggtttatccctatcatatctgagtggctccaagaaaattgatcctggtttgcctttaaaaaatcaattaattgcta

SEQ ID NO: 335875 - DNA, 476 bp, Cannabis indica
ttataatacttggcattgaacaggcgcccatacacctaaccataaccctaactgagtcaggagcgttcttgacaaagtatgactcatcttgttttggtagcccatcatgaaaaaactccacaactaagtgtccttgacctagagtgatttcattgggagagttttcccatgaagcatgcaagttagagcaaagcacattggaaattcttggattggcctctagggccaatcatcaccccaggaagcagctagattgatgcactcatgtataagagccatcattctgtgactataaaggcctaatagaggcttgaagtgcggatgttactagggtaatgtataaaagaatgtcaggaagagtagtggtgtcactaaggtaaagaagattacttaaattacttaagctgatacggtaatgatggagagtacttcataattgactggatagtcaatatggtgttggaattattttacca

SEQ ID NO: 335876 - DNA, 994 bp, Cannabis indica
tgttgaataaaatggattacattgaaattgaattttatttagggcataaaacccaacaaccctgttggaggggtgactcatagtactctcttggttccttgggcactcttcaggtccatagaccaccctccccctctagttccttggggtaggtacctcctgaggatacgtttgaggtatctgttgattgttggcatcaatacccatcctttgagtgttttggttgaagtagcttcgtattaagtcggcagcctcttgggtgcgacgatcttggtcgtcttggcacctcctcatctcacgagcatgatcttccagcccagattggaattctctcctttgattatcaagactttcagtcaaggccactcgagcttgattttgctcttggtgcatagtttgaaactggccttgcatctggcctatcgcgtctcgcagctgatccatctcggggtcaattccctcgatgttgacatggggttcattccgcggcgtaaagatgccagggccgccgccaatctgactgttagtaggtgggacaaaatttctagtattacctcttccggtggcgccatcagtagcgctgcctcctgcggcagtggcattggtggtacgcccagtagttgtctgtctagtgactgtagtttgaccagttgctccatggccagcggtttgagcagtggtggtagtgccgccgttccccgaacgtgggggtcgttctccattatttccggcgaggttgctcgctgatggaacttggtgggcactttccatctcttcgtcaggtcgctcttgagatctttgggttaacaccattttttcctgcgaaaaacttaaagattttggcctaagctctcaatgaaagcaccaaaatattgactggatttttagccaaccgacgcggagtcgtaataaatgagatttaaaccaaaattacaataataaatgcagttaataacactgaaattcacaataaatgtaaataaaagacaccgga

SEQ ID NO: 335877 - DNA, 942 bp, Cannabis indica
ttgctattttagtttttcttccaaaattttcctaatgtatacatattttgtgggattatttggatctaaaataacatcttccaactcttcaataggtttgagctggttattttcatcttggattctaggatccagatctttttctttcctctcgccttcttctgttaggattgccatcaattgatgattggctctcctgttctaaagttctattagataacattcctgagacaataatcaatcacctcagactactcttactcctaactgtgttggaaactttaaggacaagtgcttgatcgagcttattacccccagtccaattagtgataggcgacgcatcaatacattgtatactgatggaagatcaacaactaagaattcctgcataagcgtcgttgttaagggtggctctcctacagtcaatggaagttcaatgatgtcttggctggcaacactatcacccgtaaatccacacaagctcaccatacaaggtttcaacttcgcatcctctagtcccatcttttttagtgcgcccttgtagagaatattgactgaactcccattgtctactaacactctcttcacccttttattggcaagctggactgttacaacgaggggatcaacaagcgggtattgtacatgtttgtatcttcctccgagaagataattagaggtttattagatttttccttttttagtggctttggagcaaatgccgattgcccattctttattttactgatataccttttttgggcattattactatttccagcgaggtgcgactctcccgaaatgaccagtatatcctcgccctcaaccggaggaggtttcattctctagttattcgggttattagggttgttatgctggttaggctagttaggcttgtttccttgatgtcttagatattgtctgaaatattctagcaagatc

SEQ ID NO: 335878 - DNA, 1034 bp, Cannabis indica
atcacacatataactttaagaaaagagatgaaaatagagaagagaagaatgctgaaaaccctctgaagaatgcctccaatattgcagttgatctctccactttgcatctgtattctctctttttttctctctgaaattgcttgctgaaatcaactctcttcttccctttatataggcattgaaggcctaaaaagatggaaaaaacgcacatgtttaaattcccattcggatttaaattttgggaaacctcaagcacgatatagtttttctgctgacaaagaggcgggccgcgacatgctaaagccatgtcgcggcccgtgtggccttctgggatattcccttgatttctttcatgtaggcgggccgtggcatgctaataccatgctgccgcctgtgtgatcctctgctccaaattccacatgcttttatctttttttcgaatttgaatttgatattttccatcggaatatttttatgcgatattttatcctttttctattgatattttcaaactctttatctactttaaatctgtaaaattaaaagataaaaagcgtaaaaatgctccaaacatgatttaaactaaatagaaaaactatggtaaaattaacctaaatttagtactaaaaataacctaacaaaattcccccaaactaagcttttactcgtcctcgagtaaaatactaactaacattaaataagtcaatatccaaaacatgagtaattttcaagtagcttaaataacatgattacgaaacaattcacttatgcatatagtccagaatttcagttcaattacacccttgacagctctcaatttgtcttcatttagctcacgaaaccatagaatgcaattaactataattgaaccactttatgcatgctaattacagccatcaatccactgacccaaaattctatattcttgcaatacttactattctccactaatataaattaatgcacaatcaagaatcagaaggtctgtctaggcttgtattgttaggcttaggtaaaggtagatgaaatggtca

SEQ ID NO: 335879 - DNA, 767 bp, Cannabis indica
aaaagatcaaaaattattttatattgtatagttcacatgatttatttcatgattatatgtttgatatataaattttattaagtctagaatatataattagttataattatagtgttgtcaacacagtgggatataatcatgattatatgaataaaagtttaagtctcatgatttgtcagtatgttagatttagactgacatgataatcaccgataaggtatacttacactttcgataagtattatgtcctttccaaagcattggcaattgatcttggataagatattataaacttactgttatttctttctaagtcaatatcactggttgatcttaggtctatatatcttaatcctgatatggttaggttcgatcctaattgtattatttatgttcttagagtagttcgttgaagcttgtacggctgaacacatacatcttaggaacatgatagttcagttgagagggagcgctaatcatatatatggaatctatagcttctataagtatataaaaagtgaaacgatgatttccttcgagcttggcttaatagagttaaatgattgatgcctcatttcagtaattatattaatttattgaaatattatttataggtagctaagtgttttaaggataaaatacattaaaaggtagaacggtaaaattattcctattcgatgtaaatcaccttaggggtgttcatacaaaccgataaactgaaaccgaccagaccgtaaccgaattttcggttccacgtcatcaccgaa

SEQ ID NO: 335880 - DNA, 576 bp, Cannabis indica
actcacacagagtcgtattgtcccgtggtcctaggcaatccaacaacgaagtccatggcaatgtcttcccatttccactctaggatattcagtggctgcagcaaccctgcaggcctttgatgttcagcttcacttgttgacaagttaagcacttagcaacatacttagcaatatcattcttcatgcctcgccacctaaacatggccttgagatcttgatacatctttgttgatcctggataaactgagtaaggagtcgtatgagactcattcaagatttctcttttaatatcatcatccatagtcacacaaacacgatacataaatcgtagcattcccgtatcatccactataaagtcactaatcttcccagccaaaaccatatctcaagatttcactaactctggatcttgcaattgtgcttctctgatttgctccaaaagagtaaattgcagggtaatattagtcaatttccccacaataactgaattttagctcgggtcatttcatctgctaactgttcggagatctgtttcactgtatttatctgactttggcattttctactcaaggcatc

SEQ ID NO: 335881 - DNA, 515 bp, Cannabis indica
gggcacaaaacccaacactttgtccttcgaacgcgagatttaccgcagagcggagatcttcctgattatgatgcaggctattgttatgaccctacatgagtccaagaatgtcacagagattttgtaactcagtagcatctccaatggttgtttgaatgttggtaccgtgcggaacgactgcgttatgaatgccctggttgggtgtggaactgttattcccagtctcttgcataccaggcgcgatttcatctatagcagtcgttacactgtgacccacgtttgctggctgtccaggattagcaactggcggaacccttgtgtttcttgggttctgcaatgcaggatccaccgtctatgaattggctggatcaacctgacccctacgagtctacaccaccatcgtatttgtgattagactttgaatgaagagtgattcttgattctgctctcaatgaaagcaccaaaatgttgacctcgcttttagccaatgacaatgagtcttatttagtaagcga

SEQ ID NO: 335882 - DNA, 1059 bp, Cannabis indica
gcatatgctgagaagtcagcatagccaaatttctcaggtgccctgatttctctccttgttctatccctggcaagttggtagttatctaggttacttgttgtatctgtttctatttcctgatctgttgaagctagatccagattctcagttctttgttcaagttccacttgaacactcctgggagcagcacttgagctcatggggatttctctggtgagttttagtggcatttcatcttccctgaagatgacatctctgctaattatacatttcttgtacccttcctccaagcaccagagtttgtagcccttgattccatcagggtagccaagaaataaacatttgagtgctcttggttgcaacttgtcttgcctaatgtgagcataggcagtgcaaccaaagaccttgagatgttcataactgggtgcttttccagtccagaattcttgaggagttttgaagtttaagctgtagatggacatctatttatcaagtagcaggcagttttcagggcttctccccaaaaatgcttgcccaaaccagcccctatgagcatacaccttactctttccagcagggttctgttcattctctcagcaaggccatttgtaaggtccttggaactgtaggtgccttccaataccaacctttttgcaagaatcattaaacaaatttgtacagaactccatgccatatcagttcttaatttcttaattttctttcaagtttgagtttcaagcatgcctcttagctccttgaacttgttaaaggcatcatatttattttttagaatatgaatccacacatatctggtataaacatctataatagttaggaagtatcttggtccacctcttgaaagagtccttggaagtccccatacgtctaagtgtaggtagtctaatttgttgcttgaggtgcactttccaatcccaaatttgatctttgttgatttcctaagaacacattgctcaaatagatccatgtcagtgatctgttccttcccaaacactcctttctttctcagatatttcaaacaaccatggctaatatgaccaa

SEQ ID NO: 335883 - DNA, 958 bp, Cannabis indica
gcactagcaaccatcacagcagctaaactgcacgagcttgtccataactccataatctgtcaatttggcatcccttacaagctcatttcaaataacggaaagcaatttgattgtaaggagatgcgacaattgtgcgatgagttagggattaaaaaggtgttctcagtagtcgcctacccgcagagtaacgggcaaactgaagcagtcaacaagataatcaaacacaccatcaaaggaaaacttgaagagcgtaagggggtatggccagaagagctttcacaagttttatggtcatacaatacgaccccccgatccacaactggtgagactcctttctctctctcctatggatgcgaggccatgataccagtcaagcttggggtaggttccctacgaagagatgttttcaacgttacacagaacgaagagaaacagtcgcttcacttcgaccttctaaaagaaaagcgcgatcaggctcacttgaaaaatgcagcttatcagcagagaaccgcacggtatttcaactcaaaggtcaaggagagagttctacgagtaggagatttgattcttcgaaaagtaatgccaaacacgagaaacccaacacatggggttttcggagacaattgggaaggaccatatctcatcgcagaaaaaattggtaatgcaacataccgactcgcagaactcaatggtactgtaattcaaagagcctagaatggcgaaagcttaaaatttgattgtcaatagtactcacattgtgtcatttgtactcactgtgtatttatacttagtcaatttttctgcataaatattctaagtatagggggtatataacccactcactttgtactattgattaatctatttcttaaaaagttatgaagtttttttgaacttttgaaattttttcgaagttttgaaatttttctaccttaatatttattacaccaagctgtaa

SEQ ID NO: 335884 - DNA, 728 bp, Cannabis indica
gacattgcaattgttgttgataaattattggaataagtgtaactcaatggcacatattcggtcaacatagttccattccaaataaaaatagaagttatttttgtgagtaatgaagggtacaaagttaggtgatatgacatccacttattttattagggaattattttataaaatctgacattgcaattgttgttgataacttattggaaatagtgaaactcaatggcacatattcggtcaacatagttccattccaaattaaatttaagtttatagttagaaagacatacccaatagaacacaatttgtacataacatagttctatcccaaattaaatttaattaggatgctttattttacactgtaaatatagattgtagtgagatgaatctataaatatactataatatcggtactgctattacatgatcctttatctgacctaagactttaaaaacgttgacgtcttcctcctcgcgtctcgattttgttcgagagtccggcgcaccggcggttgtgtcaaatatgataacactcatcccacggtggccttggactgcgggaggttgaggttcagttggatggcatatttggcggtgttggaagtagttccgtccagcctaatccacccatccgaagccttcgtcaacatttcctgaatatacatgtagtacatacataaaatttttaagaaacaatttgtaataatatactattgaaataaata

SEQ ID NO: 335885 - DNA, 1071 bp, Cannabis indica
gctgtaacctaaattgcaacaaaaaatcgtacagaaacccctattgcaactgcaaccactttagaaacccaaaccgtaaatttgaaaaaaaaaaagttaaaaaaaatagtatatggggtaattccctaaaaataaattaattacgcgaaaagcgactatattacctagtatgacataaaaaagtttataaaaatgtaaacataactaaaagtccaggatcggccttgagcataggcggggctaggcctgtgcctaggacccacctagctcaggggcccgaaaaaaatttgtccctttttaaaattacacattttttttataaattttgaaaaataccatatttttttctaaatgagggctatgacccactaaatttcagggtcggccctgtaaaagtccataccctattaattttagggtaaatagcggcaaaacctcccaatactttggttttcgtttcgctaaaccccccacaacccaaattcctgcaggtaaacccccaaaactactactctgttagcaatttaccatttccgaccaaatttagctgttaagtgccaggttggcttgtccacgtggacacaatatacacgtggcacaattttattggtccacataaataattatattaaaaaaattaaaaaaataaaataaaattaatttaaaataaaaaaaaaattataaatattattattttttcctttctttctttctttctttttttcttttctttctttttctaatgccctttctctttctctctcttgctcgcaggtaacaacaagcaccagcccaaacccaggttctcgatccccctctctctcgatctcagccatctctctcgatccccccctctctctctctctcagccatcttctctttctcgatccccctctctctctcagccatcttctctttctctccccaggaccaccgagtcgtcgccgtcgtcgtcgaggaccacgaacccatgccgtcgccgtcgtcgtcgaggacaacggacccatgccatcgccgtcgtcgagaccaccaagccaggtaaaacctgaccctatctctctctctctctct

SEQ ID NO: 335886 - DNA, 1863 bp, Cannabis indica
ttttcgttgtttgcctataaataccagtgagcatttgtccacaaactcattttcaccaaccttccttactatgtaagttcagagcgaaaagagaggtttctggcttcaatcttgctgaagtgctttcatcaaaactgctcgtttggcttgacgcaacttgaacccagacgcttgattccttgagtaagttctcgatttcctttatgtttgctatgcatatttactttctgaatgcactttcaatttcgctgtagaagagatgtataaaccctaagtttaggaactctgcgattttcctctgtcacggttcatgcgatttcatcgtctgtaatgcttatcttttgaactgcataatgcctgtctttcatcctgcttattctaagcttcatgagattttcttgccctaactcgtaaaaatttcaaaattcctgagttttgacttttcgttgaatattattattctttaatctgttgagtacttcatggtggatggcatgggcaccacccatactcggttccagcagatccccacatatcaccgccctcccttcactcttgctcttagagatagagctcaagagcttgctcagctgtcgagggatgaccggaatatcatttagttgacctcttaagacaactttgtgaagtacgggctctatccaaaggatttcattcctaagccagtgaaggggaggaagaggaaatctggtgctggaggggctgagggagctcatgaggagaatgagctgattcaactgaagcgcgaggctaagttgaagggaggtgcaagggccaaacatatgctcatgagcccttgaatcctaaagatgagattggggaagagcaggtgactccgcttaagaggaggaagaaacttccgcccagtctaggcctgttgaacatgcaatttgcattagggagcccagttcacctgctcggccatcttttcccgtgctaggaaaagggaaggcgttcctgagggaggcgagagacttatcaagtgatggtggactgtcgagtcttgttcggacaatcgctttgatggatatttcgtcttgtttttaaactttttgactatcatgttttatgcttttgatgccttttttcctctaaccatgttgtttttgtttcatgcagacatgtctcagaagatgcttgatgccttgaagaagagagttgggggaagctcaaggtcgtctcctctggccaagaaatctaagggcgatgaggcaaccccttccaaggaaaaaggcaccagccggagaggttattgacctttctgagcagctaattgttgcggatccttctactccaaaagttgctaagtccaaggattcttgaggaggaagctcggataggcctaagctatcaaagggcggatccgagctggccaagagcggatctgagcaggtgcaggctcctactccacctttgccggtgcttccagaggccaaggaagttagagagatgcttgcccattacatgaactggttggttcctgaggtaagtgagcagctggccggtgttgataacgagtcttccctggagttgttgatgggaggagtcttgaaggaatttaccagggtaagcctttgttgatattttcctttaattcttctttatttggttcagaccttaaagttttttctctgtgtaggctggtctaaagttggcttacacatacttctgagctaagtctgctgcttcccggaagcgctccaacaccatgagggcggaggtagacttggccaagaaggatgctgatgacaccagggtggagctcggagccgtccgactagagctgggtgaagtcaacaagaagctttttgccgctcagaagaaaataatcgagttgactaagga

SEQ ID NO: 335887 - DNA, 690 bp, Cannabis indica
tccctttgtgatccgcaccaataaaaaggacggttttgcccctctgttttgaacgttggtgttgtgtgtagggggcattttcggaatgccagctgtttcctacaatatatatatatataaatgatgggatcagatatataataattaatgatgtttaagtgcaataacttaaagttgaaaatcatattaataccatgattttctgattattttcatcaaataattaaatattatgtctatatatgacaaaacttagctttcatcacatataattataattgttatatgtttaaagcaaaagtccttttctttttcatttcatttgataatattgcatgatttaattgaccaccctaattaatattaatattaatattatttatgtatctttcaattagagcatgcaattaatatattatgtttattatttatgtatctttcaattagagcatgcaattaatatatggctatataactagctagcactacgttttaatttccatttcacgtacatttcctataaatatagatatatcatattatatcttaattattaccataaaaatgaacaatgtttgtaagtttcgtgtcaaatatattgcactatttacaaacaaaaattcaaaacaaaatgagtcattcatatgtgtaaatgatatatgttataattatatatatatatatatggca

SEQ ID NO: 335888 - DNA, 575 bp, Cannabis indica
aagatgaatattaggaaaaaaaaattgattacattgtttcctaagaacttataaccctaaccctattttcatgtaacaaaagaacatatgttgaaaaatcatagaaaaattaaaattctatacctgtgattacccaaaaattctctttgaagatcactccattggtttcccacattgtcccaaaatttgtagccttctttcattatttgattccaaataataaacttgaaaaaccccttagaaccataaccctacccgttatttgaagaataagaaaaaaaacctgcaaaccgttcaggtatagcaagaagaaaaataattcttcaaccataaaaattctaggtctgccgtgagaagagaggagaagaagagctcataatttagaattttttagacaaaataatggctgccctaagtgatataataattatatggaaaattacttagggtttgccaattgtggaaattacctctactatggatttttattaaatatttagatatgtatggataaattttaattttaagtaagttatggttatttttttattttaaattattatgtgggtgttttt

SEQ ID NO: 335889 - DNA, 798 bp, Cannabis indica
aagaggaggcttccgttttccttggccggtaattttgcaattaacaacttttagtttctatttttgtttatttcccttttttgggtcgtaaatgtaaatttgttccatttttagtttattatagaaaaaattccaaagtttaacctttactctatttttgttaaaaatgagaaaaaataattaaaaaattgttaaaaattgttaacaattaataaattgggatttttacacttggtgccactttttgctaattttttagatttttatcaatattcggttatttaaacatttataaaagttttatttttcaattttatattttcaaaagtttcataattacaaatatgcctattcatgcttatgttctagattttccctcttcttacacgccacccctcccattacttctcctttcttatttttttgaattttttttattttctgttactctttccttggtttttctgttgccacaacccacgatcatcccgttcgaagccctaatccacgatttttcaacctcccatctatgccactatcaccactatcttccataacttctattagtttttcctcccacattttcttctcttcttctataaatggccaccactaggtcgggttcgaagtcaccttccccagcaaaaaagttcaaaaaatactaagaatcctccttcgaagtcttctaaagttgatcctaacatgggtttgaagcgcattgcgaagaagggaatgggtgatgttggagagccatttggttctaaaaaaaagacctcttccagataagattgagtctcg

SEQ ID NO: 335890 - DNA, 867 bp, Cannabis indica
aacgattaagttgtgagtgagaaagtcgtggacgagtttcgtttgtaggggttaaatttaacagaatattcttttatttgtaaagcatattctgttaaaccaagaattgccgttacataggcacttttaatatataaagatatatatatataattttgctaatattagtatcttagtaattaatggtatgataaaatagttattataaaagtttaaaaattagttaattagactatttaatattaaaatataggtataataaaatttgtcttatatatttgtaaatatttgtattttaaagtgttcatatgtgaatttttctataattaattgaataggtaaattgatgtttagtgtttttttattttttatcatataagaagaataactattttttcattggtagttcattaatatatagtataggtcattactattgttacctattgattagtttttccatttttttacctattgattagtttttctatttttttacgtattgattatgcatgtataattattgatttgaacctaaaggaaatttgattttctatacttacatatacctaatattttatttctaaactaatacatatcaccattgaaaatatatgatcactttatctaaaacccaaaaatacctctctcaaattttccatactttttttagtgcaaaaacataaaaaaataaataaataaattggtagtccgatgaggtccgatggtcacctgatgctacttttgtatgtacaaaaacataaaaaaaataaaaaataaataaataaaattgtagcatatctagtccgatgggtggtccgatggttccgatgggtggttcgatgggtggcccgatgggtggtccga

SEQ ID NO: 335891 - DNA, 778 bp, Cannabis indica
tttgtctgtttattgttcgatataccgaccaaacactcatcttgcgtgttgcttttgtagacgaaccctggtgagttttggggaagcgaacactgaattgactaggatttgcatcaactcttgtacgaggattatcctcgtctttgttccagaccgcccttttcaagcgacgaacgtcttaactcgttcttcccatccagccacaggatgatggctcgcactaaacagacaatgcataaagtcaacgcgtttgaccctcacgtggcccagcatgctacctacccagtgccgaacaagatccacccgtccaggaggagggggatcatgaaggggacgctaaagtctaggacatagaggaacagggagatgtccgtcctgacagcccttctgaggcggatgaagaggaggaggctgcacctctaaattttggaggatataacgaggtcggggagccggtagatgtggacggtgatgtcctagtttaggaagtggactacgtcactgaggagcttagtgctgcagttcctcaaaggaggaaaagtgccttagatgccaggtgggtgagtcctccgtccaaggtcactgaagcacacttatgggatctcgaccagtgcagctatcagggcgagctggaatgttatgttcctgcctcgaacaaccgagcctccaacccaaagaaggggatgtgtgcctggtcgggtgctctttccaaacaaggggcattactgcctttacacccgttgtaacaccctaactaacataggcgtattacgtgatt

SEQ ID NO: 335892 - DNA, 517 bp, Cannabis indica
ctcaaggatgagattgaaaacctaatccgattggggcacctctatgaatggatcaagaatcggctgcctcaccttaatctgggtcagacgacaggggctttgccacagggagcaccagggggtgcagcaggagtattggctccagttgctcccaccggagatgcccagcatatccctagtctaccacccagacccaatgggacagtggccatgatgtcaagaagaccccatattggaggaactacccgtaaagaattgaagcggtatgcgggagccgtgaagcacaatgaggtttgggaggttacccaactcccagctcaaaggccccggctaatggatcaacccatcacattcacggaagaagacgccaagacggtgcgttttccccaccatgatccgttggtcatcgagacccccatcgccaataaagtagtggccagggtcttgatcgacaacagaagctccgtgaatctacttttcaaagagtccttcaccgcaataggcctgacggaccgag

SEQ ID NO: 335893 - DNA, 1436 bp, Cannabis indica
  modified_base (23)..(23): a, c, t, g, unknown or other
ctagaatgtaaaattaaaaaaanaaaaaaaaaaaaacttaaagcaacattattcaaatatgtagatgcattcatccaacacaagtgattttttttcttcacgtgtttctcaacgaacaatcttcaaatcataaaacctaataaaaagatatagcaacaaatgaattatttaaagatgtatctttcttgctttttgaaagacaaatttggtaatcaaatcatcataataaagtttatttaaaaatttgtttccgatagacaatatagctaatccactcaatcgtacttgcaacatggttaatcttaaatacgattttatcaattctaaaaaatttctctctacagaagcaacagttactaggatagttagtaaaatttgataaacaatgaatgtatttaaaaaggaacaaatattttttatgtaatcaagaatttcaattgagttgctaattttatttggaaaaaatttcctcgacacttttaattctgaaaacaaatctaaaccagtaatatcagacaatccattatatttcaaaacatcctcaagatttaaagagtgatctttcaaactatctttatccaatacttttagtttcttcatattgaacaaaaaaccaaaatattttcgtacacttgaaattgttcaaatcttattttaagtgaacaaataatttagtcaatcaagtaaagaaaataatcaattcgaaataattcttcagcgaatttaattataggtggcaccgactcaccattttgtggcattttctccttgcgataggtggcaccgactcaccttttacagccaattagcagatgacacatggcactccaaagtttacttatggtaattgcatttttactctatgtaatttgtaataagttttaattacacattagtcatgttaccttcctataaatagaagcttaggtttttagaattcaatacagttttcatatagaaaaattcagagaaaacgctcgaagcgctcagtgttagtttatcgcttttcttagttaattttcttatgggttctaagttcccttattattaaggtgaacgatgaaacctagcgtatttaattaagtacaatatatgcttatgattttcgcttcttaaaataatttctttcatttttaatatcacgtattttttatagttagaaattattaatgattggttctacattttattaaaaataatattctttgattttttgtatttacataaaaaatttcacatttaatgcttagaagacgttataattttaaaagcgaaggaaaatctattttttgttaaaaataattagtttaattactaattaaattatgagaactaatataaacataaaaaaatttatatacacttaagtggattttgaacccttaataatattctcaaatatcactgaaaatatctgttactgtcatttttaccgt

SEQ ID NO: 335894 - DNA, 858 bp, Cannabis indica
tttaattaatatataaaatgtaataaaaaattaaaaaatatgtataatatatgaaatatgcaggttggtgggcgggtttggattcaacccgaaacccagtggtcctaaaaacttaacccgcaaaccccccgaaaggtaccgtgttgaacccgacctgcctgaatatttttttaaaaaaaaattgcggattgactgggtctgggtcgaacccgctcaaaatgttcagtcctattgaaaactattgaagtccacttcttttatagccaaagaatgataacaaaaaaagatataagaccctgaaaatctattttttttttttcaggattaggaggggtgggccgcggcatgagattttcatgattcatgcctaggcatgacccccttttatttgggtagtgggttttctgctgcatcgactaatagtattttgaccataattctctcgatattgttcggaattggacgattcaagatgttttggaaaaataaaagagagatctagaacttttatgctttgattttctccaaaatctaatcagaacgtagtttaatttaagcttgaagtttcagctttattttcttgtacaattttctctattttatagatcatctttttgtgagatttgaccaatttatacattccaagtgtcgaaacctgaaataaacgaaaacaagcgtaattctattccaaaaaatgataacaaagaagaaaattaacttttaaaataacacaaataataggctaaaaatatcctaataacaattattacacctatttctagaagttagggactaatctacatcaaattaatttttttggggactttcgctgtaaattttccttttttttttttaatt

SEQ ID NO: 335895 - DNA, 1359 bp, Cannabis indica
tgaagtttccttgtcctcatgcatgtgttgcatcttaggagcaaagtattagcatgtacgcactatgcttgccatattacacaataggatattggaggaggacatatgaaggtacaactatgccagttggtgacgaggatgattgagaattgcctgatcacataaagaacatgatagttggagtgcctagggcgacccaagaaacaaaaggttggaagaattaagaacaaccaaattgcttgtaatggtgaaaggattatcaaatcacaaaatcgtagcaagtgcggtgccaaggggcacaatagatgcacttgcacctactgaggttaaaaatgaatgtggaatttaatattattatgtgttgtactattcctattatgtattccatgaactgcttgtactgttatgtattaaacatagacttttagtttttttgagtctattattgtaattattcgttcagtttgcatagaatgaagtgcttaactaactaaaaaaaagtaaagttttaaaaatttttgaacccattaaaacaaacagaagtggactcgggttataagtagattgttaaaatagaaaagcgtaaaagtaaagattgttcaacaaatataataaatataacattcaaagttcatgacaagttctggtagaataaatctactccacatctctggtgaaagagcggcatatggtcatcatctactccatcgaatggtcgatccaataacttatgctcaatatgctctatgacgtacattccgcaatcgccactgcaatagtagttaaacgcaaaatttaataaaccatagagaataataataaaatttttaatttaattagtaaacatattctcaaaaatgcatttaaattacctcaattttgtttgaggtacaactttattgtccatgatatcccagtcgaattttctgacctgggttttgtggctgtcatttgagggaccatcaccatgtaatgggtgtcacatacaccacactagtccacaaatttggacaataaaaggcaccaaacatccatcaacgtcttcagttcgtcttctgttagagttccaatactcgaatcgaagacgaatagcttccacaactcaagattcgcctccatagcgatctaatgtttctattgatccaagaagatggccatgtatatgcactccatatccttccaagacggcataaattggtttggatccccatgaacgagttccaagagggactcatcccagaaaaagctagcatggtcagtagtggtcttccaagcatcccaccgacccttcaacgatgaagcaaactaagatggcatgacagtacacttacgtgggtacaactctgggaagaagtgttg

SEQ ID NO: 335896 - DNA, 1075 bp, Cannabis indica
gaataattccactccttattcagccaacaaataaatcaaataacatttaaatttcccatttctaagtccactaaaggacaaaaacctaattcttgaccaatcccgacattcccaatgtctaaataaccatcccaataaactaacatactaagctctgattttactgagccaaacaccgagttccatgttaccggacaccggaatgcaagattatgaaatttcactatatgacataaaaatgcattctgaattcaaaaataacagtataaataattatttaaatatctataaataattttcataattaaacataattaactgctaatttccaaattaaactaagcggtctttacagaaataatgaagatttaagcaaactcggggagaaaataacaaactcgagaacctgaaaacagggcccagcgcccaagttgacttggtgctgggcccagcgcccagggtgataatcaacttgggacgcttccttcaattgctcaaattctaaatctgatgcgaccattgaatctgaaatggtaaaaaattgggtaggagacctcatcctcaagttcaaaagtcttggaagtatcgaaaacgaaaatctcgggagctcgtgagtaagtacccaacacccaagttaacaaaaggcttgatgcgttgggtttcgcttatccgattctgatgccatttcgaccgtccacctagttttttataataacaaagatctatgaaatcagagaagtcaaatgcacaactttgcatttctcatttttcagctcacacagaaatgaagagttttgagtctctcatttccgcaaaacagcaacatttcaagaactggtaatcatcgccagaacacagaaactgactaagtgatgtcaaaaagatcacttaggcaccttaaaatatatttcttggacgtttttacacttacccaatgtccagattgatgtcatatgtcaacctgggtgctgggatgtcaacctgggcgctggatgtcaacctgagcgctggatgtcaacctgagcgctgggtcaggaactgccttcaataaaacaaccataactcactcaatttt

SEQ ID NO: 335897 - DNA, 772 bp, Cannabis indica
ataaaataagataactttgactctcgcctaaatgggacattattagattcttgttttaatcaaaattattctttagttccctcttagcttttttcattaaaagatttattaagatagtatatcattggataaagaaggtttataaatcatctacttgtgatgtgactctattttcttctattaaattaagtggagcagaggactacactccatatattctatcccgtaatgatataactcctcgatcttagaaacatctcctacttgtatatgcttactaaaggaaatttaaacttagagttaaaatagtagtgttatacccgaaattcggctaccattacaatagaggacacgtgtcaagctaaggggaatatggatcgatgaaagtacttttaatgggataactcattaattgtgtaagtaacagagtatacttccaactcgctgactataaggttttatgcgaggttaaagatatacgaactgttgcctcgtgtattaacgagaaaccatacgtcattgggcgcataaagcgagacatcaacttcgttacccctggggagatgaaagcgatgcatatcgattgtgaatacacttagcacataatatacaaactaagtatatcagttgggtaaactcaaggcctattaagcgaggtgcctatctcactataggaaggagcactcctgttactttaaccaatcaacttcagacatctttcagtgagacttatagtcttgacgagtcagaagctgacagtagaatgatggct

SEQ ID NO: 335898 - DNA, 812 bp, Cannabis indica
tttttatcaaaagctgctaggcatcaatttttcagtgtagaaagctggttcaagctagtgttataaagcaagaccctgttttttctatgggccaagctgaaacacttactgctaatttttcggttgatgaagttaggaaagccatttttgatatcccagggaataatgctccaggtctagatgggtatcggagttcttttttagcataattgggagataattggcaatgagactgctgaagctattatttctttccttcaatctagtcagttactaaaggagttaaactccacgattttgactcttgttcccaaaatcaattgtccaaacactgtgggtgattataggctgattgcctgctgcaatgtgctatataaggttgctaccaaactcatttgctcacggcttaagatgattttacctgatttggtggcacagaataaagggggatttgtttatggaagatttattggtcacaatatcatgatttgccaggatctcatccgacattatggaagaaagacaaagaaatcaagctgcatgataaagttggacctccaaaaggcatacaacaccattgaatgggattttatagaagaaatgctctatggcttcaaatttcctacaaagtttttcaacttggtaatgacctgggttcgaactcctcatttctctttgatgatcaatgaatctttacatggttttttttaggtccaagcgaggcttgaggcaaggtgatcaaatgtcgccactctatttgtgcttggaatggaatatctctcacgaatcatgaggaagattgggaaaaagca

SEQ ID NO: 335899 - DNA, 1764 bp, Cannabis indica
attttgtgtataaacataataaacatactaaaccataagcatgtaaaattcatgcaaacacaaatcacttcaaatttcttatattgataacaaattagattgtaaagggttttatttagggcacaaaacccaacatcatcaacgtaaacctctatgttttgcccagtctgattcgcgaacacttcattcaccagtcgttgatatgtttcccagtgttcgtcaacccaaatggcatgaccttatagcaataaagtcccatgttagttatgaagcttctgtgtttctgatttgggacatgcatttttatctagttatatccaaagtttacatccatgaatgacataagctcgttcccagcagttgcatccactaactagtcaattttgggtagtagaaagaaatcgtttgggcacgccttattcagattagagaaattagtacaagttcttcaagttctattggattttgggatgagaataggattggctatccacgagggataaaatacctcgcgtatagagtcgttgaccaacaacttatccacttattgtttgagtgccccttgcctctcggaatttaagggcctcctcttctgtctctttcctgggtagtctagatcgacatttaagtgatggcagattatattagagttaatccctatcatatctccatggctctaggcgaactgatcatggttcacccttaaaaaacttattagctgctatttcaattgttcatccaggtttttcccaatgtaaacacactttgtgggattttctgggtctagaacaacatcttccaactcttcaattggttttaataagtttctttcatcttgaatctgaggatcaagatcttcatccttcttctcgccttcttcggtcaagactaccattagctggtaactggcttttctgtgctacaacttaatgtgatagcattcgcgagccagcatttgatcactcgcactactcccacacctagtggtgtctgaaactttagggataagtgcttaatcgaagtaactgcccctagtccgattaatgttggatgacccaacaatatattataggctgatggcatgtcgacaaccaaaaagtcttgcattattatggtggataaaggcactttgcccaaagttaatgtgagctcgattattccttgactagcgacactgtcgccagtaaatctataaagatttaccatggacgatcttaatttagctttttcaagccccatctttttcagtgttttcctgtaaaggatgttcactaaacttttgctgtccactagcaccctttttatcctcttgttagcgagctggatgttgattaccaatggatcgacgtgagggtacctcaaatctttttcatcttcctgcgaaattataatcggaggttcttcattctttactttcttggaaggttctagagaaaaggcagactgcaagttcttcatttccttcatgtacctcttttgggcattattgctttctcctgcaatatgtggccctccgaagataactaggatatcctctccctcaacaagaggaggttgtaatccctggttacttgggttgttgggcaaattgggctagttatgtccattgccttgccttttcacatattgcttgaaggtcctcgtgcgatgagactctctatctcatccttcaactgacaacactcatttgtcctcgtgtggtacttactgttaggttttattccctaaataaaactccatttcaatgtaatctattttattcaa

SEQ ID NO: 335900 - DNA, 1202 bp, Cannabis indica
tattattattattattatcactttttttaaataaatgaacttatacatacttatatcatatatcaattaacaaaaaataataattacttttaaaactataaataaatttatatacatatcacatatcaattaacaaagagtcaaagactataagaaaaatgtgcattaatgaggacaaatttcgtaaaaaatcatgttttcgtcagtattctccattaatgaagacatttcattagtataaagttattggaaataattcatcggtaaaaacaattatcaacaacgacttttaaagtcgttgacaattaataatatcaacgacaacataatcgttgggaataataattttgttttttttttaatttttttacatcaacgacaataatattgtcattgattacattatcaatatcgtcattgaagaatgcctcgaaaaaaaaaatatttatattaaaattattcgtaattaattattaatatataaaattatattaaaattatttatgaatattaactaattatattaaaatttctatttttataattatataaaaattaattatataaaaattaattaattaattatattaaaattatttttatttaattaattaatatataaaattatttaattaattaagatataaagtcatttaactaaaagaacatttagagtcacaaacattacaataaaaagtgagtcataaacatacaatactgcttactaaaatataaattaagtgttcataaaacattaataaacataaaactgataattcgtaaaattaaaataaaaattttaaaagaagtttgtagtagcatcgtcctcatcactagcagctctaggaacattcgacattttgtgggtagtatggcggcatttgcgaacttgtcatcatttgagatgtccgctgcccatgtggtgtcggcatcattggagatgtctgctgcccttgtggtgtcggcatcatcatctgagatgtctgctggccttattgtgtcggcatcatttgagaagtatgttgtcctagttgtttcgatatcgtctgagatgtctgctgccatggttgtgtcggcatcttctgcaatgtgttctgatattgctgcccttatgtcgacatcaactaaatattttgcggcatctgtgacatttgtggcattcgaggctgtgacacatgagacgtctgaggcgactgcatcat

SEQ ID NO: 335901 - DNA, 887 bp, Cannabis indica
ataaaataatcaattgaattgggaagttttttttttttttagatttaatgattgtaaatcacattactaatgaaatattttgaattttagttgtgaataaaataatcatttctttcaaataagtaattataaagcgtaaatccttttaaattacgttaggggcatatatgtatgattaaccgaaattaatctggaaatacatagtacaatgcaaacccatcgtttagaaaaaataaaattttctgaaaactttttaaaagggcctcgaccaaaccttttgacggaagaggggtcgaactgttataactctttgactaaacctttttgacgaaagagggctcgaattgttataacgccttgatcaaacctttctgacgagaaaaggatcaaacaattgtaattattgatttataaccaatcgtacgagaaaagaaaattaaaagttatgattagggcataaagctgaatactaacggctcgcgctaagggaaagtattaaacgagatatccaaatgtcctgaaaaaatacttaaacccaacacgtgggtagaatatttaactattcatgtaagcaatgaaaatatataaaagatgacaagttcattaataatataattgaattttcttaaaataagatcattttttatgatcgcgaggtggaatcgatgatggctcatagattgaggaatgagcagataagctgctcgcacgtaaagtaggaaattaactacttaacgttagaggaaaggacaagcaatggaaactcctaataaactttatgcatgtgatagtttatattgtgaataaaacgcaagcaaacatccgcatattaaagtttaaatttaaaagtgcgaggcattaaaaagcaaagttggccatccaacctt

SEQ ID NO: 335902 - DNA, 924 bp, Cannabis indica
gatgttaatgaaacatacttgttagtaaatctagatcctcgtaaaacatattctaacagaaagaacctatgaaacggaaacccgccgcctgaggcgccgtctggaagaggcgcagcggcgaaatgcagagttagaacgcgatgtagccttggccagggcagcacaggggacgaatgatcaaaataacctaaacctagagtgagaagaccatgaggcagacctcgtggctcacgaaccaggagacaggaaaaggcccgagaagaacaactcggggaaaataagataccccctaaaaattaggatgaacaaccagatgggagacaaccgaaagctgatgaacaagaaatccatcatgagaatgaggaagatcttgggactcaaccgggagaacagaggtcacctgctagaaatcagcaatgttcttcccaaacccatagagcgaggactcatacggaccctgatgggggaaatacaacaaactgctctcgggaggaaagaacaaagcctggaaaagcaagcgtgacttcaaggcggtcaagaacccatagtcgatcaactcgaagaggagaaagtattcaacaagtaaatgatcgataaagtatgggaaccagtaaatccgcgagccactcaaagacaaagtctatgagtaggacgcgatctgtgagtaagacaaggtctgccagcaattactctcaaccggatctgcgagagcacttgaatcggaaaaaacctgacctttgccaacaacttggtccaaagcaagaggatccaatccaattgcggataaacgagttggaggataagttcaggagatatcaagtggggaataagggaaactatctcgatacgactctgacgaggaacttgagccgtatcacccagatataatgagcacccctttccctttgggatttaaaaacctgc

SEQ ID NO: 335903 - DNA, 534 bp, Cannabis indica
aacaatgatatcttttatgttttgtggtacatcccatgttgtgtgattgtgtaccggatatgttgagtcgatgtatgtctcaagccatgttcttgtcgtgtaataacctgaacagtagttgtaaacattcaagtccatctcttttataacagcaagtgcataagcacacaataattcgtcaagttgaaatcggttgtaactgcatgttttatccttgagattgatgacccatgatctggttagttctaccacttcaaacatgttctcgcttattggctttacttgcaaattaagtcaatttataaaattgttattatgttccagaaacataaaatagactattaagaaagcataatgcaacttaaagttttaagagattttacattttctatcaatgagtccacaaagttgttgactaatttctgctctactgtaggtgttaaaaatgttgttgttttctgtgcctttttcctatttgtgtatgtccattgttgtatcaaagctctcaatgactccatcagtgttgtgattggt

SEQ ID NO: 335904 - DNA, 1040 bp, Cannabis indica
tctgagtctccaatcccggtccgggttgtgcgtctgggtttgggtccaagtacgtctctaggttcctgttcgaatcctaagtcccgatctaagttttaattcggctccgtgtcccggtctcggtttgggtcttcgtcctagtcagattctagttccgagaatgagactgggtcccagtccctcggtcttgttcccaggtcccgatacgcttacagttccgcatccaattttgggtcacggggtacgggtttaggtccgagttcgggtctgggttcaggtttaggtctgagtctgtgtctgggtccgggtttaggtccgagtctggatctaggttttagtccgggtatgggtcccagatccaaacatcgactatgggttaggtttaagccccaggtctaaatcaagatcccggtctcatgtcccagtctagttccacttcgggtcctaggtcttagccctagtacgggtttaggatctgggtccggggtgaggtcctaggtctcggtgctagtttctgaagcacgggtcccgaatacaggtccccatcctggtccggttcctaggtcccaatccgagtctaggaccccgttggggttcatgtcctagtccgagttcgggtttgagtttctgatcccggtctgggtctagatctaggttcgagtcctgggtttgagtcttgattcaggtccgggtccgactctcgggttccgatccgggtctgtgttctgaggcctgggtcaaggtcccccatccaggtccgggtcctaggtcctagtcgaggtccatgtttgggttcaggtcctagtccagttccgatttcgatttcgtgtctgggttcgggtttgggtctgggtctccatctaggtcggggtttgagtcctagttcgagtctagggttgggtcttggtccaagtccagatcccggtctggatctagatttgggtccaggtccgagtccaagtcttgggtacgggtccaggtttgggtctaggtctcggtccgaatccaactcccaagtttcgatcccagtgggtatgggt

SEQ ID NO: 335905 - DNA, 549 bp, Cannabis indica
tttttaatttatcttattttttgttaaaccctttgataagcaaaggtgtgtacaataattaaaaaattactatagcgtgactaagcagtaaggcattacaattctcttttaactatataaatcattgtaaatatctagttcagttaaattctactcatttttttcaaaaaatttacttatgtggtcatgatttataggtatactttcagtacaagagtctgtttaacaattttttagctaactgaaattcaatttattgacataaaatatacaaacattagttctgagaatgcataaacttattctcatagttcgttattaggctattgtttatgcatttaatttttgtttcagctctagaattgggccaaattaacattgtgttagtattacatcaatatattatttaaagttatatgggcataatgtaactacatagggttatttgaagcaatttttatagtttagtgagaatttttgcaatagaaaaaagttcaagagcaaaactctttaaaggtcatagttcaaggggataaatcatatttattc

SEQ ID NO: 335906 - DNA, 571 bp, Cannabis indica
tatgcatgctaaataagtaatgagttatgattatgcatattatatcatattgggattacttgtgtttaccattgccttgatttaatagcttttcttgctgagtcattgtgactcacgggtgcttcgtggtgcaggtaaggaggaagaaattgtggtcagccacgagtcaaaggtctcccaacgatgtacatatcaactgcggtgtttcggctgccagtggataggatccatccttttgactattttatggaaatgtaaccctattctgtaaatctggttttaagctaaggtgtaaaagtttttgaacaggggatccccatacttagcaatcttttgaaaagttacgttttagtttaatttgaaagtttttaactaaaccgcacttttcctaaactaatagattaactaagaattagtttgtaaaagcacacacgtggcgtccctatgagacaggacattatatatagggccccccgtttggtatgcaggattggactggattggactgaaaatgattggactagactggacaagattggattatactgaaagtaatcgtgtgtttggttta

SEQ ID NO: 335907 - DNA, 634 bp, Cannabis indica
gagtgcctgtaagttatctacattaaaagaagtcactacacaacactcttttactattttattaacacgtatgaaacattttaataatgaatatattataatgttctaatccgtaaacatgtaaaataaaattattcagtaagctaaaatatataatattattttattcctcattaagacaatttactttattacatatatgttgtgattgtctatgtaatgtagacattcgtacttgggagcatacacatggtagacaagctagacatagatatataaataagaaatgtatgtattgtataaggactaactaattgataatggaaataggttgtcataggcttagttcagtggtttcacacttcttttcataaaaggaggttccaagttcgaatccccctcccctaatattaaaaaaatgataacagaaatatatctatttaagacaattaaggacgacgcggtggaagaggtgggatgctttgttcgtttctaaaaaaattattgggatcaaccttggttttcaccttaacaaacctgttaaaatttttactaaaatacttttcaccccaaatacatgcttgtgtgtaattattaggactcttgggattagtttttcctaaatcaaggtccc

SEQ ID NO: 335908 - DNA, 879 bp, Cannabis indica
tgacaatctgagcttcgtatggaggagtattttttgaagcaaaaggactgatacaggctggggtaatccgtacgataggcatagtgaacatacttcaattttatgtgatccttggcttccacataacacaaatggctatgttatttcttcacatcctgcacttgttaatcaaactgtaagtagctttttcaaaatgaattcacgagagtgggatgaaaagataattaaggatctctttgatgatagagatcaagagctgatcttttctatataattgagttctactgcaatatctgactattggagctggcggtttgaacgattggggcactactcggttaagagtgcctacaagttcttactagaagaaaaaaggagcttggactattaatggagctactggtttttggaaggatttatggagtttgaaagttccccctaaagtcagtaacttcttatggagggcgacttcaagcttgttaccaacttgtgtccaattggaaaaaagacatgttctagttaacccaacatgccccttatgtctcactactgttaaaactatttttcatgcgttagttgggtgtgttcatgctcgtgcttgctggaataggacaagtgtggatgttgggaacaatatggatgatgattttagtaattggctacttgtgctgcaatgccaaggaagagaaggcgagttggaggaggcggctatggtcagctgggccatttggcgtgccaaaaatgactttgtttggcagcaaaaaagttggactgctgcaaatgtggttacatcagcaagaatgctacttgatcagttcaaagacgctcaaaaaagaaagggtctttctttgtcttcgttgttcgacggaggccgtttgg

SEQ ID NO: 335909 - DNA, 508 bp, Cannabis indica
attcttacaatcataataaataataatgacttttcttgattactttattttatacagtatttttcttaaatttttaaaaatttaaacagattatttttttattttttaaaaaactgttcacaatgctttttagtgtaataacatttaaaaatgatacacataatttatttttcttttagttaaaaagttaaaaataaaataagaataatagttacgtggtattaattataagtatggacagattaagagataagcagattaataattaattaaattattaaattattaaggaaggaataagaagattaatttgactatttgagagaaaacaaaacaattatagtgtggtatgttataattaataatattgttgttgaaattgatcaagttgcattatattatataataaaagcatgcatgtgagtagtagtttttccttaaaaaatttatttgtgttatgtaataaattagagtccatcactaaaataattttttttcttcaaatttt

SEQ ID NO: 335910 - DNA, 1521 bp, Cannabis indica
ggtacagttaaatgatcttcgatcgggatttaaaacggcaacgatagtcacggatattgcaaattacattggtaagtttgtttaatcagatgtgaagaacttcttggggttatggagagattatttaggtgttcgttttaccatcaatgttacgagaccacttaagaggcgtatgaagttgcaaaacacagagggtatccaattttgggtgaacttcaagtatgaacaccttcctacattctgtttcatatgtgggataatgggctattctgataaattttgccttcgacgctttgaaggattgttaaaccatatggggaatggacgagggtcaagctagtgcgtaagaatcatacaattggagctaagtggctgaagcaattcaggtggctatggaagatgatactggtaatgatgctaccatggctgtcggactgggttcatcgttcaaaggcaagggaataatcggttacaagtggcggcataaaaatccctaagattgtggaggaaaacatgggccaacaaggagataaatgtggacagttagacagatcaatgcttactagacatatccctataaatgtggagagggatatgttgactgatttaaatcataaaataaatccttaaaatgaggaggattgtttattggtggttgattcaaagagaaggagaatggagttgggcttaatagatgggccgaatgaagtgggggatgaggtggatatgaaccaagttgaggaaagttcaacaaacacatgcttggtgggtgctggtatccaggcccaccgcccattatgaaaatcttatcatggaattgccatgggcttgagaacccatgggctgttcaattccttaaggatcttgtgatccaaaagcaacccagtttaattttcctgtgtgaaactattagtttttgggctcagcttgagagggatcgggtttccttggggtgaaggaatgatggtggtggatgtgcaaggaagaagtggaggtattgcgttactttggaaggttgaagatgaggtttcgatcctaggattctcacttaattatattgatgtaaaagtttcaattgagggtatggcggaatggaggtttatggggttgtatggggaaccaaatagagggcttcgtaactcaagcttaccttagtgcgtaatgggcgatatgaataatgtgtgtgctcatgaggataaaatgggagggaatcggtatcctgatttcttaataaatggatttcaacaagctttgaatgatagtgggttacaagacacggagctttatggttatccttttacttgggaaaggggaaggggtacttcgagttggattgaagtttgtctggacagaggcttagcagatcttgcttggttgcaaatatttagttcgactaaactttacaaccttgagatatcgacatccgatcattcgcccattttgcttgaactttttactactgctgttcagcaacgggtcactcgttttcgctttgaaaaggcatggctacgggaaccactt

SEQ ID NO: 335911 - DNA, 965 bp, Cannabis indica
gactttgctgtagaaaatatctagaaaaccctaggtccagaaacttctgcgattctcctttttcatgtcttcatgcgattttacagtccataatgcttgttttcaaaactgtgtaacgtcagtctttcatcttgcttattctaagcttcatgaacttttttgccctaactcgagaaaatttctgacttcttgagttctgtcttttctttgaacattctcatgctttaatctgttgagtactcctggtaggcatatttgcttgtttaccgttcggtattccgaccaaacactcatcttgtgtgttgtcttttgtagatgaactcaggtgagtcttgggagaacggacatcagatcgaccaggacctgcttcaacttttgcacgaggatcatcctcgtcttcgttctagcccaccttcctctagtgaagtacattctccgaaccttgtacccaaccatagaatgatggctcgtacaaagaaaacaacgcgtctggctgacgcatctgaccctcaacgccgaacaggatccagctatccagatggagggggatcgtgaaggggatgttgaggtccagcagatcgaggggcaggacgatgtacgtcctggcagttcctttaaggcagaggaagaggcagaggttgaagccccaaactatggggagtacaacgaagctggggagccagtcgatgctgacatagacgtcctggttcagggcgtggactacgtgagtgaggaacttgttgttgcgcttcctcatagaaggcaaggtgccttggacgccagatgggtaagccctccgtctagggttacggaggtgcgcctttggtctctcgaccaggacgtatacctaggcgaactggattgttatattcccgcccagctgacgacacaataaacaagaatataaatgtgatatgggtttggatgaatttataaatcaaataaacaagtaaatgataacatga

SEQ ID NO: 335912 - DNA, 785 bp, Cannabis indica
aagaatgcgacattttgcgagttaaggtacctgatccacttccataatagtattaaatttttctaaatagtctatgggattagaggtacctttgtattttaggggttcagataactggaaccccttggggagtcgagcttgtcgcacttctgcactgaagggagaggtcccatgcagtttgtatatgggctttctttgctgctcgagcattttaaggcctgcagaagcataccttgatcgatattcccagctaggggagtattgacttgtgttgtcgcaggcgttgttactactacggcgatgtttgctgggatattaaccctagtagccgcagctggtgtagtaggcggattgatgcgattatttatacccggatcgcccattcggggatcacggggctcttcgacatcacgaggcgcctgggagcgcgctctgaagatagcgttaaggtgatcgcgtagatcgccccaatgaacatgatatcatcctccttgcggtgtttccaccgaagccgatctagtgtacttgctgggtgtgccaccatgcgaggatgaggaggcagattcaatgtcgttatctcacgactgaggtctgctatgtggattgcgtcgttcaaggccttccttagtctttgcctcctgattgaggtgtcttgcggattggtccctcgacgttggttggttcaaactaagtccctctgggttggccctccgttccctacgagtacggttattacatcgtctagagttagttacctgaggattttccgtgcgagtagcgggtac

SEQ ID NO: 335913 - DNA, 1039 bp, Cannabis indica
tttttattatgatagtatatagatgagtacgaaagttgtggtgtggttgagtacaattgagttgttgagagtagtttgttagttttcttgcactagaagtccggtacggtaccgggtttacgggggaccgtgtacgggaaccggtcgacgtggttaactcccgaggaagtcatgcagaagttggaacgttctggttgggaaccggtctaccagttggggtagttttgggaaccctagttttttctgttttttgtcatatttaaggtattgccatgttatttgtcgatagggaaacttttagtttcaagtttaagtccctagatagtgatttagtgtgtcactcaccagttttacgaataatgtgatttaggggcttgtaattcgtcgagcagctgtttcactcaggttggccggcacacctaaatttggtaacgagataagattagtataatggtatgcatatgtatatacatgtttggtgtgcatattagttaagcctgttagattacatcagatatgtatgttggcttttgtactattcgacagtatcacatcggtatgcttagagtatgactagcgtaccgagtataggttgatattatggtcgatagtactgtactacttgacagtatcacatcagtacggctagagtatgactagcgtactgagtataggctgatattatggttaatagtacagtcgtacgaacgttctagactcagcaccatgttggacacggggatagggttatgcttttcttactgagtttgttgactcacagttgctattttcatgtgtaggtaaggccaaggctaaggctaagcagttgtgagagcaagcagatggagattgtacatgttggggcggttaggcttgaagcgtgcgatctttgggacattaggacttttgttgtatagctcaaggtgttgccaaaattattaattactacgcaagtgcacgcaatcaagtagtatactcacgcaagtgaggtcgaaccacagggaattggatcaattactactaaactatacttataatt

SEQ ID NO: 335914 - DNA, 780 bp, Cannabis indica
tatactaatcttacctcaattccgaattcaggtgtgccggtcaacttgagtggaacaatctgctcggcaaattacaggctcctaaatcataataatcagaacactgataagtgacacgctaaatcacttcccaaggacttaaacttgaaactagaagttttcctatcggtaaatagcatggcaataccctaaataacacaaaaatgggaaaaactagggttcccaaatttgccccaaccggtagagcggttccccaatgggaattctggttctgggtggaaatcctagaagccaaccggaattccggttcctactggcctctctgaaccggaattctggttcagtgcaggaatcactaaaaatttcataactcgaccaaatcaatcccaaaccaattcaaacttttcagacctgctaattagaccccaatgaacatttctaaagcaataaaacaaaacttcatgcacaaatacaaaaactagcattgatgagccaagcttgagttcaaaaactccaagcttgctcatccaactaactaccccttaaaacctgcttaaatcactttaaataaacataatataaccacagaaaacatcatttaatcacagcagcaagaacaacaagctaaactaccaccaccattaaaacccaagattgagcttaaaactccaaacttaaatacaatcaactaacaaccattagaaccagcttaattccacatatctaatcacaattaagcttaagaaaacaacataaaacattaacagcagccacaacctc

SEQ ID NO: 335915 - DNA, 934 bp, Cannabis indica
aaactaattgtcatataatataataagttactatttttatttaccaattattttatatactttttttcttactttgaaacttatgtgtttatttttacattatattattttttttaaaatacttttacgttatctttttattttacttttgtaaaaatatttatatcacttttaagtctatttaataaactaataagttacaataaagttaaaaaataattataactaattggtacaattggtaaatatttaaattgctaattagttatttcaaagttatatttttagttacctttcaattttactgtagaaactaattaggttgcatatcgtataacaaataagcataaatatgcaataatttttttaatatactaatatttaaataaactattcgtttatcctttcatatttttttattatgtatattgattaatatatataaaaaaattacaaattactttttttgaataaaaatcataagatctattaattaataaattcgttcaaaacaatagaacgcacttcagaggaacagtcctccaactgaagcacacgacctgtagagaaacaagagtctcttgccaagcaatgagccaacttatttgcagattgttttacaaaacacaaatcaacaaaagataaagccaaaagcaaatttcgaacatcttgaacaataagaccaaactgtgaaggcataaaaataccgctctgaatcgcttggacacacaccaagctatctgtttccaacatgactctatcccacgaatgagttgcaatccaactcaatgcttctttaatgcctattatctcagcaatttcgggaacacatccaatcttccccttcttgaatgcttctaccatagcaccatgatgattctaagctacacaacccatgccaaaagacaagactcgaaccagaaaaaactaaaag

SEQ ID NO: 335916 - DNA, 1077 bp, Cannabis indica
gaaaccgggtaaatcacatgtttaaaaccccaattcgggaaacctgagtctacacttaaggctctgttaaactctctagggattactctatctcaggaaacagggaaacacccaactacggcactgaaatggacagggattgagaaaactggtttttcggggaccctgccaaaattgatttaccggttttacaggtactggtaaaccggtaaacctgtttatacaagttctccccaaaaactcaccaatttgctcaaaacttgtccaattgcctccaaactttccaaagtacctaaacaatgtatacacaacatattctaactagaaaaacacagaaaatcacactgaatcaaaacatgtcgtgcatgaaccaagcttgagttttcaaactcaaacttgtgcatccacaaccccaaaatcctaaaccaacagttagatcatcaaataaacccaatttaaatttagaaaccaaattatacttcacccaaaccttaacagcccttaaatcaccaactagcataatcaaactaaaattcaaagtttcaaattacacaaggttagagttctagagttacctttgattatcaccacttgaattcaacttaacaccaccacaatttcaatctaaagtcccaaatccttggttgttcttgctaggctcgaagaggagtgaggaaaagggagagggttttctaattcttttgattttttctctttatttctcataattaataattcctttttaattcctactcaaaatagccagctgaaactattaaatcgataactgcaaagaccaaaaggaagccacctaatcacctccttaaatgactaaaatgccctttggtgcttaatcttaagcattttcacaactaggggtaaaatgccctttgaaaattaaagacatgagcctattctactatcaggctactaacatacttcctatcaggcttttcttattcataataattaaataaactactaaagcaataaaagcttactgaaccgtagaacgagctaattgctgatgatgattgtaatgtcgtgaagatctttggaagacaacctggcggctct

SEQ ID NO: 335917 - DNA, 1267 bp, Cannabis indica
taggggtggagaatatatggatatgcaattcaaagatcatttgatggaacttggcattgaatctcaattgactgcccctagcactctacaacaaaatggagttgcagaaagaagaaatcgcacgcttttggatatggttaggtccatgcttagctactcgactctacccacgtccttctggggatatgcaattcagatggcgaccgacattttaaatgttgttccatctaaatcagtccctaagacacctttagaattatggaatggtcgtacacctagtttacgccattatagaatctgggggtgccctgctcatgtcttaggaaagaaagatggcaaacttgaaaagcgaattgaagtttgcatgtttgttggaataataataataataatatattattatattatattatatattgaaaacataacagtatacgtatatattataagtttataaactaaacttacgaacgaaatgaaaccctcgtcttccgtcaaaatcctctctcctcctatatttattttctttgatttttaacccaaaacctagcgatctaggttccattagtagcaggacagagaatctttaaagaggatgagcttaaggtaagaattggtttcgttttaagtcgaacacaattggtttatttagtggttttgtgatatagaatagttatgaaggttctgaacttataggattgttctcaggtaatcatggggctagtttcgatgctttcttgttgaaattgaggtgattttgggttagaatttgagtttgaaactttttataacttaagtccgaacactagtggcgttttccaattaagggctcaattttagattctattacgtaagtatggtagtatgtatggtatatatgtgccctatgaagtttggggtggtttggacagtttgtaaactggtcagccggttctggccaaccggtttaccgttttgggcagcctcgggaactcgagaatcgtatttttaccataacttttcactcgggtgtccgtttttgatgttctatatactgtttcgaagattgcaacaagctctaccatattgtgtatgttttagagccaaaatataagttttattttagtctatctaaactacagggtttgagaggaaaccttgttgggttttgtgccctaagtaaaacccatttcaatataatcagatttacttattattaaagatcagaaataacattttatgatgcatggttcccatgatttatttcatgattatatatataatgtat

SEQ ID NO: 335918 - DNA, 1379 bp, Cannabis indica
aggaatcatggcggaacttgccatacttcgaaaagacatcgctcgagtctcccagagacagaaaggcgacgattccgactcagactgtgaggaccgggagccatttgccaagcacatcttggaagcagagctccccaaaaattttaagatgcctaaaatggcagcttataccgggaactctgatctaagcgatcacttatcacggttcaatcgagtcatgacagtcatgagagtcagcaatgacgttaagtgtttgtgcttcccgcttactctaagcgggtccgcggaagaatggttcaagaaattagaaccaggatccgtgggttgctggaataagctgcaaaccaacttccgtagacaatttgtcgccgcgaggaaagtcaacctggaggttagcgacttgactaacatcaagcagctgcctacggagacactcaaaaattacataaagaggttctgagaggaagcctcaaaaaccaagaaagtagatgacggacaacagcttgcccttctccaagcaggcatccgtacagggactccattctggaacgaactacaacaggaaggagcttcaaaccttcaggacttccagaagagagtccaaaattacattaaccttgaagaggcccaaatagtggcctacggaggatattatcccaccggggtagcaggatatgtgcccggagcccatctttccggcactgtgccagcagcagctccacagatgagcggcatacagttttctgccactcccggatatagccaaggccaggccctggcccctgcatcgtcccatttcggaaatccctcggggataaatggacaagccccctcgcactccgctccgacagccagtctagccggtccttcccagggctcgaggagtaaaaggtcctccaaaggcagcactcggacggaggaaaagcgacagaaaagggggtatactccccaatatacccagtacacggagttaaggactcccaagaacgtgtgtactttgctactaggcaaaatacgcactaccggagaccacctcctttgtacaaagacagctcccggagggaccccaacaagagatgcgagtaccataacgacattgggcacaacaccaatgaatgcaaaaatctcaaagacgagatcgaaaacttaatccgattgggacacctctacgagtggatcaagaatcggttgcctcacctcaacccaggtcaggcggctggaactttgccacaagtagcaccagggggtgcagcaggggtattggctccagttgttccccccggagatgctcagcatattcccggcctgccacctagacctaacgggagagtggctatgatctcgggaggaccccacatcggaggaaccacccgcaagga

SEQ ID NO: 335919 - DNA, 847 bp, Cannabis indica
gagcattttcaaagcctgcagaagcatgctttggtcaatcctccagtcgcaggagccggggctgctacgactgcgggactcgcaactactgcggcgagatttgctgggacattgatcccagtggtcgcgatcggcgcggtaggcgggttattataagtgttggcaccctgatcgtccgcatggggatcacggagtgtctcagtattacgtgggacgcgagagcgtgccctaaaaactgcgttgaggtgatcacgcagatcaccccgatgtacctggtaatgtcctccctgttgcgtctgtacagagccggaccttgtgtacctacttggagtacgaccatgcgatgacgaagaggctgattctgcgtcgttgtctcttgatggtcgactgcgaggattacgccgttcagggtcttcatcaacttgtgtgctttggtttggataccttgcggattgatccctcgacgttggatggttcaggtccaaaccttcagggttggttctccgttccctgcgtacacggttagtatgacgtctagaagttgttacctgagggttatcggtgcgaatagcaggaactcgaggagggcgtcgggctcggttttgtccatctacttcggcctgtagcgcgcgcagttgatcctgaatcgcagtatattgatcagtggtgagttggatgattccctcggataccactgccggagtgacagggggaaaatgcatggttgctggtggtgtggatgtgtccccgacttgagggtcagtcgtttctgggaataggttgagaggtctgatattgcttctccctactccgccgttaatgacgtccacaggtggcattccagttc

SEQ ID NO: 335920 - DNA, 604 bp, Cannabis indica
agagtaaccaccatctcaaattgattatgggttggtgtagatataaggattctaatatacacccctatcatcttacatataggtcactttcagagatctttcttaactgtctcttaatattccttgttatattacatcttagatggttcccattcaacagtaggagtcttgttaaattcgtacacaagtgtacacttagccttttactattgattctcaaggacatcttattgtgacatattgtcttagtctgaatctataagttctttctagactaagtcatcaacaaagcaatctattattaacattaatgtaaaatacttgcttaagaataagtaatcattaaagataccataaaatatttcatggggactagggattctgcccaagtcattcgaatagactttgtaaagttctcctgtcttatcctcaaattctgataagttatttctatccatatgaatggttagatttactttctcaattgaattctaaagttcctatcatgatcataacatagtaagctatcacaagtgtcatccaaacaaagatgggcttggaattttaaaattctcccactgagataaggtactgtgatactatg

SEQ ID NO: 335921 - DNA, 599 bp, Cannabis indica
tatgtgtgggcgagtgagactcacacgcgagtgagggacaaagccttcagagttgcctgacgctcataaactgtagcgtcagaacgcagcagtggttgccacgtggcgaattcggacaaagtggattttacatgtagggattcttttctcagcgcaaaacaactgaacaacaacacaaaaacaactagaaaataacttaaccataacatataaatcaattaaatttgtttgcaacatgaaataaactttaaaatattatataaaattaagttatttttatgttgttctaaagttattatgcattgttatacattacaaaaactgttgaacaagtaaaaaaatagagttttacatgttaaaataaaaacttatattatctcttatattaagacatggaaaataataagagaacacgaattatgttgattttgaattaagtgaaaaattgataggaagagttataaatatgaagaaaaattacttatatttagtaataacattattcgttgttttatcgttgttttaaagttgtaaacatgttgtttaatttcgttattttttgagcatgttgctttgacgttgtttgtatgttgagtttc

SEQ ID NO: 335922 - DNA, 690 bp, Cannabis indica
tttttattcagtcaagagtgcttacaagtttcttcaatcgtcaagcggaaattggcttttcactcaagatgataatggctggaaaaaactgtggcaactttcagtgcctcctaaggttctacattttttatggaaagcttgctccgggtgccttccaaccaaggtacaactacaaacaaagcatgtgaatgttgatcttatttgtcctttgtgtaatatggatgttgagactatttttcatgtgttactgggctgcaatttttcgaattcctgctggttttttgctgctgcaacaaacccgactggtgcttttaacgattttgctgcttggtttttcgatctgttggagaacagattggtggaggtggttgttgaggctgctatgctctgttggagcatttggaagacacgaaacgaagtgttgtggcaagggaaaaccaggtctgtaatggaggtggttcagtcggcaaaacgggtccttaaccattggaaaattgctaaatttcagtctcctactgctatgtatgctacgggtgactcttcaattagcaatagatggcgtaaaccagatataaatacggttaaggtaaatgtcgacggggctatttttgaatctcaacaaaaatttgggtatggtttccttgctcgagacagccatggtaaacttttggaagcaatttctgaaagtcg

SEQ ID NO: 335923 - DNA, 898 bp, Cannabis indica
aagaaaatagattctagggcttatttgttaattaagagactttattaagtctaattaataaatatattaaaataaatagtttcggcatttaagtgttgaattggaaaatatggtatttttgagaaaataagataaatagttaaaaaaaaatggcaaaattacaaagtggtagggcccacatccatggccggccacttgtggtgtattttaccatttatttattaattttttattgccaaataattcaaacctaaacctagttggattcctataaataaatagtgatggtctcaaattaaaagatgatgaaaacctaagccttcaatcaaaattttgagccatcttttttatcttattcgaatccttctctttctttctctcttcaattttcgagccttatagcgatagagtacatgcccaaacataacaagttggtactcaatcatagtgtgtaagactataaacaatctaaatcaagtgaaggagaatcgggctcagatcttgatgatactctgctacggaaagatacaagggtaggagatctgagcggaaggagtcatttaattccgctgcaaccaatgtaaagtttctcaaattttatatgtgtttaaattacattattttaaaaaataatatttaggatgttaaacaacatacgtggtagtaaatctagatcttggtaaaacataatccaacaactttcccattgcagctttattccaagctaaaatatatttaaaaccaatgcccttagccgatttaggatggcaaagagactcccaagacactggcccaaacccttggtacatggcatgtcctttccaaagatagtttatgcatatggcctctatgttgggttttatgccctaaataaaacccattacaatctgattagtta

SEQ ID NO: 335924 - DNA, 654 bp, Cannabis indica
ggggatcggacgactgaccagtagtttgggaagtattcatcgtcggatcttagtctactccacccaggggaatgacgttcggtggctgctgacctacagtttggtaggctcttcgtatcagcacggtggcttgccgactacgatcttcaatctctgcatggtgagcccttaatacctccatctctttatctctacattcggcgaacatacgcctttgttcgtcgaacgcgagtttcactgcagcacgcagtttgtcctgatcatgatgcagggtgttgttatgaccttgcatgagtccgagcgcgtcacggagattttttaattcagtagcatctccgatagtcgtctgggcgtttgttccaggcggaacagtcgtattatgaatgctcttgttgggtgcggaactattattcccagtctcttgcacaccaggcgcaattccatcaataggagctatttcaccattccccacgcttgccggctgtccaggattaacagcaggaggaactcttgtgcttcttgggtttcgcaatgtaggattcagcgtctgtgaattcgccggatcagtcaggcctctacgagtttgcaccatcgtattggcggttggatgttgaacaaagagcgatttgtgatcttgctctcaatgaaagcacc

SEQ ID NO: 335925 - DNA, 462 bp, Cannabis indica
gacatttgtagtgttcggataatattgatataacgattgtaattgtgctaattgtaataaacgaatataagtaattaaagtagtaatttattgaattgttttcattttgaaaatgtatttatgataaaaaaaattataaaaaaatgtatttatatgtagtagtgtttgaataattttataaaaaaaaattgtaaataatatttgtaatttttgtagtacactcattttagaagacacactcctatatatttttaaatttaaaaaaaaaaaaaatagtataatttttttattcataattaggtatgttgtagtagtatagaattatttgtaaatttttgaaaaatttataatatatagtgccgaaaataaagtttaaacaattacttactatacacataaaaaaaaattagttgtgcaacaaaatatgtaaaccttaattttgatattgtacacatacaaaat

SEQ ID NO: 335926 - DNA, 1862 bp, Cannabis indica
tgcaagggcatcagcgtcccttgctggccgtgagcccccgaccaggcgcacatccccttatcagggtttgtggcacgattgcgtgggcgggaatgtagcagtccagctcgcccaggtatcaatcctggtcgagagtgcggaggcgtgcctccgaaatcttagacggaggacttacccacctggcgcccaaggcaccctgcctcctgtgaggaatcgcctcagcaagctcctcactgatgtagtctacgccctcaaccaggatgtctccgtcagcattgaccggttgcccagccttattgtactccccgaagttacggggttcgacctcttcgtctccctctgcagcgggaggactactctgacgcacctcgtccaactcctcaacctcctggacttcagcgtccccctcacggtcctcctccatcgggactgccaaatcctgttcggcgtcgggcaaagtggcgagccgagccactagagggtcagaagcgtcaaccagacgcgtggttttcttcgtacgagccatcatcctatggctgagtatggagtcagaagaatttccttcgctagaaggagagttagcacgaagacgagggtggacttcgtgcagaagttgaagcagctcctggtcgatctaatgctcgggctcccaagactcacctgggttcatctacaaaagacaacacacaagatgagtgttggacggagtatcaaacgaaaaacaaacaaatatgccgaccaggagtacccaacaggataaaagaacgaccatgttcaaaagaaaagtctaaactcaagaagtcagaaagttttcttgagttagggcaaaaacgtccatgaagcttggaataagcaaggtggaaaatagacacaatgcagttctaaaataagccctacggctgaaagctaacataaggacatggaaaagaagagtcgcagaagtttcaaaccctagggattcctaagcgttctttcagcaacatagttacattcaaagcgtaaacatgcaaaggaaagcataaagggaatcagaaacttactcaaagattcgagtgtccgggttcaagcaagccagcaatcgtctgtaggcacttcaacaactctgaagccagaaaacactctttttttgctctggagtttacttagcaacgaaaggtgataaaaatgggtaatgtgccagtactctgagtatttataggcaaaagggtaactgtacataaaggaaccctagatgcctcagcttcccacctcaaaagcgaatatgggaaatcaaaagtaattgagtgcaaccgtcagccgtggagagagaaattcggattttcaaaatattatttgttagagcattaattaggcgaaaaccgaagggccgcccagtcagcttcacatcaagtctcgaacggtcatgctcgacacgtgtccccatccaaaggcagagccaactcggaataagtctacacgcaacctcggaggtcccgtacagatttgggggcaaatgttatcccaaatttggcactctgacgtgcatcacgagaatggtgacacgtggactctacttggagcatctgtgcggatcaatatgccgagcaggatgcctcgcaggcatattcagaatggaacacttaacgagccgtgcagaatgatccacacttagcgaattcagcttaacgcatcatgagtcaccagctcaatccctacaactcagggatcaatttacgtggatgtggcatacacacgatcccattatcagtgtattcagcctcaatcccacaatccttgcattcagcattgatcacacgatctttctatttatgtgcattgtaacgagagaggaaactcttcctcctcaagtttccagccctata

SEQ ID NO: 335927 - DNA, 647 bp, Cannabis indica
ttttggaaatggttaggtccatgcttagttactcaactctacctacgtccttctggggatatgcaattcagatggcaaccgacattttaaatgttgttccatctaaatcaatccctaagacacctttagaactatggaatggtcgtacacctagtttacgccattatagaatctgggggtgccctgctcatgtcttaagaaagaaagatggcaaacttgaaaagcgaactgaagtttgcatgtttgttggaaattctaaagagactaggggtggactattttatagtcgcaaggatgatagagcgtttgtttccacaaattctactatccttgaagatgactatattaagaatttcaaaccagaaaggaaacgctcaagtagaggacagtcccacttcctcgattgaacttttacaagttgatacaaccgagagaactaccactcaagttcctgttcagaagatcaccgctcctcgttgtagtgggaggatttctactaaaccatctcgttatggcttggatggtgaaatcaatatggtcattggtgacggtattaatgatgacccattaacctataaataggcaatgtcaagtccagaacggaaacgttggtcagccagcatggattcagaaatggattccatgaa

SEQ ID NO: 335928 - DNA, 628 bp, Cannabis indica
aataataagacacaaggattttatagaggttcagttctgatcaattcagtaatagactaatcctcgttacttgtattgacttaagatcaaggagaaagataccttttcttatagctcttacaacagtatctctgaatatattattcttagataatagtatagtcttagctcaacttcttttcgaccgatctcttgcccattgaacatgtatcactatttatagggcaagtaaacagaaagattgtgggatcaatgctaaatacaaggatcgtgggattgaggctgaattcgctaagtgttggttgatctacgcggattgctgaatactttgctctgagcgtgccagcgatatgtcgtgctcggaccactcttctcgagcagatattccaagtggattccacgtgtcaccattaatgtgataccacgtcagagtgcaaaagttgggataacaatttgaattgcactttttcttttatattagtgcaagtaggagtttgttgggttttgtgccctaaataaaacccatttcaatataatcagatttactaattaatataagatcagaaattgcttttatattgcatggttcacgtgatttatttcatgattatgtttaatgtataaattc

SEQ ID NO: 335929 - DNA, 881 bp, Cannabis indica
tgttgatgctgaaaagtggccaacaccagctcgctagattggggagatgaataatgagtttaagtacataatttatagaggcacacaaaatgtgtagtagttcactccctgtattggtaatggagttatgtcaactttgagtttttatttctcacaagaattataagaaaattgactaagtctgaaagctctaatagaaaaactagagatagatactctgaccttgtgggtacttttgtaaatatgaaaaatgagctaaaggagctctccttttataagaaaagagatcatattaaaataataataaaataatctaaaaaatatagaaaaatacatttaggctatttctaatcattgatgatgacctaacagtgaaattaacttcggatgttggtcgtcaattttcagagcttaaatcgtgtccgcaagactcgcttcgggtaaattgtagcttaaatttgtaactcctttaagggtaaaattagaagtcaataacttcaaaaattactattaaaatgtgagacatgacttgatagaacattaaagtagcttcgaaatgcaatttgaattgcatcaatcagataaatatagagagagttatgactgttttacagaaagttgttttaggcccaccacccaggttgacatgtgacgtcaacctggatgctaggtgagtaggaaaacatgccgaggttgtattttttgatgcctaagtgatatttgaacatcacttagccaatttctgtgttatagtaaagtcaattaccaatttttgaagatgctgctattttgcaaaaatgagagactcgaaacttttcaatatttgaataagtcactttgtcgaaaaagtgaaaatataaagttgtaaatttgactcttct

SEQ ID NO: 335930 - DNA, 562 bp, Cannabis indica
attctctacttgcttcataaaatgcaagtattcattgtgttcatcatctttggggatttcttggtgcaacaaagcttttcttttacaagtaagtgttttctcttcactaaagtatggtgatttaagagtaattcattatggattgtgtgatattggaaaattattgtttgtggagaatggatattggttatttctattggtagaaattattgggagtgagtttttacttcaaaacttagtttggggaaagagaaaaatataggggaggtgctgcccaatttttttacaccaaaaaaaaggtataagaattctggctagttgattggtatggcaactaaaagaaccaaaacccaagccaaccgcaacatgcaagattcatcatcacatactcctaatccccaataagatcaatctcaacagctcactaggtttgtgaatcacctagctgcgaaacgatacgagaaattaataaagaggagtgtaattcgaaagaggagttttgaatttcaagatgcaccttttgagcgggaccaagggtatgaactcatcagaggagagattg

SEQ ID NO: 335931 - DNA, 855 bp, Cannabis indica
aaacatcagaactagtcccatgactacccgacaacaatcctttaaggccggaaccttcataactattctaattcacaaaatctcgatacgaaactaattgtttttaaacttaaaacgaaataaaaccataccttaagcttttcctcttcaaggatttgctatcctgttactaccggagcttagatcgctaagttttggattgaaaatcaaggaaaatagatatagaaggagaaggttttatcgaatgaaggaaaacgaaggttcgttcatttgttccttcgttcttctctactattataacttaaaacttaatatatatatatatatatattaaaacttaatatatatttgttccttcgttcttctctactattattatatatgtatatatataataataataataatataatattaataatgatatattaataataatataatattaataataatattaataaaaattttattattaatagttatcttattattttttagccactaagaaatctctatttttagagtatttggccaacttcgagtaccctaaaatactccgatatttctaaaatcaacttattttaataatcccatcaatatttctaaataaaactgttatgacatttttggcatccaattgggtctccagggtcggcgaacatgaaaatatttttatttcacaactaactcatattatatccacatatttcaaataaatctccataattaacaaatcacgcttatatatccacttatcgagtcttcaaggtccccgaacctgaaaatatttttattctgcatatagctcatattacattcacacatgctatataaatctccgtaattaacaaa

SEQ ID NO: 335932 - DNA, 550 bp, Cannabis indica
ttaaaacaataataagttttgctagaaaagttatcagccctggaaaagtcactagtgtcggaaaagttaccaaaaagtcattgtccccggaaaagtcaccgttgccggaaaaagtcaccacaatagtcactgaaaaagtcatcagaagtagatgtctcagatataaacaaaaatagaactggttttataacataatgaataaaaataaataatacaaaataactcaaatcggttataattgaaatataatcggttgtgtaacataatgaataaataacacaaaataactcaaaccagttaaaactaaaaatagaaccggttctataatagtgttataatgcaataaaaataaataatacgaaataactcaaaccggttataactcaaatagaaacggttatttaacataatgaatgagtattttggggtagatatgatatgagtgtaattatttggtgggttggagcatgttgaatgggtgattttatttgagttattttatttaactgatttttgtgtgtgagtttttatcttagtggctttacggaac

SEQ ID NO: 335933 - DNA, 546 bp, Cannabis indica
ttcaaaatttgaatacctcgattatcccccaaaactgtacgttaagaactcaattacttgaatggtaccatcaaaacgtgctaatttttaggcgtggttcgatgcgtctgtcagtctgcattaatgagctgaaaattgaagagatccttggtcagagtcacgtcggatcatcaagggacacttcgaacacgtgccacccgttcagataaggatccagaccgagtgaagtccacgtgcaaccataaaggtcccgcgcagacttgtggggcaaatgttatcccatttttcgcactatgacgtggcagcacgtgcgagtggcacatgtccaacattctttgcatctgggcggagatgaatatcccaaaaagatttcaagtagcacatctgcacgtataacgtctatttgcccaagcagggtaaatggcagactacccaagcagaggcaagtgtagccttccgaactacttaccaggacttaactactacaaaatgatatcgtgaagtccaagcatgaagatagtgttggaatttattttaccaggatct

SEQ ID NO: 335934 - DNA, 545 bp, Cannabis indica
tgaaaaagtacttgagacttttgtggtcggtatagatttcacattgctctctgtataagtagtgtcgccaaattttcaaggcaaacaccattgctacaagttccaaatcattagttggatagcgctgctcataatcttttaatagccgtgaagcataagctataactttatctacttgcatcaacacgcagcctaaaccctatctagaagcatcacagtacactacatataaaccgctgattctttctagtcaattaagataatggcattgcaatttttgaaaatccttctacaaaccgtcgatagtaacctgccaaaccgagaaaactttgcacttcagtaactgttttcggtctaggccaattcttcactgcttcaacctttcctaggtgcaccataattccacctttcccaaaaatatgtcccagaaaagatacttgggacagccaaaactcacacttcttgaatttcgcatagagtttgtgatctctgagttgttgcagaaccatacgaagatgttgttcatgttttgcttccgaccgaga

SEQ ID NO: 335935 - DNA, 472 bp, Cannabis indica
gtaaaataatttccaacagtgatttaggttactctattgattgttatgtaatttttcgttaaactataaaaaaactactttaaaatgtaaaaattaaaaactcatttttttaatctcttgaaaaattattaatattttttttgaagaatataggtgatgtttggtaacaattttgttttaaaatttttaattatacaaatgaaagtaaaaaatttattttgctataaccatttttatatttcaattttaaaaacagaaaaataaaaatgtgttttacaaatttaatattcatttttatttgttgaatttacttaagttgggtctgggtccgagtctaagtcaaagggttgtgtccaggtctagggctggggtctgagttcgaggctagggtcagggtcctaatttctaggttggggtaggagtctaaaatattaattaagaaaaaattgtttgctctaattcaacctgatgc

SEQ ID NO: 335936 - DNA, 549 bp, Cannabis indica
tacaactaaagaatcattaaaacgattattattgatgcaattttatagtgagttttgaatactaaaaaagaatgttaagaaaattacattaaaacatcaaagtataagaataacaatgaacatgactaatgttatttaaaacacgagatatgtatttattgttcatcattctctgcagataatgataggaattaaattcatttaattttaaagagtgttcatactctatatgttagtcatgttattatacatatgtattgttattacttacaatatttagaaattattacatgtgacatatattaaaaatcaaattttgcatacatcttgaagattatacaaaaattatattcatatattctttgaaatattgtaaaataaattgttgaataatttcttatatttttattgatgaattaataagtttttaagaaatttataataatattctactcgtccaacgtcattccctgaagtgaatgcaataatttgaaataatcattggtattatttactactcaaatatttccaaaagaaattggaaacaac

SEQ ID NO: 335937 - DNA, 545 bp, Cannabis indica
atataatttctgacctgtaaataggcacccatacacctacttacaaggcttaacagatgagtaagaatgttccgtaccagggtatagccactataccacatacactacgtacctccttgtacgagtgttggtagggtttgtttcataccctgagtacccctgagtgatgtaccacgcatactcaatacctcatcgtacttatgctggtatcacggtactctcagacgacaatcactataccaatacactctatatcttaaccgtataactgttggtagtgcaactaacattttaagcatatacacataacatatatatacattcagttattgataacacacattatattcagttcttaccttatttccgaattcaagtgtgctggccgacttgaacggaaatcttgtgctagatggatgccctaatcacattttaaaactgggtaagttacatgattaaaaccctaatcccgggaaacccaaaaccttaaccctaggttctgttatgctttgtataggttattctaactctggaaatggggaaac

SEQ ID NO: 335938 - DNA, 579 bp, Cannabis indica
gtttctatttttattaattagtaagttacagtacacaataatctatttttcgttgctatagtaaaatacatctagaatatgtatatagtctagtttttgtataggaaatagtatatatatatatatatatatatatatagtcaattgagtagttatctatttcaaaataaaaaaattgaagtagttggaatattatgaacaatgaaatgtataggttttgttgaaaaatatttgagcacatcgttaggttttgcttaaaaagtaagtaagtgtaattaaaaggtcggtactgtaattatatgattacgttttggatataattaaaatggtaattatatataaattattatttgttgtttgataaaatagtaagtaatgacaatttacacataaaattaatgttgtttaaatttactatttaaattgaacgatttttttaagttccacgatacatattcaattctcgaattgaagagtgtaagtacaccttaaattaactatatatatataggataacacttggggtggtaaatattatacaatattttaaaaataaaaatataagtgcatgtttggcat

SEQ ID NO: 335939 - DNA, 863 bp, Cannabis indica
atgtgtgataattatttcctttaaatttaaaatatattaataaaattaaaattaaaaaaaaacgatgaaaaaaaaaatctcacatgcatgggattatttatgtcaccctgctggatgggatacataatcccagacagatgaggttagctggattagttatctagacttctaacatgtccaaacactggattggacaaattagcctgtctacaccaatccagtcctacgtaccaaacgggccccttgtggtttatgttgcattgctgtaaacaaagttgaactgtcaaaaaggatagatgatgttggctcctagcaactcctcattgaatgtgagaaaggcactcggttcgcttttgcagcaggtttagctgcttgagggaccccaaaaacattccaaaaactcaaatcccacattattgtattgtcgaaacttattctttttttttcatatttatttttaagccttatggtatttttgacaagaattactcacagtgatggactcacttatattaatgtgggggctatagcccccactaacaaaaacattaccttttaaaaaattaaatgtaatttttaaatttgataattataagttaaaatagtagaaaaacccccacaaaattaaataaatctaataagagtgattatagtataagtataaatattttttaatgataaataagcccccacaaagtaaaaattctgggtccgtcactgattgctcaagctttattgtatttgtgatagtttaattatttggtgatagtctaaactgcaaaaactgcaccgcaccgcactattttttgcagtgcaatttttgcggttttttagtttcgcggtgcgggtgcagtttgggaaat

SEQ ID NO: 335940 - DNA, 669 bp, Cannabis indica
gacaattgtacatgtttatcatgcaatgcgcaatcagagaggtatttcacgacaattcgagacattgagtgacatgttttcgatatacaatgagatgaaatgctaaatagtacacctaatctcgcgacatttgtcgacatttaccgatattgttctcgacatactaacatcaatattgttggaaaggtgggataataaatgtaaaaaattaattagcattaaatgtccaattgtatacgtgtttgtcatgcaatgttcaatgagggagacaatttgtgatatttcgcgacatgtagcgatatatgatgcgatgaattactacatatagaatcataactagtttcttctcttcttgtgacatttatcgatgtttatcgatattgtttgcgatgtatggggaatatgatttgtaatcaattttatatcgaaatatttgcgacaactgtaacgtccccgcttcaagcctccattgggcccttacacccacggaatgactggctcttatacacgagcacgccactctggctgctccatggaatgacgactgaccctacagaccaacacgagtgtttccagcgtgctttgtcctcactcacacgcttcctgggaaaacttcccagaggtcacccatcctgaaattgccccaggccaagcacgcttaactatgga

SEQ ID NO: 335941 - DNA, 511 bp, Cannabis indica
gattgggttgcacaacaaaacgaggctaacggctcaacttgggtgactagggaaaaattgatttataggaaaggttagaaaggctcaatcgtccaaagatggcctaaatcatttctatgggacaagtctagctaggatttctcttcaaggagatgcactaaccaattctagatgcgaaaattacatgggaagtgatcgtatgagaaatgcaaagcatggtggaaaaataaaagtataaactagtaaggagagactaaagagaaacatccatgaaatccaacaattcaacatgcaaaggcaacaagtaatattaggcagcaacaataatggaatgagcggaaaatatcatcatggagcagaacactaggccactgaaaaaactcataaatctctcaacgtcaaactaacaactacataaacaacatacaatgaaagttccaagcacaaagacaacacacactagcacaatacaaactaaaaaacaaacaacataacagaaaataataaaata

SEQ ID NO: 335942 - DNA, 594 bp, Cannabis indica
tcatatttctttccacttcgcagggtgattgccttgtaattttctttaggattcacttcggctgtactaggcaagttaccatgaggacgagctgctgtctgagtttccagttgccccatctgagtttgtaagtctttaatggaagatctcgtctctgtcatgaattgcaataataaatctgtctgaagactagaatttgcactagagctttgttgctgagtctgttgttggttctgtgactagttctgatttctctgttgatagaacgcactatttcttcgatttcctccttgattaaacccatagttgttgttgttttgagagtaatttccaatggcttttgcttcatccattggcaaattattcacatcttcctgatattctgcatagggatgaggacctccacatagctcacagaccacttgagcttgttttacttgaacagacatcagttttgttagggttcctacctgagctgtcaacttggtaatagcatccacttaaataggaatatttaatgacaaatttaaattaagctccaaaaagaatctagatggttataattctatatttaattaaatacaagaaaataca

SEQ ID NO: 335943 - DNA, 347 bp, Cannabis indica
aatgggaattggccagggaatgggaatgggaataggaatgggaatgggcgggaatgggatgaaaacgggaattggaatgggaatgcgaatgtgaatgcgaatggggtgggaatggggtttggaatgggaatgggtatgggaatgagaatgggaatatgaatgggaagggggataggaatgggaatgggaatgcgaatgcaaatgggaatggggcggggaatgggccgggaaataggaatgggaattgggttttggggtttatgacatgtttactatacagtattcggaatcagaataaattaatgagaaatgtaatggaataataaaaataatcgaaatcaatattt

SEQ ID NO: 335944 - DNA, 945 bp, Cannabis indica
aaaataaaagataatttcgattataataagaatccaacgatgtccggttaaggcaagagtcaaagtgattcttattttataaaattcatcattgtttcatattgtaaacactagtctaagttgtcatcttttgatgtacaactagatgttgcatttataaatacttatatgtcaagatctaacactgttatgtttgtctaacggatgacaatcctttggaaattatcccatcaaaacaactaattaagttagaccaacaatgataattcaaaatttatactacaacataaataacagaaaataacatgattcaatataaattcatacacattcagaaattattaagcatttaacaagtaacaaagacatgtgaaaatacaaaaactatcatatcttaaataatttccaaggtttccaaccaactgatacagtatcccggtaggcgagagtcaaagatatcatcagttgaatagagtagtcagctcatctaaaatggacaccattctagcaaccttttatttgatcaaaataagaattcaacgttgtcccggtaggcgagagtcaaggttattcttattttatgagcttcttgtttcatactttgtaaatttatttctaagtagtcaccgtaggggagagtctaataaagacgaaaacttacaatatacttatcttttgagatctttacggtgttaaatgttcattgtaagaccatccataaggaagacgaagtctagcatctcgaggtcccattgaaatatcaatcatgcaagaccaacaatagtgatcgaatatccttataactaaagctcattactttaaggagttgttgttgggttttatgccctaaataaaactccatttcaatgtaatccagattatacaatatcaataaagaaacagaagtatttttcattcatttgtgtatgttttggttcaccttat

SEQ ID NO: 335945 - DNA, 706 bp, Cannabis indica
gttatgcaactccaatctgattccatcttttgttgatgtaagtcatacaaccattcgtactctaactcaggagcatttgattgaacaagcgatcgctcggaggtttgaagggatgcaagcaatgatccaacgtatcctaggggttccaaaaccaataaagaaaagtccgcctagcagttttgctgactcaccctttgttttgatgccatttcattggtcgagatgccaaagaagtttgtgttcctgttaatgcggatgtacgacggaacaactggtccaaatgatcatatagctagttataagcaaaggatgttcactaccgccatccctcgcgagttgcgcgaggcatgcatgtgtaaggggtttgggtctagcttggctggcctagccctgcaatggtatatgaatttacccaataattttatttcttcttttgctcaattaatggatgtttttgtagaacaatttgcgagtagcaggaaattggagaaactctcaaatgacctataccgtatcaaacaaaggagaggcaaatccttacaagactatgtggcaagattcaatgttgaaaaagtttccatcacagcatgcaacgtggaaaaaaccattaccgccttccgtaaaggcctgctggaagaatctgacctatacaaagaactaacaaaatatccatgcaggacaatggaggacgtgcttgccaaagctt

SEQ ID NO: 335946 - DNA, 612 bp, Cannabis indica
ttggtttgtgtggttcaggagtttagaaatgcctcctagaaggtcagttagagtgggtcgaggtcgaggtcgaggtcgaggccaaggccaaggccgagatagaggccgagatgatggagggatcaatgaaccacctcaagcaccacagggatgggaagagcgccttgccgcactggaaggaatcattcataggcaggatgaagaacttcgtcagctgagacgtcaaccggagccgccagtccaaataaggcaggatgcagaaaatagagacccaccagctgcagtggtatatcctgctacagaggctagacatgagttgttagcagagagatttcgaaaacaacacccacctgagtttgagggaggcatagacccggtagtggctgaggagtggataagtcgcatagaaagcattttgcagatgctaagggtcgatgggaatgaccgagtgaagtgtgcatcttacatgctgaggaaagatgctcgtatctggtgggaggtggtggaacaaacaaaggatgtagataccatgaactgggatgatttcaaaagggtctttaatgagaagtattataactcagcagttctagcagcaaaggtcgatgaatttac

SEQ ID NO: 335947 - DNA, 1131 bp, Cannabis indica
aagttggccaaggcttcgccttttattgctgttcgggggtagaaggtgatttcttactgacctaactctactgcccacttgagtaaccatccagaaacatctggcttttgtagtatttgtcgtagtggctggtcggtatatacccgaacaggatgagcatggaagtaaggcctcaacttccttgttgctagaatgaggcagtaggcgagtttttctattaacgaatatcggccctcggcctcagtgagtcttttactaatgtaatagactgggtgttgtacgctgttctcttctctgatcagcacggcactcacgacatgttccgtgacagctaggtatattccagttcctcgccgtctagaggtttaaaaagtacgggaggtgttgcaagttgtgcctttagctcttggaaagctctttcacattcttctgtccactcgaactgtttatttcttcgcaggatgttgaagaatgggacacatttgtctattcattttgacactaatttgcagagtgcggtgatccgtccagttaagctttacacttcaagctttacacttctttggtttttgttggcgagttcatatccaagagggcttgaatcttttctggattggcttcaattcctcgggcattgacgatgaagcctagaaactttcctgagctgactccaaaggaacactttaagggatttagtttcatgttgtattttctaaggactttgaagcatttgcctaggtcgtctatgtgccccccatcctttttggatttgacgagcatgtcatccacgtacacttccatatttcgcccgatctggtcttttaacattttgtttaccaatctttggtacgtagctccagtgttttttataccaaacggcatgacattgtagcaatagagacacatatctattcggaaacttgtatgttcttggtctggtggatgcattttgatttgattgtagcctgaataagcatccatgaagcttaatatttcatgccctgctgttgcgtctacgagctgatcgattcttggaagtggaagacagtctttagggcatgctttgttgtggtctgtgaaaacaatacatactcgccatttcttgtttggcttgggcactagtacgggatt

SEQ ID NO: 335948 - DNA, 719 bp, Cannabis indica
agaatagccatcaacttttggcactggacactcgacaagctagagataagatctctttccattgaaggttcctcagcctttccttcatcagctcctgaaaatttgactcctgctggttttccagcatttccttttgcatcacggttaggaaatttcccatggtacttatgtccaggaggatatccattcagcttgtaacatctctcaatcgagtgaccattcattccacaatgagtacagttgtacttagatctgaaaggttgaacagctccagcaaattgtccattgccacctgatgctcctttatcaatatcagtggaattgctgaatccactagtcaggtttctctgtctttcttcttgtacaacagcagcatacgccttgttaacacttggaagaggatcacgcattagaatctgtgatctaaccaagctgtacgagtcatttaatccaaccagaaattcaagcaacctgtcctcttcttgatactcttgtatcaccttcattgcgccacaagaacaaacaggttgtggacgaaactctcttatttgatcccaaagagacttcaagcgagtatagtaggttgtaacagaattagatccttgagtaagactttgcatcatcttcttcacttcgaagatgcaaggagcgttcttctcattgaatcgttcgtgcagctcagcccaaatttcagctgcgttatcatgatacatgatgct

SEQ ID NO: 335949 - DNA, 586 bp, Cannabis indica
tcacacttatcgtccatataaaatgctgattctttcttgtgagctcggttagtggtgttgaaattttagaaaacccttctacgaatagacgataatatccagccagacccaagaagcttctaacttatgtcactgttttcgatcttggccaatccctgacagattctatctttcccagatccaccttgatcccatctttgctaacaatgtgtccaagaaaagacacctgagacaaccaaaattcgcacttcttgaatttggcatataacttatgttctcgaagtcgctgcaaaaccatctgaagatgttgctcatcctcttcttctgactgagagtacacaagaatgttttcgataaatacaataacacaaatatcgaggaaatccttgaaaaccctattcatcaaatccataaaacttgtaggagcattgttcagtccaaaagacataactagaaattcgtaatgtccatacctagtgcggaaagctatctttgggatatcttcctctcggattcacaactaatgatagcccgatcggagatcgatctttgaaaagacagtcttcccctgaagttgatcaaaaag

SEQ ID NO: 335950 - DNA, 804 bp, Cannabis indica
aaccatgcaacattaaatgttatttctgatctatattaataagcaaatctgattatattgaaatgagttttatttagggcatgaaacccaacatttaatcccaacaattccaccagactagactaacttgatctttgatccaaaagaaatgagtgaggacattaaatttcttgaatgctcaacaagtttagacaatgcctaaacttgtctctagttacacttttagtgaaaatatctgtagggttatcatgtgtgcttaatttcttcacttacaccaactttgatgacacaatatcccttatgaagtgtaacttgatatcaatgtgctttgatctctcatgaaacattagatttttcatgaggtgcaaagcactatcacaataaactgtgatatcctcagatttgaaacctaacccattaagccatattccctctttgatggcttttgtagcagccatgtattcagcttctgttgatgaaaaggctactactttctgtaggttagatttctagctgatgcagcccctaagagcagtgaacaaaaactatgttaggctccttctagtgtctaggtttgctgtaaaatttgagtccatataaccagtgatttcttacttaaactggttctctttactgaacataattctagtgtttagaataccttacaggtaccttattatccatttcagtgcttcccaatgtttggagccacaatctgaaatgtgcctattgaccacactcatagcacgagttaagtcaggtctagaacacaccatagagtacatgagactcccaacacaactt

SEQ ID NO: 335951 - DNA, 775 bp, Cannabis indica
ttaatgcatacacaagtgtgcatttaacctcttactattggtacttaggatatcttgttgtgacattttatattagtctgaaacaataagttccttctatactaagtcatcaacatagcattctagtattaacattaatgtaaaatacttacttaagattaagtgatcactatatataccataaaagatttcataaggactaggaattgtgcttaagtctttcgaataaacattgcaaaatttcctatcttgtccttaaaattctgataagttattactatccatctgaatggtgttagattaacttttcttagtttttaaaattcctttcttgaacatatcatagtaggttaatcactagcgtcttccaaatactaaagggttagaattttaaattcttcccactaagataaggtactgtgattctatgtccatggacttcactggtatctatttactattactttagtaacatgtttattggaacacttatttacatgactaagaataacttctactaatttgctagttagtttattatattatatctacgtctaaccaaaatatgtgtgatgtagagattccttagtgttatgaatataatctggagttcaatgtaaaagttgtttgaactttatatatcaataacttcttccatccctatctattatagagattctgtggagttataaatatagtataaagttcaatgtaaaagatctttgagctgcatatatcaataacttcttccacccctatcagatcaaaagatctt

SEQ ID NO: 335952 - DNA, 572 bp, Cannabis indica
gtatccaacaaatgctcatccggtggcgccaggggattaaacgtcaaagaaggcctctatttcttcttcatctccgtgtagtcacgaaaccatatagggggatttctcttcctcttcccacactcaacccctgcaagccgtgcctctatcgccaaaatttcaccccgggactcgctgtcatctatagaaataacacatgcaccgataggagtagctagagctccctcataaggatcatacctatcaggaaagacctcatcatcttgtagtgggggtgatgaagttggtagtgggggtgatgcagctggtagtggggtatatggatctgctggggcctccagtgctgaagctgttgttggcgaacgatgcaacatggccaatatatttctaagctgctcaataattacgttatgaccagtcagctctacatggttggtctcatatgccatcttcaactcggcatgacaagcgtacatacccttctggtcagcctcgatcctacccaacctccccactaattcactgtactcggcaccacgaaggcctgatgaagatggtgcactgggctgagg

SEQ ID NO: 335953 - DNA, 738 bp, Cannabis indica
cacttttggggttaagtcagggaagtttttgggcttcattgtcagtcagagagggattgaggcaaatccagaaaaaattcaggccctcctgaacatgccatccccgaagaaacacaaagacgtgcagagcctaaccggaaaggttgcggctctgagccgttttatctcccggtctacagataagtgcattcccttcttcaacatcttgaagaagtgtcagaagtttgaatggtctgacgagtgcgaggaggcattcaaaaaactaaaggagcacatggccaagcctcccatcctgtcaaagcccgttctcggagaggaattgtttctgtactcggccgtctctgagcacgcggtcagtgcagccttagtccgggaagaggagaaaactcagcatcccgtgtactatgtcagcaagcgcatgataggtgcggagacgcgataccccgtcattgaaaaattggtcttttgcctcctaatggcctcgaggaagttgagaccctacttccaagctcacccaatcaaggtgttgaccaatcacccactccggcaagtcctacaaaagccaaaggcgtccggaaggctcctcaaatgggcaatggagttaagtcaattcgacttacactatgtaccccgtatttccataaaggagcaaccgctagcagacttcatcaccgaatgtaatgaagccgaagcaaccgcgaacataccggcaccatcggtcccagcatggaaagtatt

SEQ ID NO: 335954 - DNA, 1028 bp, Cannabis indica
taattattttgttcctctcgcagaactcagtgaacaagtcgccatcaaattgagttccgttatcggatactatattcttgggaattataaacctacagacaatgttcttgacaatgaagttgaggactttcttgcaggttatgtaaacaagaggctcagcctcagtccatttagtgaagaagtcaactgctaccactgcgtacttggatcctcttctcccggtgggtaatgccctgattagatcaatcctccatatagcaaatggataaggtgaggccatcatccttacatccgttggcggcacgtgaggtatatgtgagaacctctgacacttatcacattttttgacaaactcatgggtgtccttattgatcattggccagtaatatcctagtctaatgatctttttagataggctctgccaacctgcatgatccccacaaaatccttcatcaatttctctgatgatttcgtttgctgctgtagagagaacacaccgaagtagacacatcgaataacctttttttgtatagtgatccttcaattatcttgtgtcgaggcactgagtataagagtttttgtgcctcgtttttgtcagttggaagttgcctgtcgagtacagagttgattataggagtcatccatgtaggagagttgtctacgtcttccttttcacatatatttgtctcgcttagcatctccattggaaccaagtttaattcatccaaatcattttgggaggccatttttgccagggcatcaatgttagagttttgttctcttggaatttgctcgattttaaagtcatcgaatctttccaagttcttctgaaccttctctaaatacttagccattttcagatcctaagcctggcattcgccacaaacctggtttacaaacagctgtgagtcactatgacagatgagattttttactttcaacacctcggttatgttaggttttgttccctaaataaaatcctttacaatctgattagttatcaatataagaaatttgaagtgatttat

SEQ ID NO: 335955 - DNA, 1319 bp, Cannabis indica
gaatctccatctatgtgtgggcctccaatgaagacttgtacatgtccttctactagtggaggtagcatgtcttagttgaatcaccccgctgattctgatcggtcttgacatacttctgtatatgcaggttatttttccttatcaggaatcctatttctctcttcagattatttcactcgttgattttgcggtcgtaatctccatgaaatcgagagaacctagtcatgtctctcttgctgacatcttttttcatcggtgcgagctttttgtatggggctagcgactgagttgccatgtaaaaactttctatgtcttctatcatgattgtaaatgcagtatacttggtaggattctccccgggagcttgttcgaattttccaatgaactttccctttttcccattaccatgcctgttattgttgctggaacgttttccatttgaacttgaattgcttgggtaatgggggagttggacggatgtcctatttgaatgagcttttgacttgccaggtttttgttcgccttctgattgctgaatggcctcttcgaatttgataaaaccttctgcacggtcaagaaaatcactaatcgagtctaccggactgttattccttatgtccttccaaagttcactgaggacttcaatgccccctgtatcacgaataacttttcgtcttcggttactcgtgaaaccttggtcgcctccgtcatgaatctgctgatgtaggctcgaaagggctcgcctagtcactgctttacttcgaccagatctcctaggttcaacggaatttgggtagaggaagaaaattatgcatggaattccgaagagaaagcttttcgggagttgaactttccgggtgccaatttgaaataccgttgctgggaggcttccgagagagtggcaggaaaaattatgtagcatacatctccccatactccttgcagatccatttgcatctcaaaatacttaaggtgggataatggatcttccttcccggtatacattttccaggttggcatcttaaacttgtggggcaattccaggatattgatctcgggggagaaaggggttctacatgctcgatcaaacttgagattgttgttcctctgaccgaccatgccttggaacatactttttagttcgtccagctgtgcctgcacggctggactaacctgtttggcattttggcagatctgagtcacatcagcatctttctgtgcgagattttgaacacgggttccgagttgtacaatcggcgtgtcaagttgatcggctactcctctcctcctatttagatcatttctaagatcatgggtca

SEQ ID NO: 335956 - DNA, 887 bp, Cannabis indica
ttatgactaattgtaatttttctcgattctagaaactgtaactatgcggcccataatagggccaaatgggcgtttaccaataatgttacggggatggtagagatatctaatatacctggtaatatattttgtaatgactgtcaggtctaacttcgttttatttataaacacgtttttctcaaaaaaaaaaagtcataaaaatatattttctcaaaaaaaaaaattcataaaaatatatcgtggccgggccttgtagcgtgggtctgtaatccaagtggaggcatgcaggaaaagggacattggcttagcctagtgggctggattcagagctagctatctactggcctgcccgttccaagctgggagttgggccttgtggtttggacgaaagtatgacccactgggctcctaaagtggagtgtaatgcgtgaggctggtttcacagagcagcaaacacctcccgttctcggcagtggaaggacaactggccggtgttacctgggtccaccatggctcattgggctgactttaataggatcatttttttttaaaagaaaactctttcaaaaaaaaaaaagtcataaaaatatatcaaaaaattgtaaattgtaaattttaatattttttattttaatattgtgagtaattaatttattatttttaatcaatttatttattagtgttcaaaatatatgaaatactattataaaaaaaaattaacataaatataatttcttttacaaaattctataaaataacaaaaaaaaattatataaaaataacagaaaaataaaatttaaataacattaaaacaataataaaaataacatttaaataataaaacattaacaataaatataatataaaaatacattaaaatatcatat

SEQ ID NO: 335957 - DNA, 1119 bp, Cannabis indica
taagataagttttatcaaaacctgatgcttcaggaagattgataaagtggtcgacgaaatagggaaaatttgatgtaacctaccacccaagagcatcaatcaaaggtcaagctttggccgacttcctaattgaaggtataaactcaaaagaagatccagttgttgagcacgaagcagaaacttgaaagttatatgtagatgaggcttcaaatgagaatggctcgggggcagaagtcataatgatgtcgtctgacaaattcaaattccactatccattaagattccaatttgatactttaaacaacaaggtagaatacgaagccttgttggtaggtttgagaatagctgaggcattaaaaatcaagaatcttacatgctttagtgactcacaactgattgtaaatcaagtcttgggagaatatcaagcaaagggattaaaaatggcaaaatatttagagaaggtttggaagaacatggaaaagtttgattattttaaaattgaacaaattccaaaagaacaaaactctaaggctaatgcattatcaaaactagcatcccaatatgatcttgacaagttgaatttagtaccagttgaagtcttgagcgacccaagtatatgtgaagaggaagaagtcgagatgatagatacttcaccaacatggacgacacctatagtcaagtatctactcaacagagaacttcctacagacaaaactgaggtacgcaaactcttgtattcaatacctcgctatacaataattgagggcaaattatacaggaggggttgttccatgactctcttgtggtgtgtgttaccagcagaagccaatgaaataattaaagaaatttatgaaggcttctgtggagaccatgtaggttggcaaagcctatcaaagaaaattattcgtcaaggattaattaagtcagagcattaattagcaaaaaaccgaagagaagcctggtcagactcacatcgaatcacgaatagatgcacccaacacgtgtcacccattcaaaagtaaagacaactcagatgaagtctccacgcaacttcagaagccccgtgcagagttggggagaaaatgttatctcaatttttgcactcttacgtggcatcac

SEQ ID NO: 335958 - DNA, 741 bp, Cannabis indica
ttaacatctgaattaataaaaaatcaaaattctcacaaataaccgctgacttgtatatctttccacactttattttttagtgtaaggttgacttctttccaatttttataggataaccctatcttctgacgacatctaactcctaaactcgatactagcttagagtagtttttgccacagtacagtcctttgtcattcaccctgagttccactctttttcttggtccatcaacttggatatttcattcatctgagtagctccttgtgtaggtatcggcctaggacactttgcttctgggtctgaatgtgatcttgaacttgagttggccatatctacaccattaacaaataaaattaaaagttagctatataacaagtaatcaatacgaaatattatgttgtaaaagttgtaattaactaattagggtagtgtttagttgattggaatattggtagaattggaatgacttttcctaatgtgaatccattcatttgtttggtttgtcatttataattaaaaaatttatataaatgtgttatgtcacctaatttcttacaactagcgagtaattaactagttatttatgttatgtacttttcttttaatatttatatttttttagtaaaatttattctaattctaccgaaatttcggcagcataatagttgttattggacgttcccaaaaattttaaaagtgcctaatgaagtaacaaataaaacaaatataacaatatagaa

SEQ ID NO: 335959 - DNA, 1228 bp, Cannabis indica
gggcgtccttccactatttctgccacggtcaccaatgttgtttctagagtttcctccaccactctgccttagacggacattgtgggagtcatcgcgtcccatattatcaccgggtaggacttgctcatcgatcagaggtagtcgattattattgcggggaaccttgttggaggggtgactcctagtcctctcttggttccttgggcgctcttcaggtccatagaccaccctctctctttggttccttggcatagggacctctcgaggataggtttgaggtatctgttgattgtgggcctcagtacccatcccttgatttttttggttaaagtaacttcgtattaagtctgcagcctcttgggtgcgacgatatcagttgtcttggcgcctcctcatctcacgagcatgatcttccagccaagattggaattttctcctttggttagcgagactttcagtcaaatccactcgagcttgatttggctcttggtgcacatttttgaattggccttgcatctggcctattgcatctcgcagctgatccatcttggggtcaattccgtcgatgtcaacatggggttcgttccgcagcataaagacgccagggccgcgaccagtctaaacttggcccgcaccgtcagtaggtgggacaaaatttctagtattacctcttccagtggcgccatcaatagcgtcgcctcttgccgcagtggcattggtggtacgcccagtagttgtctgtccagcgactgcagtttgaccggtggtggtcgtgccgccgttccaggacgcaatggtcgttctccattgtttccagcaaggttgcttgctgatggaacttggtgggcactttccatctcttcgacaggtcgctcttgagatcttcgggttaacaccattttttccagtgaaaaacttaaagattttggctaaagctctcattgaaagcaccaaaatgttgactgaatttttagccaaccgacgcggagtcgtaataaataagatttaaaccaaaatcacaataataaatgtagttaataacaccagaattcgcaataaatgtaaataaaagacaccggaatttaaagaggttcagccccaaatgtcggtaatagcctattccacttgagttttattaatcttagttgcaaaagtcaagaacaagctcttgattgcaaagaatgagaagtgtttatttttctaattgtttcggattgcggatccccct

SEQ ID NO: 335960 - DNA, 1237 bp, Cannabis indica
ataggggcttaatgcatgagggatggtttcccttttgcttacaatgcattatatagaaaattacaatgattacataattacaatatatgaaataggaaactagaacaagttgccatatttctttgactcaaacgattataggaattctcttcgtgtatggacataacaagatcattctgaagtaattatctcttgtaagtagctcggcataacagacttctaccaggtcggatgtcttctctacagctctactcgagtaatcgacaattatagatgctgacaaattatgcgtaggctgctacggacatttacctccgcccaggtatcataaatataggacacatgtcgctcgatccttttgccacgtcaatgtgcaaaaaattggataacatttgcccctaagtctatgcgggaccttcctggttgcacgtggacttcactcgatctggattcttcttcagacgggtgacgcatgtcttaggcgtcgaatgacgaaccaacgtgaccctgaccaagagtctcttcaatttcggatcattaatgctgatcgacagttttgcctcgaattgcgacttgatgtccgcgcgtgaagacagttactctgctagcaatgagtacataacatacacttttgggggggaattcgagacatttatattttgaaatgattacttctcttctcaggttgcttagaaacaggatagaaaaccttaattaatccttttagtcatctttattctcaaaaaaccagtgcaaataaattttcaagcgatttctctctcaaattctttgaagaattcgtaggaaacccttgtcaactccatccgagcagaacaaaaatcttcatactagtgagtaagttctttatttctttcttttatacacttgcatgcttaattttctaggtttctttctgcgaatcttgactgctcttgaacttgttctaggacaaccatagaaatcctaggtttaggatttagaaatctcgattatgcttaaccacgacatgtgattctaactacgctttgattttaaccccatgatatccattttcacttatccattaggggtttagtgagaatcagattctaattcaaaattttaaacttctggtggaaaattctagttctaagtaaaatttatgtttttgattccttaatcgaacctggtcggtacattcaacctgtttattattcgttgccccgaccaattctcatcttcttgtctcctacctttt

SEQ ID NO: 335961 - DNA, 587 bp, Cannabis indica
gtgttagagagattctcaatgacaaataccaaaggggcaatgatgccttctagacctggtatcggtctatctaaggaacagtctcccactgatcctcaagagatagaggacatgagaagggttccttatgcttcagcggttggaagtctaatgtatgcaatgttatgcaccagacttgatatttgctatgcagtaggaattgtgagcaggtattagacaaatccttgaggggaacattggactgcagttaagcatattttgaagtacttgaaaagtacaaggcattatgtgttagtctacaagggtggtactttaaatcccgtaggctataccgacttagatttccaggcttgtcttgatgacaggaagtctacatctgggatggtttttactcttggggtggagcagttgtttggagaagtgctaaacaaactgcaacgtcagactctaccatggagcccgaatacatagctgccgctgaggctgctaaggaacttgtctggcttataaagttcttctcaggacttggtgatgttcctagaatggaaaacccactggttttactttgtgataacactggagctata

SEQ ID NO: 335962 - DNA, 638 bp, Cannabis indica
gagcagtattcaaacaagataaggatactcatcaccagtagttatgcaagtactcacttagaattcctaacactcaaattttaggctacgaaatagacaaaagctagaacattaatataaaaaagacaagagaattatagtgattcagtcagatttcggtctgcttagtccacttttgtaatagttttcagcttagcttattagatttggtatatagaaagtagttgtccgttaggattaatataaacgtttaaagaataaatacaagaacagtttcgtctgttcttatctaaattgcagcaacacgtgtgactaactaagtcgcagtttgtccattcatattccaaacacacgagctttcgggcttggtgttattcttgcataataaacctttgggctttaagcctaggttttatttatgaatgtttgtgattatctttgatagcatactcggacattctatgtgttgacaactaataacatgtgaattcttgataagtcatcgaatacattagtcattcgaaccatacttatgtaaagaaacggtcttcacttgtcgcgggggagatttacttgctcatcgcatataatcgatatgcgcaatgagtattaacttctctcgatcccgcttatctttt

SEQ ID NO: 335963 - DNA, 597 bp, Cannabis indica
aaaaattttaaaagtgcctaatgaagtaacaaataaaacaaatataacaatatagaacaaaaaaaataacatgaacaatacaaaatttatccagtcacccgaccgcagtacatgtattcacagaatctacttcattacggatgaatatttaagatattcaaactccactaagcatgaattaataattaattatagtaacaaaaagttggtgaatgtatatacctatatcacgttaaaatccgatcaataccgaaatatatcaaaccttaaaaattagctcacaacctacaatataatacaatatataaccaaattagaattttaattatttaattacttactagttgttaaaaaatataacaaattactagttattaaattatatagttaatttttttaaaaataacatatacatatataattaattatatatcacactatcataattttaaaaacattatttctaaactaattaaattcctactacctcattcttattcacaacaaatatatatacaatacaattacacaaaatacacaaatagtatatacacaatataatatacacacaaatatatataaacacatattcaataa

SEQ ID NO: 335964 - DNA, 1903 bp, Cannabis indica
ccattagctggggcctttgagctgggagttgagtaatctcccaaacctcatcatgcttcacggcccctgcgtaccgtttgagctccttacgggtagttcctttgatgtggggtcctcccgagatcatagccactctcccgttgggtcttggtggcaggccgggaatatgctgggcgtctccggggggagcaattggagccaatgctcctgctacaccccctggcgctccttgaggcaaagctccagccgcctgacccgggttgagatggggcaaccggttcttcatccactcgtagagatgtcccaatcggatcaagttttcgatctcgtccttgagatttttgcattcattggtgctgtgcccaatgtcattgtggcacttgcatcttttattggggtccctccaggagctatccttgtacagaggaggcggtctccggtagtgcgtattttgcctagtagcaaaatacacacgttcttgggagtccgttaactccgtgtattcggtatattggaagtataaccccatttctgccgcttgtcctccgtccggtttctgcctttagaggaccttttgctccgagagccctgagaaggaccggctaaacttgcggtcggagtggagtgcgagggggcttgtccatttatccccaagggatttccaaaatgggaagatgcgggggccaaggcctggccttgactatatccgggagtagcagaaaactgtatgccgctcatgggtggagctgctgctggcaaagtacctgggagctgagctccgggtgcatatcctgctatcccagtaggatagtatcccccataggccactatttgggcctcttccatgttgatatatttctggactcttttctggaaatcttgaaggttggaagctccttcttgctgtaactcgttccagaatggagtccctgtgcggatgcctgcttggagaagagcaagctattgtccgtcatctactttcttggtttttgaggcttcttccctgaacctctttatgaaattcttcaatgtctccgtaggcagctgcttgatgttagtcaaggcgctgacctccagattgactttccttgcgacgacaaattgtctctggaagctggtttgcaacttattccagcaatccacggatcttggttccaatttcttaaaccacttttccggggatccgctcagggtaagcgggaagcacaaacacttggcgtcattgttgaccctcatgactgtcatgacccggttaaaccgtgacaagtgatcgctgggatccgagttcccagtataagcggccatttcgagcatcttaaaatttttggggagctctgcttccaggatgtgtttggcacacagctcccgatcctcacaatcaaagtcagagtcgtcgtctagatgatctccgggagactcgggcgatgtcctttcggagtatggcaagttcccgtagagaccgcgggtccgtacttcttttggtccaggtgatccttaagatcaccatggttcccattaatctgatttctcatatcgatgggagggcatttctggccccttcttcctctccctccgggctcttggtgcacggaaacgctctttcggtcccctcgatcctgagggccaagactccctttttggagtttgcccctctgcggacctttccctctcgggaaatctgagcggacctttcgcggatcctgcgccttcttcttttctcgggagtggagcagggttttctttggttccttcaatggatcctataggctaggttccctagacctctgcttttgggtacttggcgaggattcctctgtttcctttccaagtccagcagggatcggctttaggatgcacgtggattccgtgctgcctccagtggctttttgcatggccagcatca

SEQ ID NO: 335965 - DNA, 1000 bp, Cannabis indica
tgatgtgatatataatcaaaagagaaaaaaagagactaatattcttatgttgtcaacttcattatacatttttatatttctcttcgattcactagacttcaaaaaataaatcaatatgtgatctataatcgaagataataatatgaatttttatggcattatgcagcctgatttatttggtttcttttttatggcacgtttactaaactgtaattggaatcaaaacaatcaatagaagaaatgaatagggttaaaatataaactaattggaaataatattttattttgttgtttactaaactgaccagataggaaataagaattatcttattttgtttacataatcaggaaaggtaatcggaatgacttaatttgactaaattgccattattagaacatgtaattattttttatttatatatttttaagggcatatttgtctttttttatttttaactaataaaaatataattaatataaagtaagttaaggaaaagaaaatgtattccttatgaaaacgggggagagccattctctttattttcttcttaatttgtgtgggctccactagtttctattattctattttttttttttggtacttctattattctaaaatttagtaaacaaatgaataagaatcaatctcatacaattgattcctattcccttttagtaaacatgttattagttcattagactttaaaaaataagtcaatatgatacgtaatccaaaaggaaaaagtaaacgtttttttctaaagaattgttatgccattaaatgtctttattctaaaatgtatattaatgtgatacaatacacgaaaaaatttgaagatatcattggcctaggactttaaatctttggtgcttaaggatctaaattatattttatcctctattttttgaaaaaaaaaataataatgtaatcacatgtcatatgcaattatggagatatatacatatgaacaaataagaattatatatctattctatataa

SEQ ID NO: 335966 - DNA, 929 bp, Cannabis indica
gatattaatagtggaaaagatattacaaacttaccattatatcttttctaagtcaatgtcacttagttgatcttagatcaaaagatcttaatcctgagatggttagattctggcttaattgtactgcatgtgttctttgacttgtttgttacaactgaccactttgattggcccaatacttacatcttgggaatatggtagcacaattgagttgtagcgctaatcataaatatagaatctatagcttctatatttatttagaagtgaaacgttgatttccttatagcttggctaacagacatagatggaagagctcttatctcaataattatataaatttactgaaatatcatttataagaagctaagtatttaagggtaaaatatattgaagggtagaacagtaaatttgtccctactcaatgtaaattatctatagaggatatttgattatttagattgaaacaatggataatttatagcgcatctattcttggtgaatagagtattgtatgtaatcaggagtgaaattctgaatctatagtggagtcaggaggaattaataagatagaaaatttacctagtaaattctaaaactacttattgggagcttggttacataggtacatggtccccacataaactgggataatattattttgtagtctcaattaattgatttaagattctaaataaagactatgtcttatttgtgaattttactaaggaagggcataattgagaagaaaagagaattcaaagtttatttattaattaagagactttagaaggtctaattaataaatatatttaaatagtaattttatttaataattaattataattattaaatagatagagttagtatttaaataactaaagcagaaaaatagcattactgaagaaagacaagtttgtttcattaaggaa

SEQ ID NO: 335967 - DNA, 1382 bp, Cannabis indica
ctttgcttagcttcgaccaggtctcctaggtgcaactcgagatcattgtttctctatccggccatgccttggaacatattctttaactcgtccagttgtgcctgcagagatggactaacctgtttggcattttgagcgatctgagttatgtcagtatctttctaagcgagaatttgagcacgggttccgagctgcacgatcggcgtgtcaagctgatcgtctactcctctcctcctatttagatcgtttctgagatcatgagtcgtccccaacctatcgaatacgaaagcgcctggttgtctcaatgattggttggtttggctaatgtgctgaccgacaccattaacgttgttggaattaccagctatgacttctcccgatgaattactagacaaagtctgcccacctactgcttggcccacaggcggaacctgtgactggagatttggcgattgaccatttatagtctaagaagtattcatcgctggatcttcatctgtttcaccaaagggatgacatttgggggttgctgcccgacagattgataggctcttcatatcagcacagtggcttgccgactatgattgtcaatctctacatgataagcccttaacgattccatctctttggccctccattcaacaaacacgtgcctctgccattcaacaagcacggagttcctcctgatcatgatgtaggatgttaatatgaccctgcatgagtcccagagcaacacggaggttttggatctcagtgtcatctcgaatggttgtttgaacattggtagcgagcggaacgactgtgttatgcatgaccttgttggctgctgaactgttattcccagtctcttgcacactaggcccgatttcatccacagcagtcgtcacactgtgacctgtgtttgacggttgtccacgattaactgctggcggaacccttgtgtttcccaggttctgcaatgcaggatccactgcctgtggatttgccggatcaaccacgccctacgagtctgtaccaccatcgtacttgtgattaaatttagaataaagagcgattcttgattttgctctcaatgaaaacaccaaaatgttgacctctcttttagccaacgatagtgagtctattttagtaagcgacaagtagtttataacgattgaaatatagtaaagaaatataaagacacaggaattttatagaggttcagccccgagcagtttggtaatagcctaatcctcgttatttgcattaactcaagaacaaggaaaaaggttccttttcttatagctcttacaacagtgtctttgaatacgaattattagacaatatctctcaaaccaaaatatttgcgaccctttgccaagtgaatatgcatcactatttat

SEQ ID NO: 335968 - DNA, 558 bp, Cannabis indica
aacccttgtatcctttttgtagcagagtatcaccaagatctgagcccaaaaccccctcagttatttggattcttcatagtcttacacactatgattgaggactcacttgttatgtgtgggcatttactcaatcattaaatgcttgaatttgatttgtgaagaacattaaggattttgaaaaatagggaagaaaagaagaagaagaagtctcataaatctacagagaaagaaaactaggttaattggcattgaaacatttgttgcataatgagactctcttttctttttattctacttctcttagggttagggttgatttatttggaataaaaaaaaatgataaaaatggagcaaaaatagcactaagtagccgtccattagtaggcccaacactagttggatttttgcaatttttctcaaccatttatctatttttcacaaataccactttttgcaatttcaaccctataaatgcaaaactatttatttaataattaaaattattatcaaataaaattatcatttataatatttattaattagactccacaaagtctc

SEQ ID NO: 335969 - DNA, 1120 bp, Cannabis indica
ttgccagtcatgtgtcgagagcaaccactatccaagtaccactgtccttccaaaaatgcagacagtgaaacttgagccaccaacccaacattcgattcacgatcagacctcaatctccactcacttcgagatccttcccctcgagttttattgggtttttgaaaactcttaggtcgattgatcataactttcaagtagttctgcagcttatagcatctgggtcgaatatgacccctcctgttacagaagtgacacactgggatgaatctctccatctgacatatattctccgggacaattcttcttccttctaacttcaccttggtaggtccagatggaacatggaattttccagtggggtctgaggactcaggtgtcgagggaagtgatgattgctcgtcagcctttttgtccaggttgatcactggtgtaatggactcttctacccccaagttatctccttgcttatacaacatcttgtatccgatagaggttcgatcaccataaggtttttgaagttgaagagtttgattgatggcagccgttcttggagggataaactctaaagcatgtttagctcttatgagttcatctgaaagcttgtagatctcatggtctttatcatcaagaagtttgttgagattcttaaaagtgtcctttagcttgactttttcagactctatctgctccttggcactattcagacctctaatctgcttggtcatatattcccactgagcaaacatctcttcatatgcattttgtcttccattactgtcagcttcagaaacagtggaaaccccatcatcctcagactcaacagaatgatgactttgagccatgaaagccactacctgtttatcctcatcagaacttttgcttgcaacagaatctttttcttcgtcactatcgctccaggtggcaacaagggctttcttctttttgagagtgttggcacactcggcctgaatgtgtccgaacccatcacattctctacactgaatgcccatgctcttattgtcactgggttgctgaccatgccagaagttcccaagaggatttcttttgggaacattttccttacccttagaacacactttcttgtacttcttttccaaga

SEQ ID NO: 335970 - DNA, 553 bp, Cannabis indica
acaagcaattgataacatgaaccaaaacatacacaaatgaatgaaaaatacttctgtttctttattgatgttgaataaaatggattacattgaaatggagttttatttagggcataaaacccaacaaactcccacttgcactaatataaaactaatcagtacatatcaattaatcctaaattctgacggtgcttttcaaatgcagttactgccaagactttggtgaatggatcagctaagttgtcttctgtgtccactttctcaaccagtacatcccctcttgccacatattctctgatgatgtgatacttcctttctatgtgtttgcttctcttgtggcttcgaggttccttactattggctattgctccattattatcacaaagtaggaccagaggcttttccattccaggcacgacaccgatactggtgaagaactttcttagccagacaagctctttagcagcttctgctgcagctatgtattctgcttccatcgtagagtccgatatcgcggtttgtttagcacttctccaaaccactgctccacccc

SEQ ID NO: 335971 - DNA, 1756 bp, Cannabis indica
tcgttgcttacttcgaccaagtctcccaaatgcaatggaagttggcgtgaggaggagaattgtgcatggaattctgaatagaaggttttccatgaactaaactttccaggagccaacttgaaataccattgctaagcggcttccgtcagagtggcagggaagattctgcaacatacatctcctcgtaccccttgcaaatccatttgcatttcgaagtacttgagatgggaaaggggatcttctctccctgtgtacatcttccacgttggcattttaaacttgtggggcaacggcaggagattgatctcaggtgagaaaggagttatgcgtgctcggtctagctcaagatcattgtttctttgtctagccatgcaatgaaacataattttcagttcttctagctaagcctgtacgactaggctaacctgctcgacattctggtcaatttgaattacatcagcatctttctgagcgggaatttaagcacgggtttcgggctgcaagattgttgtaacattctgatcgtctactcccctccttctgttcagatcattccttaggtcatgggtcgctcctaacctttcgagtaaagaagtgcctggctacctcagtgattgatttgcttggttgacgggtggaatgacaccatttctctggttggaaccatcaggtatgacttctcttgataaatgacgttcatcaggagcgacaaggtttgcccgcctaccgcttggcccacgagtggaactcgtgatcggggattgggcggctgaccatttgcagtctgagaagtattcatcgctggatcttcgtccgtctcacccaggggaatgacgttcgacagttgctgacctacagtttggtaggctttttctatcagcatggtagcctgccgactacgatttttgatctctgcatggtgagctcttaatgcctccatctctctatccctccattcggcaaacatatgcctttgttcgtcgaacgcgagatttaccgcagtgcggagttcgtcctgatcatgatgtagggtatagttatgacccttcatgagtccgagagcgtcacagtgatttcgtaactcagtggcatctctgatggtcgttatgagtgccctggttgggtgcagaactgttattcccagtctcttgcacaccaggcgcgatttcatctataggagttgttacaccattccccacgttcgccggctgtccaggattaacaactggcggaacccttgtgtttcctgggttctgcaatgcatgatccaccgtctatgaatttggtggatcagttagacctctacgagtttgcaccatcgtatttgtggttagatgttgaataaagagtgattcgtgatccttctctcaatgagagcaccaaaatgttgacctcgcttttagccaacgacaacgagttgaatttagtaagcgataagtgatttataataatcgatatataataaagcaatgtaaagacacaggaattttataaaggttcagccccgagcagttcggtaatagcctaatcctcgttatttgtattgacttaagatcaaggagaaaggttccttttcttatagctcttacaacagtatctctgaatgtataattcttagatagtatatttagggtatagtctcagctaaaactatttcgtacctcttgccctgtgaacatgcatcactatttatagggctagtaagcttggagaggaagagtttccctctcgtcacaatgtgtataaacagaaagat

SEQ ID NO: 335972 - DNA, 287 bp, Cannabis indica
attaagatcttttgatctaatatcaactagtgatatttacttagaaacatacaacagtaagattattatatctttaccaagatcggtccgagtccaatatatactccatacataaaaaactagcatactttgccaatatcatggaaagaacacaacacttatgcaaggtgtaagtatactttaccaagatcggttcgagtccaatgtatactccatacatcagtgtaaatccagtgcactaatgaatcagggacattatcttttgaagcatataatcacaattaatt

SEQ ID NO: 335973 - DNA, 1008 bp, Cannabis indica
atacttaaatattgttattttcatgttatttaattaaagttgaaaattatcttaagtttggaatcttatttcagaataacttaaatctgaatcttatttcttgaagttttgtttggaaaatccacgatgattttgtgctcgccagagtgagtgacgagatagtaaaagcctcctgcggcattcttcctatctggaacagctttaataaagtagagatactctatttccaagagagcggggcactcccaattcagaattttgtacagaaccctcaacttgcaaggattctgtaaaagacaggattcagttggaatggggcaagcccgaggtggtttacaaagtccttgaaataatcacgaagggggagtattgcccctaacctaatgtgctcaaggctcgtagcgcctattccagtcgatccacttatactggtctcgccactggccccctcagaggtctcgcgtgtaagacgcacaggtgggtaactactaaattcaccggctcgcactgatctaacccgacagtctcgcctatactcgattctacaggtccttagtgtatagcctacgtagcttgagatagttcacaaccttaagtctattaactctgcctcgaaagtgacgatagggtcctggggagtctttgatttacgtggcttgagagacattattttaaaatctatgtaaagaccgcctagtcttaatttggaaatcagcagataattagggtttaattatgaaaatcatttattagtattgaattaattaattatgatgatttatttgaattcggaatgcatttttatgtcacatatagaaatttcataattttgcttattttgtgcctggcaacattggaatgcagtgtatggctattagaatcacatcttagtattttagtatagcgggacaataattcagacattgggaatgtcgggaatagtcaggattttagaattttccaaaataccccttagtgccatttcatgacttttagtgtgggcaaggg

SEQ ID NO: 335974 - DNA, 505 bp, Cannabis indica
attaaaaagctctttttaattaaaaataactttttaagagaaaattgttatatccaaaattcggtaagcacatcagaggaagacacgtgtcgatctgagaaactatgtgggtgaacgcgttcatgatgaggcctcaacctcgctgcgtgaaagagaaaacgacaacactaaaaatacttagagtatattatacaatatacaaactgaagtatagatagtgtgacgagtcaagataacagacagcgaggcgcttatctcgctagaaggtggtatgcatgcgaggaagatcatctcgacaccagagttaaaaccatattagtctcgagaagtcaaatgacaatcaactactcgctatcaaagttatctctatgagataaggtttactgtatatttatgattacacgttcatctcggtccaataaaagcggaatattcacagctgtgtaaaaatctcatttatttggcttaatttgtaatcagatcccacaattttaaggataatggc

SEQ ID NO: 335975 - DNA, 579 bp, Cannabis indica
tggtttcttcaacaggattaaaagtgactaatgatgatttttttattgaatttgaattttactgtaacttgttactattcaaaaaatatatattatgtatatataaaaataaacataaaaccagtttttgatattgtaccttctctatcaccaaatgtttctcttatcttgttgaaaaaccaatcccaagagtcatcattttctgagtcccctattccgaatgccaatatgaaaatgttgttgtttgcatccattgtagaagctgaaaataaagtcccgccaaatgatgtttttaagaaggttccatctgtgacaatgactggtctacaatgtttccagcctcttattgaatttgcgaatgctagaaacaagtatttgaaacgattttttgtatctgtttccaagtgtgtgattgttcctggatttgatactttcagcatgtgtaagtacattggtagctgttgataagagtcatcttgtctccctcttgccaattctaatgctttttctcttgctctccatgccttttgatatcccattgacaccccataatcatatagtgtgtccattacaatgtct

SEQ ID NO: 335976 - DNA, 1082 bp, Cannabis indica
aatcatttcattatataacaatattaactatatctcaactaattgtattacatacaacgtactatgcagtgcaatatacttttcttacctcaagttccgattcaggtatgttggccgaccaacttggagtatgatcaatgatcccgagccctaagtcataacaataataaactaataagtttttatcccaaacactagttaacagttgcaaatgacaacctagggtttcccactaaacctcgtagttcaaatacactaaaataaaccttatattttggctttaaaacataaactatatggtagagctcgttgcaagctttgaaacagtatatagaacgtccaaaacggacacccgagtgaaaagttatgacaaaaatacaatttgcgagttcccaaggctgccgaaacggtaaaccggttggccagaaccggttgaccggtttatcagggggaaaaagagattttccaagtttatgcactcaaagaaatgctaccagaatctatccaaaccaccccaaacttcatagggcacatgtataccatacatactaccatacttacgtaatagaatctaaaatcgagcccgtaattggcaaaatgtttggacttaagttataaaaaatttaaactcaatttctaatacaaaatcacttcaatttcagcaacaaaacatcagaactagttccatgattactcgagaacaatcttataaggtcagaacctttataactattctaatttgcaaaacccctatacgaaactaattgttttaaacttaaaatagaattaaatcttatcttaagcttttctctcttaaaggattgttgttccactactactggagcttagatcgctagattgtgggttgaaattcgaaaaaaaaaatggataagaagagataaaagtttcgacagaaaacgagggtttcatttcgttcgttcttctgtttaaaaaattataacataaataatatatatatatacataataaaaaactgataagttttagaataaaaataatattataataatataataataatattattaataatataaaaatgttgaccgaagttttcggca

SEQ ID NO: 335977 - DNA, 567 bp, Cannabis indica
aacaccttgatatacaaatcaaggggtatgtagtattctttccataataggatctgacaggttgtattcaatacaaccttttcaccaccattacatttccttaatcacaaaatccttaatattgtccaattcctctccatttgtttactcctctagggatactggattctttactttttggaaactacttttgtgttagtcaggaagtaacactagtagttaataaatgtttgaacaataccaaaaatgtatagaactttccttagactgaataagtatctttcctgcaactttaacattcagtctctctggtagacttagagacttcagataggtttttacacttctccaaaatcactactccacccccagagtaatcaccatctcatcagcagactttctagcactaaggcaagtctagaaatctgatttggtgtagtctaagagtattaaatacacccttatcgactaacatatagttcctcttcttgatcttaagattcacttgattgtcttccaatgttcctttcctggattaatctgatacctactcattactcccactca

SEQ ID NO: 335978 - DNA, 1162 bp, Cannabis indica
aatcaacaaaagacatctcatctagaatctttcacttcccaaaaccctcatccccaattaactcacacaaccagaaaatgagagagagagagagagagagcgagcgagcgagagagagaaatacctgatttagcaagaattggttgatggaaggaaggagatgaagagcagaggcggctaggtttgacgaaatgataggttgttgttcctgtctatcttgggtgagctttcctgagaaatgaaagtgttgtgttatcaagaggtggatattagttacctcaatgttgaggccatagtaaaatgaatccctagctaaaaaaaataaaaatgcaataccaaacatgggctggggttggactcgcccaactcccctccgagttcagtgcgaccgtttcgccgggatctgaaggtaattgtctgcctcactctagtttctggatccgaatgatgtacggaaatttaggtcttgtttccgagtacttttgatttctttttgactgagttatacaatgtggatgtgttatgggttttctgatccttcttaaccttgtctcctcttgatcgaatctccttacattccattttgatttttctgtactttttttattatatattccctctcggatttgattgtttgtaacaatgtttttatttttcttttccttactttactatttttcatttaattggtagttgtttggtgctttagtgatgaggtcattttgttttaagagagacacagtttcataaaattttataataacgtttgtgtatttggtcccagtgttagtaaagagaatgattttttttttgctgagaatgattttttgctttgaggtttttgtactatgttgaaagtgtgaatttttaattaacaaaggctagctcaagtagccatagatgggtgtgtgagtgttagaggtcctgggttcgagtccaggtaaaacatgttgtaatatataaacgtttaaattaaaaaaaaaaaatgtaaatttttaattcgtaattattattttttatttatataaaaaatctaaagaagtattctttatgcactgatggtttggtgaaaatattaccaaaagaatggaaaaattagtgtatagcctattagaatattttatttatggaaattattttctaattaaggaaatgattttct

SEQ ID NO: 335979 - DNA, 531 bp, Cannabis indica
aaaagagtagtagaggtgagggatgctttgtcacatgtccctgaacttctctactatatcaatgacgtctgacactgtgtctcagatcttagtgatgcaattcgatacacagcattcatatgtgaactaacgcttgacttccacaacttcattttcgaaaagaattatattgtggaaacaaacggcatggaagaagaacgtgtcaagaacgtacgataaaagttaagtgacggcagtatggaggacataaaagaatctgtaaacataataaagaaacgagatttggaagaatcagaaataccagactattttgaagtgacagcagaaatgttggaacttgaactaaaaagcccacctcaaatagaagcagaggaaataatagaagtaatggagatttcttcaaacaaagaatctaaagatgaggaaatgctagaagggtccaatgagcaagattactctctagtaccaaaaagcaaggacttagatctattcacaacaaccaacatcgatgaactagaagatgacatacct

SEQ ID NO: 335980 - DNA, 1030 bp, Cannabis indica
gggaggggaatggccagaatttggtcaaccacatgagtcgggtaacatccctgtagagcaacggtatcccaagtcatagaactagtgatgaaagagtcaactctgtcaggaacggggaagatgggagagatatgacgaaaacccgggatccaatgatccctggtggtactagtgttctgcccattaccaatttttgaaataattcctttgtgcagcagctcttttccccagcaaatgctacgccaaacaaacgatggagagtgaccaggagagctatctaggaaagaggagtgcgggaaatatctggcagacagaatttttgacactgttgagtttggttgtttaaggatgcgccaagcttgttttgcaagcagggcttggttaaaatgaacaagggaacggaaccctagaccgccatcccgttttgacttgcaaagttttttccagctttgccaatgagtcttagggcggttgttttcgttgacaccccaccaaaagttagccataatggactcgagagaatggcaagtagcaacgggaagacgaaaacaagccatcgaataggttgggatggcctgaatgacagatttgagaagcgtttcttttcctcctttagagaaaactttattcttccagttgtgcaggtggccccagactttatcatggagatagtgaaacaattgctttttagttcggccgatgtgctgggggagtcctaggtatttctcgaaggaggagcggaccgggatgctcaaaaagtcagaaattagggtttgatctctgagcgcgacattgggagaaaaatagagagaagatttttgaaagttcactttctgaccggaagccctctcatacaggagcaggacttctttgatggagttgcacgagctgatggaagctttgcagaaaagaaaactatcatcagcgaaaagcagatgagaaatcgggggggctcgacgggctactttgaaacccacaatggcattatttctttcttgttggtgcaaaagggaggagaaaccttccgcac

SEQ ID NO: 335981 - DNA, 534 bp, Cannabis indica
acttcgcctccagcacctcttttcttcttgtaaacccacttacatccaattggacgataatcatcaggtggatctacatattcccacactttgttctttttcatggaatccatttctaaatccatgtcggctgactattgtttctgttcaggacttgccattgcctgtttataggttaatggatcatcatcaataccgttacgaacgaccatattggtttcaccatccaagccataacgagatagttttgtggaaacccttcaagtacgatgaggagtcgtgatcttctgagcaagaacattagtggtagatttatcgattgtatcaacttgcaaaggttcaaccgaggaagtgggattatcctctactttagtagaagaggctggaacattagaaggaattatatctgaaagcatttcctccaatactactttgctctgcggcttcaaattcttaacatagtcatcttcaaagaaagtggcattcgtggaaacgaacactttatcgtccttgtgactataaaatagtccaccc

SEQ ID NO: 335982 - DNA, 884 bp, Cannabis indica
aaatacgaaagaaattaaatattcctttaattgtaaaaaattttagtaacaaatgtttacaaaataaaagttacactgaagaatcactatcatttccatcattcactaagtttacattttcatcctctacatgttcaactagtaaatcatctacttcttcagcaacataattttcatcaagttcattattctctatctcagaatccactaactgatcggacgattcaacaattactggaggttcattcgattgcataatcaactctccaagatcaaccgtcaacacaaaattggcagagttagaatcactaacaacatctacatcagtctcatcttcgttgtcagtaatgtcccaaatttgtcgatggctaatatcttcaacaaccttccaatcgcgacctctgagtggatcttcaagatagaaaacttgcttcgcctggttagcaaggatgtacggttcatcttgataccaatatccacgagtatttatactagttatattattttcagtgattgtcttctttcttaatggattagtgttataccatttacattcaaacaatgacactgtatatgcaccagtataagatatagtgattacatcttcaagtgtgccgtaataattaaacccttcagttccagcaacagtaacaccactattttgtgtcttccgcttttggtctcgctttgatgcaataaaccgaacaccattcactacacaaccttcgtaaaatgttgctaagtaatcggacccggaagcgagagcgagtaactcatcaccattttgtaaagttccaagcttgtgcaactcatatatctaaatacataaaatgtattaatatgagaggaatataaatgattgaattaaaacttaacaattttgt

SEQ ID NO: 335983 - DNA, 1609 bp, Cannabis indica
aaggtgaaccaaaacatacacaaatgaatgaaaaatacttctatttctttattgatatttaataatccagattacattgaaatggagttttatgtagggcataaaacccaacaggcacttcagcaagctttgaagccaagaacctctcttttcgctctgaactttcttagcaaagaaggatggtgaaaataagtttatctgccaatgctggttcatatttataggcaagtcacgagaagaggtaatcgtctcaaaggaacctcagacgcctaagtttccctccttaaaagcgaatatgagaaatcaaaagtaaccaagtgcagccatcagccgtggagagagaaaatcagatttcgaaatattaaatgtcagagcatttattagtcgaaaaccaaagggacgcccagtcagcctcacatcgagtctcagacggtcgcgcttgacacgtgtccccatccaacagcagaagcagctcagatgaagtctacatacaactttggaagtcccgtacagacttgggggcaaatgttatcccaatttttgcactctgacgtggcatcacatgaatggtgacacgtgaaatccacttggagcatctcctcgggaagcatagtccgagcaggatgtctcgctagcatgcctagagcaaagtcttcaccaatctacgcagagcaaccaacacttagcgaattcagctttcgcatcgtgagtcatcaatgcaatccctataacttagggatcagactacatggatatggcatacacacgatcccactatcagtgtattcagcctcaatctcacgatctttgtactaagcattgatcatacgatctttctgtttatacacattgtaacgagaggggaaactcttcctctccaagcctactagccctataaatagtgatgcatgttcactgggaaaagggtcgcaaacaatttagctgaaattataccctacaaatattatctaagaattatatattcagagatactgttgtaagagctataagaaaaggaatcttactccttgttcttaagtcaatacaagtaacgaggattagactattaccgaactgctcggagctgaacctctataaaattcctgtgtcttcatattgctttattatatatcgattgttataaatcatttatcacttattaaattagactcattatcattggctaaaaacgaggtcaacaacatcatacatcagtttctctatatttcttcaacatcatttaaataatttattttgaaataattttatcaagatatatatataatagaagtataaagcgatgacgtggtagtctaaaattattttatttaccttcatctaatctctccttaattctctcatatattcttttttatttgatttaaatttctctatatctattttctctaatttttttttcttataatttaaataaatattcaaataaaaataaaatacttgtactcccgcaacaaagaagattcagtaggttctcaagttactttaatttttttattttcttcttgctttgtatttatagtgtatcttgatggatgtactgctgggttttatgccctaaataaaactctttacaatctgattagtaatc

SEQ ID NO: 335984 - DNA, 498 bp, Cannabis indica
tctctctctctctcattttgctcaatcaaaaactgattggccaagcttgtatttataaataaaaaactattacaagtttgtactttagtaaactacaaatacaactgtaataactaatttttgtaacagtctatttctgttactctatcatcccctcaagttgtactggtctataccacgtgctaacttgtctttgaggaagtggaatgaagatacaagtaaatatatcagctatttgattcatagagtccagatatcttacatccagttggctggaaagaaatatatctcgaacaaaataaagatctatgtcaatatgcttgggtcttgcaaatattggattggaagccaaagaatcagctccaaaattatcacaccacaagattggacactgaagaattggtatgctgagctcaacgaacagagattgaatccaaactggttcaaaggtggccagagcaagggccctatattcagattcagtgattgatcgggcaa

SEQ ID NO: 335985 - DNA, 707 bp, Cannabis indica
gccagggtcccatgacctagccaagaattagctagggtcaccaaacctaggcatgaactggccagcttatagggtgaaaccgtagaaccgaccaaccccatgaaaaaacccgagggtcagccaggtctcaaacaagatccctagggtcggccagggtttgttttggatcaaaatgtgtgtttttcaaaactcaaaatgttcttcgtatttttcgtgaaggaaagagtaaataattacaacaaaggccaaaattgaatcttttttgtcaggaaatcacacattatgcattctaaaactatcatgcagatcaaaataccaaaagattacaatctaatgtgagaatcaaagaatgttcaaatcatgaaaaagcttcaataaaacaatggcaaatccaagtaaacaagtagagaacaggatttgaaagcttacccactagtagaaaccttcaaggaagatggtggaaagcttggatcgtcaaaacaaagtaaaaatctcgagtattagaggactatgcggcatcggcctcaatggaaagtgaagagctttctttagttgccttttttgaagagagagaatgagaagtgagtaacaccaataatcttatatagcttctggtgggtccctctctcacttaccatgcagcacgcaaaaaataacatgcagaactattatcaactttctgctaaggaatgtgatcagacaagcaa

SEQ ID NO: 335986 - DNA, 584 bp, Cannabis indica
gttacaacttggtatcagagcagccatggttttaaaggtccttaagagtggtcgaatatgtacatttgttgcgaagactggtcgactcacggtatataatagtaagtatttatattatttcctattggatgacctgcctaggctattataaagtatgttgggaaaagtagcataatgatgattgtgataagaatatgtgtatggcatatgcatattgatattgatatccgtctaagttttaaatggttagaagatgtggactaaatgtgtgatatgctatacaataagggcaatggaatagtctagttagcgagctatttgggctcagggcaaatggtaaggaagagaatcctttattgctgtaatactggaaacatgtaaattctgttatgcaggatatgattagacaataagggaaaatagattcgagatctgaaagaataatagactcatctttcatctgttcttgtattaacgacacttcctattgtaccactatatgtgatggaatatatgaagctaaaacttactagtagatcaggaagcaaaaactaaatgaatcaccaattatgggacaggataaa

SEQ ID NO: 335987 - DNA, 603 bp, Cannabis indica
ttaaattgtttgttacatgcatacttattttattttatatggactatttgaacattgttttttaaatggtaaatgaatttaatttttttttcacaattttataagatgtgagctacaacatacacgagtatatacaaaaaatagactaaggactagtttggcataactgtgttgtgggaaaaaaatagctgtagctgtgctgtgagaaaaaaacagtgttacgtagaattgtggaaaaaactgaattgagtatttggtaaattataaattttaaagtgtagtgagttgttaaaattctattataatgacaatgataatattataatttagttcattataatcataaatatataaaaacttatgtttatataaatttttattttctatatatttttaattatttttcctaaagtataaatatatatatacatttgataaaagaaaattatagtatttttaaattatatttttatgatgtaagacaaattaaaaactcaaatatatatatataaaaataatacgaaaacaacaagaaaattaaataaaattaatagaaaaataacattaaaacaataacaaaaaataacatacatataacaaata

SEQ ID NO: 335988 - DNA, 763 bp, Cannabis indica
attgggattccaaacctgcaaataatgtttttaataacaatgtcgagaacttttttgcaagttatggaaattagaggttccacttctgtccactttatgaagaagtcgactgctaccactgtgtatttcgctcctcctcgccctgtgggtaatgccacaatcaggtcaatgccccatattgcaaatgggtatggcaaggtcatcattctcaactctattggtggtacgcgaggtatatgtgaaaacctttggcctttgtcgcatctcttaacaaattcaagtgtgtccttattaattgttggcaagtagtatccttgtcgaataattttctttgataggctttgccaacccgtatggcctccacataagccttcattaattcctttgattatttcattggcttctgtcggtagcacacaccgtaagagaggcatggaataaccccttttgtataattttccctcaactattgtatagcgaggtattgaatacaagagtttacgtgcctcggtcttgtctgcaggaagttctccgttgagtagatacttgactataggtgcatccatgttggtgaagcatctatcatctcaacttcttcctcttcacatatactcgggtcgcttaagacctcaattggtaccaaattcaacttgtcgagattgtattgggatgccagttttgctaacgcatcgacattagagttttgttctcttggaatttgttcaattttaaaataataaaacttttccaagtttttccaaac

SEQ ID NO: 335989 - DNA, 955 bp, Cannabis indica
atgagctatcccggttcgaggaggttccagcgccggtgacggacgtgggcgtcgtaaatttatgagtgattctaatcactttgtacaaaaaaaaaaaaaaaaatcaaaaacaaattaagttgttaaaaggtgagttggttatttatttttaagaatttttggaagtatttgtggatattaaatacaaatctgactatacattgtgtccaccagtaagaccttgaacatgtgcatgtcatgtaaaacttttcttaccaattccattccactcatccactaccaataattactatttaatcaaaaactttgattcggtactttttgcattgcatgtgtaattactaattagtgtgtgttttatcttttccatataacacgttttttttagcaaaaaaaaaaaaaaaaaaaaaaaaaactaatcaaatacaaaatcatcatcaaaattcaaaagcctacgatgagttgttcatcttattgtctttctcttttctgtcaatattgatattaataaaataattgaaaatagacaaatgctaattaaaagatagttagcactatttttcatggtcaagcataatttaatataataaattttatgaaatattactaattattcttaaagtgtcatttataaatacatgtgcttaactttaaaaaaaaaaaaactattttagttaattttttatttacaacataatgttattataattaaatatgatttttagtaataatgtgactaaaacatagtatttagatacaaattgttactaatttagttttagtcacaattgtaactaatacctttagtacgggccttttgatcacaaaataagaatgacgatttatatttagttataattttttcacttttaattataaattttattttaactaaaagtaaaaaatttatagtgtaataacaatgcttttttaaaaaaataaaattcttcaaatt

SEQ ID NO: 335990 - DNA, 693 bp, Cannabis indica
aagtaaaaaaatttatagtgtaataacaatgcttttttaaaaaaataaaattcttcaaattactgaattgttagataatttaaggtatcatctatttttcacagttaactctcaacatgaactgcttatgtgcactctattacacgtgacacatttatattggtatacctaatattattatttaaaaattataaaaaattatttcgaaatttataatattttttattttttatttttataattttatttaattttaaaatgaattttgaaataataatatcaagtgtaccaatataaacgtgtcatgtgtagtgtacacataagtagtctatgatggtagttaaccagatgtcaccttaaatttgctaacagtagagtaattatttggaaggttttatcgccaaaatttaagcttggaggattaagtgcaagtgaaatgatagttgagagggtttagctgccaaaaactcaaagaataaaggctacttattaagatttttgccccctaaactttttagcccgttataaatggcccctaaattattcatggcattgtaaattggtctttctgttaagttttgtcacacgtgacaagtaaaatgatgacatgactgcttagccagttgttatattgtcatgtcaatgccataaaatataagatttacgtaattttcttaattattaattaatttt

SEQ ID NO: 335991 - DNA, 981 bp, Cannabis indica
ctcggaagaaaaaatagccccagtaaaaataggaaaatcacagctacatgattttcaaatcataaactgcatttacactacgtgatatgtaatcaaatcccataattttggggacgattattgtaaacatattacacccaactttctaattaactgtcaagtatgtaattataaatagtgacaaagaaagatgaaagggggacgaaaaactcgtacgagagaggctctgagaaaaataatcagaaatctaaataagattgactcgtggactatgcagaattttaactgcaaaataacgtaaaaaaccctcttttcatattttttttacagcctttattttttctatgtgaaatcactcctgtgaggcttaaatttagttaacgaaaatctgcgttaacaactgctaagagtaggacatacaaagtatgaaacaattgtagaagctcatgaaataggaatgaccttaactctcgactaaaacgaggcaacgtagaattctcttttcgatcaaataaaaggttgttagaatgatttccattttagatgagctcactactctattcaatgaatgatatctttgactctcgcccaatacgaagcactatatcattttgttaaaaaccttgtaaattatttaggattgtttgtttttgtattttcacttgtcatttcttcttgctaagtgcttaataatttctgaatgtgtatgattttgtattgaaccttatttgatttctatttattgatatctgtagtataaaatatgactatgaacaattcaatggtgtcactgttgactgacaacaagctctttggagctaactttgtcaaatggaaagagaacattaatattgctctcataggtgaaaatgccttgtttattttaactaaagatgttcctgagcagccacgtgagaatgcaaccaaggtcgttaaggaaaagtttgatcgttggtagaatgctaacaacaaagatcgata

SEQ ID NO: 335992 - DNA, 654 bp, Cannabis indica
ataaaatttctaagagcagacctggacatttttgcattgtcacgtgcggacatggtcggaatcgatcgatctataatttaacacgccctgaatattgatcctaatttccggcccattcaacaaaaaagaagactattagataaagaacggggcctagccttaaaagaagaggtagaaaagctgcgcaacaacaatttcataattgaatctttctacccggcctgggttgctaaccctgtactagtgcccaagccgaacaaaaaatggtaagtatgcattgacttcaccgacctcaataaggcgtgcacaaaagactgctttccactttcgagaatagattaacttcactgacctcatggacgcctattcggggtacaatcaaattaagatacatccaccagaccaagaacatacaagttttcgaacagatatgggtttatactgttataaagtcatgtcatttggtctcaagaatgtcggagctacataccaaagattggtaaataaaatgttcaaggactagatcagacaaaatattgaagtatacgtggataacatgctcatcaaatccaagaaggctgggaggcatagatatgacctagacgaatgctttaaaatccttaggaaatacaacatgaaactcaatcccctaaa

SEQ ID NO: 335993 - DNA, 887 bp, Cannabis indica
aagtgacaaggcaaacctggtccttatctagttccttgaggagcctagcatcactggcacggaagaaatcgaaatgatcgacacatctccaaattggatgacgccaatagcagcctacctcaactctggggaactcccagataaccaaaatgaggcttgttaaaagagaagaaaggcagcacgatacatcatagtagaaggaatcatgtacagaagaggattcttgatgccattactcagatgtgtcacaccagatgaagctgcacggcttctatttgaagttcacgatagattctgtggaaatcatgcagccggacagagcttatcaaagaaaattctaaggcaaggctacttctggccaacgatgattgaagattcgaaagactatgtcaagaagtgcaacaaatgccagagattttcaaagataccaagagctccgcccaacgaggtgacacacatgcaaagtccgtggccctttgccatctggggaattgacctaatctgacagtctgacagttacctagaggtaaaggcggggtgcagtacgcagtggtagtagttgactactttactaagtggactgaagctgaaccacttgcaaccatcacatcaaagaaggttcaagagtttatagtgaagaacatcatatgccagttcagactaccatacaaaatagtctcggacagcgacaaacagttcgacagccaatctttcactgatttaagtgcgaaccattgtatcatcaaaagtttctccgcagtggcacatcctcaagcaaacgatcaagttgaagcagtcaacaaaaccttgaaggatacactaaaaaagaaactcgaagatgccaaaggaaactggccaaaagaactccccgaagttctatggtcata

SEQ ID NO: 335994 - DNA, 851 bp, Cannabis indica
tgaattcaatattatttttttgttgttttttttattgatttagggcttacaattgttatgaggatggtgcgaagaaattttcccctaggtttagattaggtgttgattatatttaagataaaacctagttttatcatttggcttgttgtgacatgtttatcaatgactcagtaaaatttctttttcctttcaaaactttttatagttgttttatcattattttttagtttagttactgttattaaatttttgtaatattttttaactttttctttttgtgtttctttgttgttttgtttcagcatatgaacactatcatctattaccttgggaaaaaagagaaatattcttctgctgttacactgaattttgcaacggactgccttttcgatgattacattcaatcgttataccacaaattctgcaaagccaaggcaatgaaaataaagatgtctcacatacatgatgctcacccaatagagcattacataagaggtctacggattctgtgttctaagccttggtatgaatccgatcatgtcttattcataataaatcttaggaaagaaagccattgggtttttggccgtcttgatttgaatgaggggattagatttcgttataattatttgaggactgccaaaatgacttctgcagcaaggaatgcaatgaaggcttattctgttttactccctttgtcttttgatcttcttgaattttggaagaataggtcccatgttcctgatttaggttctgaccctaaatctcctctaagagttgtggagattgctggtattccatctcagcagaaaaagtgagttgttattattaagtttgtcttatgttgtata

SEQ ID NO: 335995 - DNA, 1286 bp, Cannabis indica
cttccgtggtatgaccaatatccacatgatattcaaactatttagttggatcccttttacgcctcacatgtttcataagtattggctcgctaaaaatgacttcctgtacatgtgcaaggtagatattttcccgagtttcgctgagctcggtatactcagcataaagagggatatatttgttgtgtttcttatccttgggcagccttttggaatcgtcttttccctttgatcttgaggcttccgaatcaaattctccaacagtatcatgccccactggtcttctgggtttcgtgactcgatgccttctgaacttattctccaactcgtctattcgcaaatggagtgaatccttttgctctgaaccaagtttttgacaaagatcaggcttcttcaagttagatgttctcatagatcactcctgtgactgcggttggaccttgctctttctcttaaggtttgattcaccttattctccctaagggtttgcgcgagtttctttctgatgatccggaagagaggattggcaatttccgtccgatgttccacatatcccatgctgcgtccccagattttcctcagtttctttaggttgtatctcatgccccttggtttgcgagctgcgaggtttgcccgtgaatctcttatcctaaggtcaggttgattttgggtaccattctcatgcgctgcccttactggggctatttcacgctctaactcggcattacgccagtttgatttctccaatcgatgcctaagatgacgattttctaattccacgattggtctgtacctggttaggtcgtaggcgctctcctcatcaacatggttaggaagtgaccgattgttgtttacccaaggtccatcaagccagggaccccaatactgggttttctcggggcttgcagtctgttcatgcgatgactcaataaatccctgaggactcaatggttcttttctagggcgatgacttattccttcttgaggattattatctttggcgtcatccattacttttatgtcaggaggctttttctaagctttttcacaaaggctctcaatgaaagcaccaaattgttaacgcagattttcgttaactaaatttgaacctcacagtagtgatttcacacagaaaaaataaaagctatagaaataaaaatatgaacacatggttttttacgtgattttgtagttaaaattctgcatagtccacaagtcaatcttatttagatttctgattgttttttcagggcttctctcgtatgagttttttttcgtcctcctttttg

SEQ ID NO: 335996 - DNA, 652 bp, Cannabis indica
atcatggttcatgcgatttcatcatccgtaatgcttatctgttgaactgcataatgcctgtctttcattctgcttattctaagcttcatgagattttttgccctaactcgtgaaaatttcaaacttcctgagttttgacttttcgttgaatattctcattcttcaatctgttgagtactcctggtcggcatattggcttgttttaacgttcgatatttcgaccaaacaatcatcttgtgtaatgtcttttgtagatgaaccgaggtgagttttggggaagcgaacaccaaattgaccaagatctgcttcaactcttgcacgaggatcatcctcgtcttcgttctaatccaactttttcgagtgacagtcattcttccctaagtctttcgtccagccatagactgatgacccatgccaaaaagacaatgcgtagggtcgacgcattcgaccctcaagtggctcggcacgccaccttacccaacgccaaactagattcagccatccaggaggagggggatcatgaaggggacgctgagatccaggagattgaagagcaggacgatgtccgtcctagcagtccctccgatgttgaggaagagaaggaggttgcacccccaaactatggggggatacaattgttgggttttatgcc

SEQ ID NO: 335997 - DNA, 514 bp, Cannabis indica
caaaaccttctctgcaatctccaacaattgcttcaggttagtgcttccgctcatcttttatcatcttcttcttctttaatttagaaaaggttctatagatttgtgatttagggttttctatattaaagcactttagtaatatgtttagacctgtaatttatatatttcttaagttttataaaccctaacaagtggtatcagagccacctttgttgaattaattgaagatctgatcattttattgtttatgaaatttggagattttgaaaattagggttttattttctttatactgctgccgcaatttttaggatacaatctaaatatatgtttctatttattgatatatgttcagtactattatatgccgtaagaattcatgcatgtaattttggcttgaatatatacatgtagcgcctatatatgtaatccctcttctgacatatatgttttgcatatatgttttgataagggaaatttgacatttaatactaaaagattacacatggtttta

SEQ ID NO: 335998 - DNA, 449 bp, Cannabis indica
acttttcacaagttgtttaatatccattacctgtcaatggatccaaactgtatgttagtgtatggattatgagttttgcattctgtgacaaggatccacttggactattctaagaactctttattctaactagacctaagtcatcaaagacagcaaccacattcttatatatctatggcatttgcatcttgttcatagtggttttgataagatcatcatctgcaaatagaaaatatgcctatatccacttgaaagtatgatcatctatattcgaatatggatgtgcattcaggggtggagatgagtttttgttatattctttagacgattactctagattttaccttatgcaaagaaatttgaaatgtttgagaaatttcatgaatttctagcaatgttgaaaaacattaaggtaaatggttaaagatcttgtgaactgataggggtgg

SEQ ID NO: 335999 - DNA, 866 bp, Cannabis indica
tttgctactaggaaaaatacgcactaccggtgaccacctcctctatacaaggatagctcccggagggaccccaacaaaagatgcgagtatcataacgacattgggcacaacaccaatgaatgcaaaaatctcaaagatgagatcgaaaacctaatccgattggggcacctctatgaatggatcaagaatcagctgcctcacctcaatccgggtcaagcgataggggcttttccacagggaacactagggggtgcagcaggagtattggctcctattgctcccaccggagatgccccgcaaatccccggtttaccacccagacctaatgggagagtggccatgatctcaggaggaccccatattggaggaacaacccgcaaagaattgaagcggtatgcgggggccgtgaagcacaatgaggtttgggaggttactcaactcccagctcaaaggccccggctgatggatcaacccatcacattcacggaagaagacgccaagacggtacattttccccaccatgacccgttagtcatagagacccccatcgccaataaagtggtggccagattcttgatcgacaacggaagctccgtgaatctacttttcaaagaggccttcactgctgtaggcctgacggaccgagacctctgacccagtcgttcccaactcacggggtttaacggaacgacacttatctcaatggggaaagtgagacttcccgtcaccttgtccccggataccccccaaagcacattcaagtactgaactttcgtggcggtagactgcccaactgcttacaacgcgatcctcgaccaaccggccctggtagatttcggcgcagtcacatccatacgatacttgtg

SEQ ID NO: 336000 - DNA, 646 bp, Cannabis indica
gggcatgattagaagcattggcatgtcagctagtgttggcatattgccacacatgcttatcttggtcacgagtgactaggtgagtgtcggtgttgagatgtgacttatcatagtgggaacctatggacagtgcaagcatcttggctagagagcctcaattgaaggacacactcatggatgcttgcgagcatgactcgacaggagttattcgagatacgagagtgtgcacgaggcactcgaatagttggaaggctaaccttggcttggagaagtcaaggtgctgcacgggtgttctgctgcctgaaaaggtgagcccgtgacagttggtgtcagagccaagttcatctcagtgggaggtgaacctagttggcctatcctagaggggatgtaggcgtgtggaaggatcgaaatggtttgaatgctgaaacaagatttcgtcgagccagttagtcttctaaagtggattagtagaccgagatagagttgagactgagttgcttttcttcgtgggaatattggacatcctagagaggagacgatgatggttgcttcgagttaattttagggatgctaataagataactaccacgtgcaattgtagagaggagcaacaaaatgtttgaaattcgtgttgggttttatgccc

SEQ ID NO: 336001 - DNA, 900 bp, Cannabis indica
atccttattagtattaacccttatttttctttgtaactgcagaaatgactttcttgaagtcctctcctattcttaaccgcaagctgaagcctgggacagcagcgacttcccctatcacttctcagaagaggaaaagcgatgtggtggttactcctgtcgtagattcttccaagaggcctgctaagggcattcaagagaaagggaagaaagtcgtgatcgacccagcggtgcgagctcgccatgtgatgtacctttaggataggtttgtcaacgatgaattccagtcgaagcttgacaagactcctactgaggaactgctgcctcgctccgcggagctagcctcgcagtttatggccacgttctcgaaggctttcgctaccgggtccaaggaggttgaacttgcgaagaaacatattgctcagcttcaagaagacaataagaagctgaagcaagatgcgtcttctaaggacaaggagctcgaggaactccgcaaggccaaggagcaagtcgagctcgaggccaagaatgatcagacgaagatcgaggagatgtctcgcgacttggaaactgagaaggagaatggaaaaaagcagtatgaccaggcggtctcggactacatctacaccactctctccaagattccagacttcgacttttcaatccttggagcagaagccgctgaaatggccgaggcttttcgtgcgatgtcgcccacgccaactcaaggtggtggggggaatcttctcgaggagactgaggtcgcggaggtggaggaagtcgagaacgaggcggtcagcaaagtcgcagatggatctgttcctgctgctcccaatgcttcacttttccttatatttgcttgtgttaaactctattttctttttttttagttttttttggtta

SEQ ID NO: 336002 - DNA, 691 bp, Cannabis indica
aataaaaagatgatagaaatgaggtccaaagtattaaaaaacagcattttcgaagctgaaacaacccaagaacaaggcccaaattaggcccattttccctctacaaccgacaaccacaccacgtggcctcctcccattcgtccgcatctgccaccgctagcaccaacaggggcttgtcccactctctcccttccaggcgcgcgtgaggcgcacgacctcaccctggtcttgcgtgcgcttcatgttgtgccccgcaaatgtgcttttttcggtccgatccctccagctcctaaaaagtcaacctgctcattctttcatccaatcaagcaatgacacgtggcaccgcctcacccaaagcaaccaatcagcgggtgccacgtgtcacttcggttataaaatttgtgtaattgcatttttacccacacgcaatttgtaataagtttaattgcacattagttcatttacccttttataaatagaagcttaggattttagaattcagttacagtttcagagtttcagacagaaatatccaaagaaaacgctctaagcgctcggtgttagtttaccgcttttcttagttaattttcttatgggtttctaagttcccttgttattaaaaaggagaatgaaagctagtgtatttaattaagtatttatttttattttgattctcagtacaatatatgct

SEQ ID NO: 336003 - DNA, 1027 bp, Cannabis indica
gttttatttgattaaaacaaaggacatttgtctcattttcaaggaaaaacaaagttcaagaaaaatcacttttttctctcaatctcactctctctttcggcccccctttcagaagcaagggttttgtgttttcctttgcaattcaagttgttttatcaaggttttagtaagctcaagttcttggtaagtttttttgtaacttgttctttatttcttgagttgtaaggaaaagaaattttgcatgttttgagtttatgcttgttgtggtttctgtggttgattgttgttgtgttcagagtttaaagtatgtttaattgtgttaatttaatcaggttataatggttgtcggttggatttaagtaagtttggagtttgaactcaaaacttgggttttaatggtgaaatggtgatttagctactttggatgttgtttgtgtttggggatgttttctgcagttatattatgtttatttaaagtgatttaagtaggttttaagggctaattagtcggatgagcaagcttggagttttcaaactcaagcttggctcatcaatgatgatttttgtatttgtgcattaagctttgttttgttccactcaggttgaccggcacacctgaattcggaatcgaggtaagattagtataacagcatgtatatgtatttacatgtttagcgtgaatgttagtgagcctgttagattacattagatatgtatgttggctttcgtgctgtttgacagtatcacatcggtacagctagagtatgactagcgtaccgagtataggctgatattatagtcattagcaccgtactatttgacagtaccacatcggtacggctagagtatgactagcgtaccgagtataaactgatacagtagcacatcagtatagctagagtatgactagcgtaccgagtatacgttgttactatgtcaaaagtagcgtcgtacgaacattcgtgactcagtaccgtgtgggacacggggattagggttgtggtcaggggtatgggcgtctgatcat

SEQ ID NO: 336004 - DNA, 572 bp, Cannabis indica
tggatggacattggatgatattggattggattggatcggttatccattggatcggatgtctcatccaacatccgatccgatccaattggatttttaaaatttgcatccgattcgatccaatttttttggatatccgattctactggatcggttgggattggatcggtcggttggaattggattggatgactttctacacacccctatcgtctcttgcatggcagcaaagagttgttcctagttctgagggggtggaggatgctcttccccaccacctaccccgagttccagctcgcggtttaaacggccagatcgccactgcatgatccaatatcctgtaacccaaaacctcaaccatttagattttaaacaatatcaacatcaatatgcatatggtattcacacactgcttcttcccatcatacactataattgtctaaacagataaggcaataacaaataacataaacacttactataccatgagtcgacctgtctttgcagcaaatgtacatattcaacccgtcttcaggacctttaaaaccatggctgctctgataccaagttgtaac

SEQ ID NO: 336005 - DNA, 443 bp, Cannabis indica
tgtaaaaaaaagatgaaaccttaaatttgcaagcagttcagtagtttggagggttttaccattcaaattagagcttagagggctaagtgcaagaggagtaatagttgagagggtttagtcgcaaataactcattaagtaattgttatcaattgaataagtgcaatactaattggacgtaaataaaaactatcaaagcaatatttttattttagcaacctagtctatttcaattatcaaaatcaaatggctccctatatgcatctaggtccaaaagcaaacatataggctcaagcattacaaaatttacctgttacaaattatttatttgatcttgttattccaatttttgtcctcatgatggtgcatgctaacgtagacagaaccagtgccacatggcactacaactcactaaaaggaaggccaagtcagcacccgagcaaac

SEQ ID NO: 336006 - DNA, 501 bp, Cannabis indica
agattttgggtatcatctcccagggctacctttacggcagctatttcacgctccaacttggcattatgttagtttacttcctccaattgacgcctaagatggcgattttctaattccacgattgatatgtatctggttgggtcgtaagcgccatcctcatcaacctagttagggagtgaccgattgtttctcttccaaggtccgtcaagccaggggccctaatactaggtcttcctggggcttgcattctgttcatgcgatgactcgacagatccctgagaactcaatggttcttttgttggattttatgccctaaataaaactcaatttcaatgtaatctttactattcaaatatcaataaagaaacagaagtattttcatcacttattgtgtcatttggttgatgttatcatttatttgtttatttgatttataaattcatccaaatccttatcacatttatatgacacagtggaaagtaatcaagattatgtgattaa

SEQ ID NO: 336007 - DNA, 710 bp, Cannabis indica
  modified_base (221)..(221): a, c, t, g, unknown or other
gacagtgtaataactagataaatgttaaggaataatattgaaaagaagataaatatatcagtactggtggtatagtggtagagattttctacatctttctttgcttagtttaagagttcaaaactcattactaacgtttttttagaaaggaattaaaggcctaactttttcaaaagttagtttattgtaggcggtgtcatttctgtaatgagaaccctccngagacagtctaaccttagtaaaattgggccaataaaaatataagtttttttgggttaccttttttaaaaataaataacatttttaaaaattatttaaaaaaaaagtgtatatttattaaaaccaattatgaatcatgttgagaatcatgaggttccgtctcaaaactaattagtgatgagtgaagtagttcatgttcttatatatgactcaatacttttacatttgatccatgcggaataatattatccaatataacccgctttagcctaggttacaccctgctttgagatagttaccaatgactcaattaagacaaattaagttacggtcccaaaattattaaaagagaaatgctaaagggcaccagtggtgtctagcaccctcttatgtgtcagtatcgctattggtccaactaagtatcggatcccatataatttaatataatagcttttgagtagtatcgctaaccaatcgcaaggtgacatatc

SEQ ID NO: 336008 - DNA, 576 bp, Cannabis indica
catacaacgtactatgcagtacaatatacttttcttgccttttaatcaaggttcatacatttcagccaacccaagtggagaactatccccgatgatcatggccctatgtcacaacacaataaaccaacaagtgtttataccaaaacactgtttaatattcacataagacaatctagggttttctacaacatactgcggtataaatacactaaaataaaacttatattttggctctaaaacatacaccatactgtagagctcgttgcaagcttcaaaaagatatatacaatgtccaaaacagacacccgagtcaaaagttatgacagaaatacgatttcaaatctcctatgaatttctaaaaaccattaaactcgaaaattccaatttttgcactcactgaaacactacaaaaaattatccaaatcactccaaacttcacaaggtgcatatataccataaatattaccatccttatgtaaaagaaatataaatcgagcccttaaattaaaaacgcctttaacgttcaaactaagctttaaaaagttccaaatcgatttctaactcaaaatcatctca

SEQ ID NO: 336009 - DNA, 662 bp, Cannabis indica
agtattccattcaatttttatctattttgagttttgaatcttgagttggggacttgttgcttgctccttaaaaatttggaagatgctgcctcattaaaagcaaatgactaaggctgaattattttaagttttatcttagtttttggcctgtgtttgagcataatttctcttttttattattttcttttgttgctgaatttgaatatttcattactggtaatccatgtgaacttttattttgtaagttttactataattgttttcttattgttatttttcattttaaggcttccctcaattagttgcttcctagaaatgtaatggaacctttgtcatttttcttacaaatctgctcaacatattctactcgcaaagcgaatggaagatgtgttagagcaagcgttcgaacggggatgcccttggagacaacattcaaaattatgacaacaccttatacaggtaaggcatctttacattgagaaaatggtgagtatatatatactagacaatataactaaatatacgtgcaatgcacgtaatttctgcctagtatatatatatatggaggaggaggttctaatggttacatttttattgtaaccggttacattttttttaaccattggatcactattaaatggttgtgattaatttggaaatta

SEQ ID NO: 336010 - DNA, 579 bp, Cannabis indica
gaaactgggggaaaataaatcatattaataccataaagtaatatcaaacaatatccatctaaccctaataaagtgttcagctacacatgttcatggaagaaaaatcacacatattaactttaagaaagagaagaagatagagaataaaataatgttgaaaaccctcttcagattgcctccagtagtgacttctgtctctgaaattcgtactcctttttccctctaaattgcttgacttaaatcaactctagttcaccctttatataggcttttagggactaaaagatataaaaatgcacatgttaaatgcctattcgaattaggaaactaccaaaacccacgtgagagaaaaatgacaatttttgggtagtttagggggcgggccgcggccccacaagggctgggccgcggcccgtgttggagtttcaccagatggcttcgtttcgacggtgatttttttgatacgtcgactgatagtattttggccataactctatcgatattactcggaatcagacgattcaagatgttccggaaagataaaagagagatctagaacttttatattttgagtttttt

SEQ ID NO: 336011 - DNA, 506 bp, Cannabis indica
aactttttgcctttgcgatcaaacgggattgaaccagatcagcgtgtatcttcactcatcacttcagcaagacagtgggatttggaagtgctaaatgcctcttttcttgcctctgatgtggataaaattcttcaaattccattacctattttccctactgaggatactctaatctggcattttgaatcaaatggttcgtatacagtgaagacaggttatacattggccactaatttagaagaacagtaacctgctgtctcgggcattcaaattcaaagctggtggaataaattctggtctttctctctcccatcaaaagtgcaaattttcttgtggcgggctctaaatgattgtcttcccacagctgcaacacttcatcaccgacatattgctgattctcctctatgtccaatctgtaaaacagctgctgagacaactactcacgcgttgtttttctgcaagagaccaaaaaagatatggccaacttcatccttttcactttccaa

SEQ ID NO: 336012 - DNA, 953 bp, Cannabis indica
gagctgcacttccactcaggatgaccggcacacttgggcacggaacgaggtaagatagcatgattattatatatatgtgaatgaatgcatgttttggatgttgcactactaacactaatttgtatgccttttaaagagtgttagtacagtgtaggttatttacggtgttaccaacacgagtacctaagggtacgtcgtgcatgaggtacaacacttagtgattcctgggagtacaataatgactctaccaacacaagtacaaaggtggtactgtagtgcatttggtacagaggtcgtacttcccttaagaacgttcttatccatatggcgagctcaactactgagctcagggcggcttaagcataaagccgaacttgcatcacctatgtttatgacttgcttatcttactgagtctgtggactcatcagtttgctaccttgtgtaggtaaaggaaaagcgaagctagaggaacagcgagatggagctcggcagtgattgtacatatcgcggcagtgcaacctggagggtttcagtcttttactattttgagtctgtattttgatgttgcctgttcgcgtgtttaatacaaaaaaatattatatgtatattctagtaagatacttttaaatcatattttgataattgggatcccgacctatattttataaggttataatatataaacatcatcttttgaatttagtaaattaaaatacgggcgttacaaaatctatagattccatatctatatttagcgctcccactcaattgtactatcatgttcccaaaatgtacgtatcaccatgaccaaaaagtaggcttaactaacaaatcaaagaacgcgaataacactcttgagatcgaacctaaccatgtcaggattaagatcatttgatctgtgatcaactaggtgatattgaattgaatagatattacgataaatttatcatat

SEQ ID NO: 336013 - DNA, 556 bp, Cannabis indica
tgtttaaatggttgtcgtatatatttctttagcaaaactttttacaacacggattcccggaacacagtttttatgccgttataatatccgtttttagtgttttattttagttaattttttaatattatcacaatttttaataattaattattctattggtattaaactagtttataaaattacacacgtggcgtccctatagattagggcgttacaaatacttttctaatgccctttacaatgaaaatgatggctctatatatagccatttacacggggtaggatacaaaataggaaacattctaaaaatttcctacaaataaacatagaaaaggaaaaactgacaacaaatggacaaactaacaaaatgaaaaatagagaaaaggaaaatctgacagcaaatggacaaaccgataaacatagaaaatgacaaaccaacaaacaaacaattagataaaaatcctaaaaactttatgactatcatgaatttttttcacttattgctatcttacacagctaagagatatggaatctctttgttctacttattagcagt

SEQ ID NO: 336014 - DNA, 542 bp, Cannabis indica
atgtgggtttgaagctcaagattcaatggctggaggtatttcgatccttattcatagtgtatatatgtttgattaattccgcacttaatacttaaaaatatacatttcagtttatatatataaatgtctaacagaatcttgagttgattcctgtactgtgtgacttggtttaaccagtgaccataatatgaactggtactctggtagagataaatgtggctagctatttttgtaattatctgtccaatttaacatatatatacatagtggggctggctttatcataattgtacgtaggttagagtgaggagtatattacgattatatatgtctataatcgtgcatcgtgtctctatatgggacacgattttgtcccaatgatttactttcacagaatgtattccgtagtacattagagtctcagggtacattaaaattaaatgagtctcaggtatgttactattttttaaccctaattacccttagatcaatctcaaccctcagatcaataactctcccatccaacggctgccgtacatcac

SEQ ID NO: 336015 - DNA, 496 bp, Cannabis indica
aaaaaatggaccaaaaataccacctagtggatgccacctcaggattcaagctgctatccttcatggacgcctactctggttacaagtagatcgagatgcatgtcacagatcaagaatgtactagcttcaggattgacaagggggtatactattacctggtcatgcccttcagattaaaaaacactggtgctacttatcaaagaatggttaactgaatgtttaaaggcctcctgggaagaaatatggaggtatacgtagacaacatgctatttaaatctaagacatgcgtaggccatccacatgccctcacggagtgcttcaaagtggtctgaaggtatgagataaagcttaatcctaagaagtgtacctttggtgtcaaatcaagaaagtttctaggatttatcgttagccaacgagggataaaggcaaaccctgaaaaaatctaggccttgctgagtgtcacgggctcaccttttcaggcaacggaacacccgtg

SEQ ID NO: 336016 - DNA, 565 bp, Cannabis indica
ttatatttaagtctttattataaatatattaataattaagtcatttaattataatatttataataaaattctattattttataaaaataaaatttctatcttttctaaaattaatttttgaataattaattgctaaaagattgtaatttagtaacatgttcaaaaaaaattaattaatagttattagtaatttaattttaattaagatttataaggacatagagtattaggttacaagttatttatttatttctttcaatttctaaattaatcacaactattccatagtggtcaaataattaaaaataaatataattatgatgattgcatatttgatttaacaattgaaacttgaaataattacataagacacgacttttacgaacagattaaataacataaataatacaactgaactataacctaaccatctctggattgagatcatttgatctaagattaactaggtgatattgaattgaatagatattacggtaaatttattatatcttatccaagttcaatatcgatcccttctgatgcatactccatacatccaacccaa

SEQ ID NO: 336017 - DNA, 764 bp, Cannabis indica
cggttcactttgtcatttaacaaaacatgattcaattagtaatttttacaaaatgatatttaccctcaattgtatttgagtaaacaatccggtgagacttttcattaacaacgaaaaatattattggataagactacttaacaacaatataataaattaaactcgagtagaatgtttgaccaaccacttgaggctagctcaagtggccatagatgggtgtgtgagggttggagaaatataaatgcttaaaataaaaaaaaaaaaaaaaaaaaagaaatgtttgactatatgaagaataaactccacatcattttagtttttctaactccaacgatatcaaaatagacaactgtaatatggattttttattttggatataatatctctgaagaagacaacagaaagaaaacactatttccctattacatatagtcgttgagaagaagagtggccttggaattggtgatcaaattaaagcaaatggcaataattgaagctccaccagctttgcttgtttcagttcttctcctctttccattgcttattgcgttaatacagaaatgtgtccaaaaacaaaacaagaaccttcctccaagccctccaaagctccctttcataggcaatttacaccagcttggttcattgcctcaccaatctttatgccaactctccaagaaatatggctcagttatgcttcttcaccttggaaatgtgccaagtgttattatatcatctgctgaggctgcaaaacaagtcatgaagac

SEQ ID NO: 336018 - DNA, 848 bp, Cannabis indica
cactagctttttgtgtggcagattcaaaaaatgatatctcatgggaatagctctttgaaaaattaagagccacatttggtgttagacaagaacagtgtgttatatctgatagacacgaaagtataatcaaagcagctcaaaaaatcttccctaaagtagaacatggatattgtgtgtatcacctactcaacaacttgaagagaacattcaaagaaaaaaaatgcaaggttctttgaaaagctattttctcgtgcaccaaaggcatacactgctgaaaaattcaaatatcacatgaaagagctcaacgccttagacaaacgggttcgaccatatctacaaaatattggatatgagaaatggtcaagattttattctaaaaataaaagatacagtaccatgacatcaaatgttactgaattattaaatgcagcaaacctgacagctagagaactacctataacaacactaatggaagctttgaggactttaatccaacagtggacatgcaaaaataggaaaatagcacatggaacattcataaaattaactccagctgccgagatgaagatgaagggcaattacaaagctgctttgaaattaaaggtacatgatttttagtaatcagaattacatcatgttgtattaatgtttttttttatgttacaatgccaaaatatatacaaaataaatttgttcttaggttagagcatcaaatgaacacatgttcgaagtgtacaaagtaaaaagatcattggtggtgaatctagaagaaaaaatatgcacatgcaataggtttcaaatcgatgaaatatcatgtgcgcatgctttaacagtgatgaaagagttgt

SEQ ID NO: 336019 - DNA, 656 bp, Cannabis indica
cttatccatcttaataggaaaaaattaagtgttaaaagcatctcatctcgatgtatctcttttatttgcattagtgatgcgagatgatttgcacaatatgagtaacgcgaggcggttgagcgacataagttcttctcttctcaagagagggttaatgattcacgacgtctttgactgtctcgtcttgtacattttattactctgcctgtcccgaggtaaacatgtgtctcatcaatctcagtttaatagttattattcttatcttgcataagactaaacattcaacgagtttgaatattttctatcaaacttgtacttaattgtaacgagttattttaaagtgcatttaatgatgtaatgtcgttattataatatttgatatggttcaaattctttctgttggacatgtgtcaacttctggtacatagccgaattttgggtataataataacctacttcccttttagttgtattgatttgagagataacaccactcaaattataggcttttaccttgtaatttctagagtggctctctatgaatagtataatagtgagaacaatgtaaggtgaatctcaaatgagtgagatgagaaacagacttagtctctagttcactgcaggtgtcgtgtagtagagagagcgagagagagaga

SEQ ID NO: 336020 - DNA, 584 bp, Cannabis indica
atagattccatatttatgatcaatgctcccactcagttgaactaccatgttcccaagatgtaaatatctgccaaaaccttttgttggcttccacgaacacctctaataacataaataatacaactaagctgaaccttattataccaggattaagatccatagacctaagatcaactattgatattgacttagaaagatataacgataagtttatgatatcttatctaaaatcaatatcggtcccttccaatgtatactccatacatccgatactggtaaacattgccaataccctggaaaggacataacacttatccaaggtgtaagtttaccttatcgccgattatcatgccagtctaaatccagcgaactgactaatcatgggaataaacttttgaacatataatcatgattatattccattgtgctgacaatactacaatcataaacaaatatatatacatatgtttacatatattttggacttaatagaacttatacattaaacataatcatgaaataaatcatgtgaaccatgcaatatagaatgatttctgatcttttattaattagtaaatctgatt

SEQ ID NO: 336021 - DNA, 313 bp, Cannabis indica
cagcttatgtaaaatgagtactctaccatttactttatggtaagagtatccttaccataaagtatagtgtctacaaagtgttcattcttaccatgtctgaggtcaaagttgcccttaactcaaaagaaatacagaagaaggttgatgacagaactgaaactggtggagaaggtctgttttctcgaggaagatcaaaaagaagagatttcaagaaatcaaagaatggacacaagtccaattccaagaacagaaatgcagtgggaaagaaatgctattattgcaagaaagaaggtcactttagggatgattgtta

SEQ ID NO: 336022 - DNA, 568 bp, Cannabis indica
gaaaaggtttgttgctcggagtaaaatcagcattgataaaatttctaagagcaaacctagacatttttgcatggtcacatgaggatatggtcggaatcgatccttctataatttcacatgtgttgaatatcgaccctaatttctggcctgttcaacaaaaaaagaaaattgttggacaaggagtgtaatatcccggaaaataaataatatttaaataggcatattttattaaatacgtaatgatgttggtaatgaaggaagattatgatcttacttagggtaattattgagaatttagtcaatgaaataaatagcgtaatttattaattacggagattatattgggataattattgagaatttatttaataaaatattgggcccgaaaattttggttagaaatgtcacgacatttatggaagaattattttgagaatattccgaactaggttagaaattttagaatgtcggtttaatggaattagccaaattacaaaaacgccctaagttattttaaagtttattgttttttcattgggggtaaattagtcttttgccctttttactt

SEQ ID NO: 336023 - DNA, 807 bp, Cannabis indica
gtttctagggtacatttgttaatgaagagactttggctagtctaattaataaatatatcaaatgacaatattatttaataattaattttagttattaaatagttggaattggcatttaaatggttgaatttgaaaattgacgtttttgagaaaatgagatgcagaaatgataaaacagcaaaattgtaaaagtggggcccaatatccaaagcccaggccggccactagtgtaggcttttatcacttatttattttttttcattattttaattccaaataattctaacctaaccctaggtggcatcctataaataggtagtgatggcttcaggaaaagatgatgcatcttaattccttcagagaaaaacttgaatgcctaaacctagctgccactctcattccctcttattcactattgaaactgaaccctttgagtgatagagtgagtgcccacacacatcaagtggtacctcaatcatagtgtggaagatcctgaagaattcaaattcaacaaaaggacattcgggctcagatcttggtgatactctgcgacagaaaggataaaagggttagagatctgagtggaaggagacatcatattctgctgcaaccactgtaaggtttctcatactttatatgtgtttatttattatcgttttagaagtttatatttaggatgttaaacaacatacttgttagtaaatctaagatcatggtaaaatatttccaacaactggccttggagccatggtaattgatttaattttaagaaatttggacttaaaacaatttgtgtgtgatttggat

SEQ ID NO: 336024 - DNA, 533 bp, Cannabis indica
tcgtgagtagagtacctctgctcgtactcctttaactgccgagaagcataagctattaccctcccagcctgcataagcacacagccgagaccctgtctcgaggcatcacaatataccacaaacttttccttatctgaaggaagagttagtacaggagcggtaatcaagcgttgctttaactccaggaaacttttctcacaccgatcagtccaaacaaacttctggttctttcaagtcagctccattaagggtacaactatctttgaaaaaccctcaacgaaccgacggtaataaccaactaaacccagaaaacttctaacctctgtagccgatttcggtgctcgccaatcccgaacagcttcaattttggctggatccaccatgatcccatctttatccactgtgtgccccaaaatgagacacgagataaccagaattcacactttttgaatttagcataaagcttgtgatcccgtaacctttgaaaaatcgctctgagatgcaattcatacttttcttctaattcaaaatac

SEQ ID NO: 336025 - DNA, 1161 bp, Cannabis indica
tatatatatatatattatgtctaaaagaatatgcatcaactaatttttttttacaagtgcatcaatttccttaggcatatagattaaaacatgttgctttaggtaattttaattgaacatcattcacaacattacagaatccaaacctagatatgaaaatttacaaaattatatgtatttatatatatatatatatgtatatatgagatgtggaaataatactaagtatatatattgcattgagatcctattatttgatttatttattggtattaagttatgctttccaacttccctaagaaaataaaaggcacgcatgaaattctcaaacaaaaagatgaatattttttttttaaaaaaaaaatgaagattttttctatccaaataaatcttaatagagaattaattaggaagacatgtgtgaatttttgattattgggacagacaatgtctcatttattggtattaaagtgcatctctgttgagaaaaaattaattattagaaagtattacatgaaataatataggccctagctagttggtaaattgttagtatattccactaatataaatatataaagttattttataaatagaatcaatcaatgaaaataaattataattaaaaataattctattgaaagattggcattaattcaaaaagtgcaagactatattttatattataaagggtgtgtttaaaagtaactgtgtaaatactaagtatggtaattactaaggtggtaattacacagtgtggtaattacactatattttaaaatgcagggtttgtttggatatgaggtggtaattacatatgaattcctaatatcttgtttggcaaaatagtaagtaattacatgggaaaataatattttttagtagctaatgtttaatatggaaagtttttagtaattacatagtgtaattacattcaattctcatgggggccatgagaactggagagtgtaattggaacccctcaattacttccaattacacagttatagtgtaattacatggtcaaacaaacaagccaaattgtgtaattacctccaattacacacaaatccaattacattgtggctttccaaacttagtatttttattgagagcatttgttgactagaaaaatagccaactaactcgaggtctaataaa

SEQ ID NO: 336026 - DNA, 609 bp, Cannabis indica
gggttcgggtccacttttgggtttcagactgggttctggtcttggtgtgggttcgggtctttgtcagggttcgggtccagggttgggtcccaaatccacacaccgactacgggtttagtccaagccctgggtccagatccggatgccaatctagggtcccagtcatgttccatttttggtgccggatcacgagctgggtcctttgttcaagttaaggtccgggtgtgggttcgggtccttgtcagggttcggctctagggctgggtcccaaatccagacaccgactacgggttttgtccaagtcctgggtccagatccgaatcccaatctcgggtcccagtctggttccatttcaggtgttgggtcgcgagctgggttctttgttcaagttaaggtctgggttgggtaataggttccggtccaagttcgttttcccgagtccctatcttgattttgggtccaggtcccagttattgtgtgggtttggctcccgatctaagttcgggttcgcgtttaggtctctatttaggttttgatttgggttcgggtttgggtttagttcctggtcctggtcctggtcctattcctagttcatttctagttccattt

SEQ ID NO: 336027 - DNA, 999 bp, Cannabis indica
ggtaataaataaaagatttggacatccacataattaatactatttataacactcccccttggatgtccataataactgcctcattaaaaacctcgccgagaaaacccagtgggacaaaactcggtcaaggaaaaaagagtgcagtatgaaattactccccctcattttggcattcatggagatcctttaatcgacgcattccaatcttgtgaaccatcttctcaaaagttgatgttggtaatgacttcgtgaataagtctgcaagattatcgcttgatcgaatttgttgaacatcgatatcaccattttcttgaagattgtgtgtaaagaagaattttggtgaaatatgtttagttctgtctcctttaatgtaccctcctttaagttgagcgatgcaagcagcattatcttcatagagaattgttggtacttctttattagatgttaatccacatgttcctcgaatatgttgtgtcattgatcttaaccaaacacattctcgacttgcctcgtgaattgcaagtatctcagcatgatttgaggaagtagccaccagagtttgctttgttgaccgccaggatatagcagtgtcaccgcaagtgaacaaatagccagtttgagatctggctttatgtggatcagataaatatcctgcatctgcgtagccaataagttgtgacccacaattattagaatagaataatcctttatcaatagtaccctggagatagcggagtatgtgcttaatccctttccaatgtctatatgttggagcagaactaaatcttgctaataaattgacagagaaagctatatcaggtcttgtacaattagcaagatacatcaatgctcctattgcactaagatatagcacttctggaccaaggagcttttcatgttcttctctaggtcgaaaaagatctttttctacatcaagtgatctaactaccattgggctactcaatgggtgtgatttattcatataaaaccgtctgaaaa

SEQ ID NO: 336028 - DNA, 1111 bp, Cannabis indica
atatatatatatatagatatatagatttatgattttatctaattcttattttataataagtgataagtataatttaatttttaaaactaatattaatatgtcaacatattttttttttgaataaaagtaattcattaaatagcaatatccgctattacaatagactgaagagcagaaggaacattgctctcagtaaaagacgatcagaccaaaaacaagcaccgcgagcaacacaatgtgcggcttgttagcagatcgtttaacatgacaaatagaaacattatgtaaagaagaaagaatcaattgacactcctgaacaaacaaaccaaaaatcgatggaagagcaaccgagctattaagagcttgaacaacagcaatacaatctgtctcaactagcacattggacaaattcttcgacttcaaccaactaagggcctccttgacgctcaatacttcagccacagccggctgacaagcccaagaatgcaaagaggaactagcttcgattaacttcccatgacaatctctaatgaccatgcccgtaccgtattgagttgttgcctcaaaaatcgccccatcagtgttaatcttcagcttcctagcaggcggcttcacccaacacacactgctaccaacaacagtagcatcaaacaacagcgattcaaacctgttctcttaagccaatagccaactagaatgacacgaccttgccactcaaaccacatccgcagcctgagaagaatgaccctgccaaagaagctcatttcgagctttctaaatactccatgctaccatcaagagctcatccaccaaagccactctaccccctgaaacgcttaaaccaatcggcgaaggtagtttctgcaaaaaactgcaaccccaaccccacaatcgacctatgccaacatgattgtgcaaaatggcagccaaccaaatcatgaataatggtttcttcatcagaattacaaaacacacagcgaggatcaacaggaacatgttttttacgcaattgggtatgagttgggagacaccccgagatagctttccaagcaaagtgaagaaccttgggggggactttaactttccagagaaccttctgttgggttttatg

SEQ ID NO: 336029 - DNA, 571 bp, Cannabis indica
gaggtaactttctttggtttaatctttacttattactgaatttagttgtaagttgagcatgaaaagggtgtggtgttcttgtttatgcatgttgttgagtttgatgttgatcttggtgaattgggtgtgaataacatgaatttgttgtaggtttttaattgttgagttgtggctgagatttcaagggattttctaggttaaaattcatgtttgatttggtaataagctgctggaaaaatattagaatcaagttgggtttgaagcttaagttttgagcttgaattcttgataattgaagcatgattatgtgtattttaggcaatctgaacttatgaggttattgctgaaaattggtgtttgaaatatgaattttaatttcctattgattgctagcaaccttgtttattgttttgagagtttggatgagatttgggatgatttggttgagattggtttctgaattttcgagttttgatggttggtttttgggtttggaacccaggtgccgcggcttggtctgagcatgccgcagcccacccctctttggtggaacctgggatttgtcccaggt

SEQ ID NO: 336030 - DNA, 1098 bp, Cannabis indica
ttttttaaacctgaaacccatgaaactgaaactcgataaacctgcccgatgttcagccctaatttagactgacatgataatcggcaacaaggtatacttacaccttggataagtgttatgtcatttctaaggcattggtagagtttaccattatcagatgtatggagtacacattggaagggaccgatattgatcttgggtaagatatcataaacttacccttatatctttctaagtcaatatcactggttgatcttaggtctatggatcttaatcctgataaggttaggttcatcttagttttattatttgtggaagctaacaaatggttctggcagatatttatatcttgggaacatggtagttcaattgagtgggagcgctgatcatagatatggaatctatagcttcttaagtatttagaagtgatttctttcgagcttggctgaatagagataaataattgtgatctcatttcagtaattatattactaaaatatcatttataggtagctaagtgttttaaggataaaatacattgaagggtagaacgataaatatgtccctttttgatgtagatcatctatagaggatttttgactattagaattgtaacaatagataatcataacatatctatatcttggtatgtatagagcattctatataattgagagtctaattcaattccaaatatatagtggtgcaaggcagaactaataagttaaaaaaattattttgtaaattctagatctacttattgaaagctcggttatataggcccatggtcccctcactagttgagagaatactactttcagactcatttaattggttttaattaatcaattataattctaaaactagactatgtcttatttgtaaattttcactaagtaaggacttaattgtgaaaaaaagaggttttggggtctatttattaattaagagactttgtgtggtctaattaataaataatataaacggtaattttatttggtaattaattataattattaaataaatagttttggtatttataggattgaattagaaaatatgatattattgaaagaagaataagtggttgaaataaag

SEQ ID NO: 336031 - DNA, 693 bp, Cannabis indica
tctcttgctgaatttctaacctgtctcttgcaaagctgcttttatctatttcaggtatcttgagtgcatgcgccgccaagggcaagcagttgtattacccgtcgaccctgaaatcgagaaaacttgtaggagaaacaggaggaacaaaaggcaagagagagtttcagcacctgctgaaacaccagaaatcatggctgacaacgctaatgctgcgaataatggaggcaataacggtaataatggaggtgccgttgaagatcaagctaatggccgcagcttgagagattatatcctcccaactcttacgggagttcagtcatgcattaggccaccggcagtggatgctaacaacttcgaaatcaagcctgccatactacaaatggtgcagtcttcagtccagtttggtggactcccttctgaagaccccaatctgcatctatcgaacttcatggagttatgtcagaccttcaaagtcaatggggttagtgatgacgccatccgtttgagactgtttccattctcactgagagagcgagccaagagttggttgatctccttgccaccaaattctatagcaacatggacagacttagcaacaaaatttctgtctaaattcttccctccagcaaagtctgcaaagctgcgaggagaaataaacaacttctgtcagcaagataatgaatctctccatga

SEQ ID NO: 336032 - DNA, 549 bp, Cannabis indica
attatttatttttaacttacataaaaattttatttttgaaaaaaattctgaaacaaaactataactttaatctaatatataatatatattacatatattataattatatataatcttaattaattgaataaataaataataattaaattttttatattttaatttttattcaattattaataattataaattaaaactttaaatacaacattaaaataatttttgatatcatctttttcgttgggtaccaaagaaatttagtatttttaatagtgaaatgtatccgatatttttcttacatttaataacctcccctaagtaattttctctaaagataatggagtaataataacaaggttaattatgatttttgtcccctaaactttaacatgtacaaaattatgtcctttgaacttttctgaccgttaaaaatttcccttaaactattgatcatgagattgttagatttaaagacttttgtctaatttcattcaattttactatttcaatgatggtttatgtactcatatgctccccagactttgatat

SEQ ID NO: 336033 - DNA, 604 bp, Cannabis indica
ttattatttactttacattaaaactataactattttgtgggggatttttactattttgttatataattatttaactaaatagaatatatttaatttttttttacactaacttttttttagtgggggctaatcttattagtgtgtccgtccctggttaagagattatctaatttttattgtttttaacctataacaggattttgataatctcacggaaactcatgataaatattatgtttggtgtgattttgtgtaaaaaagataataacattgtatatatgataatgtaatgtggtagcaacaatgaataatggttttataattaggttttcaaattaaatttacacaaaaatatctaaaatgtatatatatattaataattaatatattataaaattcaaatatacatgttaaatgttatttaatcatatatacaataaattaatttattgaatatatatatttatgtaattagaatagtctggtggcagaatagtatgatactaactaattgattttattagtttttctatttctttggtatataattttattttattttattgaaaaaactaaatcaataatcaataataatatataatta

SEQ ID NO: 336034 - DNA, 686 bp, Cannabis indica
atagacaaaatagagagaccacaaagaatcacaaaatcaagcatcaaatgcatatcacaccgtctactagacccctagctctcaataccaatcataaaaaatgacatccaaaaccgggtagtcgcatatgatatccaccataataccggggctcagattttattcactccatgtacagattaattttaggtctttcacctacaggtgagtgcactcctgatctacctatgatgacacagagactaggtcgtgaaacaacaatatacaccgaacatgattaacatggctctcatcagtataaccaaagcaggtaagtaataagcataacaaaagaacatattccttttaatttttttagaaaatttggcagcataacggctgtattttaaataaacccaaaaatcataatctgcatcaatatttgtacaaagatatatttgacactcaatgccccagaacagtccagaaaaatatgcagtttaggatttcaatttttcaaacaatttgcaaatcataaaagtttagaatatgtctagtgttatacaacacatataaaaatcaagtccaataatcaagttgagtccctacctctcccaagtcaataaactttgtccaaaagacgatcttaagctctcaagtctcgagctccaaatgtttagtccaatcttagatattactctcaccta

SEQ ID NO: 336035 - DNA, 568 bp, Cannabis indica
atttttagtgtaaaaatttcttagtttttttccctacaaaagaaaaaaaaatactctttattttttgaaagcaaaaatactctattaaattaaggctagttagaattttattcccaaatttattaaaatttttaggtgttagagcatcttaatgcaagttaacactaattgttgtttgcttgaccctagggctgttcattggatcacatccaatgtttttggatccatccagatccaatccaactacacattagatgttggatttctctaaccgatccaatccaatactgtaagctcaaccgaaccgatctaataaaacattggattgaatcggttccatccaatggatgaatccctgtattggatcgggttcatccaatacttttgatccaatattttctagaccggattggatccatccaatatttttaatccaatattaattggattgattggatcaatccaatccaagagtgattggatcaatccaatccaatccaaaagtaaaacttgatttttcacctaaatggctaatatatatacttttttattttattatttttcctct

SEQ ID NO: 336036 - DNA, 723 bp, Cannabis indica
aaaaatcgtttataacataaaacatttgaataacaatgtgtatatgataggtttatatacacaattatgacattcttaacaattagttttataaaacatatcgtttataacataatttacaattagtcactaaattcttaaacaaaaacccctagaacttaaaataaaactaatatttacgtggctcgctacgtaactctcttctagtatataagaaacatactaaccaaacttttatttctacataatttttttttttatcttttttagaatttgttatattttgctaatacagtagaatctctatttaagaatgttacactagaaaaaaaattaaaatactaaaaaatatcaatataacaataataacaataaataatcattaatactatatcataatagaattattttagagtaattataatgtttacacatgtactacaatttgaaataaaattattaattttacgtaaataaatttacaaaatatatgtatatatttcgttaaaatataattattctttgatacaaccaacactatctctacatccaactgatcagttagttaatatcgttgtaacagtttttgtaacaaattttagttttttctgttactctgttcttcttcttcttctttgtatctccatctatataaatgaaatctttttccaaggctgagcagcttttgctagtcttaaattgcaatctcatagattgaattct

SEQ ID NO: 336037 - DNA, 843 bp, Cannabis indica
  modified_base (790)..(790): a, c, t, g, unknown or other
acaaatctatctttttcataattagactttgacgccggtgttggcggtttcgacgatgaagcacccgattgccccgttctagtacgcttggaacccatgacacacttcaaaattaccacacaaaaattttgggaaaaattcggcagcacttccccttaatttcttcacttcccaaaaatcacaaaaataccacaataatccacaacaataatatttcacaaatattcaacaatttctccaaaataaatccacaaatccccaaatactctagataattattcaaactttcggaaaactcacttaactaatcaaagttttgacaagaaagagacttactaagcgagaatgccgttcatccaccaccattgttgcacatccatggagaactcaaggttgaagatgatgaatagtagaaaattcggatttgggtgaaaaagggtaatttgtggtgtgatttttgaagaaaagagaagatttatgagaaaaatttgtgttttaggtgatttagatggaagaattgaagaaaaattagaggaatttgatgatttatggtatgagaggagtgtggtggctgagaaaagtaagggggtcgggtgggttttgatttttaggttaaatggggttttatgcgaatttggggattttaaaagctggaattgcgtgcccgtcgcgacgggctatgtgtcccgtcgcgacgggagttggcagaaggattttcgatttttcgtactgcccagtagtcgcgactagcagttccttagtcgcgactactggagcctttttttttttntttttttttttttttttttttttacgcagaaagaccagtcgcgactgggatta

SEQ ID NO: 336038 - DNA, 771 bp, Cannabis indica
aattcaattacaatccagttctgattcttcaaatcaaacaatgtaatctaaattgacttttgtacaaaattacctaatgcttgaacaacctcaagctttgagatctaaacacatttagatctcagtacacaagaaacacacagctgaaccaccttcaacaaagtaatctgaactcccttcagatcaagcaaattcgaactccatcttcaacctcaggaagatctctggaatttctctctgcaaactacaaaatagaaaacaaaaagaagttgtgccctagcagagcaagaatcaagaaaatgattctaaccgaagagagttagttagaacaacagtcacaacagaatttatatcctaaagataataaaatctgactaactaaccaaccagcaaagtacagctggcacaaactaacaaacatgcagaaagctcacatggcactaaaatgcacttagtgaaatcagatgcaactaactacagaaaagatgtttatacaaacaaatactgatgcagatatactaaacaaaagcaatatctaatttgccacacaaaacgtgacacttacagtaatgaaatggaataaaaaagaaaggaaacaatcttcatttcattcttttgtttggttgcatattaaaattttggaatgtcattccaatagaatgggttttggtggaatgactattccattttgaaatgaaaagaaagactattctaatgtatgatgagaaaaaatttaataattttttttattaatttttatgcattttaaat

SEQ ID NO: 336039 - DNA, 616 bp, Cannabis indica
tctcacggaactcaccttgtgctttgcttttttttattttatttttttgctgttaataaactataaggaaactaaagtaaaactattaagaaacgtaaaaaaatatttcagaaactaaccatttctcaaagtgttttctcctttctcttttccaaaataaattcctacaaaaattgtaattaaactattataaaatgattgtgcatttttaaatcaacttaaaaaccacaactctttactcaaattaacatagttgtttctcattgtgacttttcatcatgtttatttgaatcagatcaatttccaactattataaaactaatttgccaccatttacataaatcgtaccttgtatatctgctagtttttggtacacgtcaactgacactccttcataatttgtaaaccattttaaaacgatattgcaactgtaaggcaacacaaaaaatttaaaacagccttattcgtaacatgtggttccttaactagaatcagatcttgttttttgtttttaaggatctgaattgtctgttgttcaccaatgaatcaaccagaatgtaactgtatatgacgtatattcattgttgaaaaaaatttcatatcatacctttttttt

SEQ ID NO: 336040 - DNA, 577 bp, Cannabis indica
ttgattgctttttgtcgacatgctatcgacaaacagtcgaaaaatatcgatagcttataaataatatgctgatggcttttcatcgacatgctatcgacatactgtcgacaccacgtcgacaatggtcatcactgacctttcctcgtacaattatcgacaaaccatcgataagttatcgatatatcatcgataacaactggaaaacccagatttctactgaaaaccagatctgccagatctcaaccttttaagaccaaaaaatagcagttccaaaaaatacgacacatataacaattttaaaatacataaagtctaacaaaatgcttaaaacacaacttacccattgtaatggtgtaagattcttgagtgatattggggtgtgcttcggttttccgccaacacccaccgagaaacaagcattcaagagggaagagagagagggacgagaaaaagggaaatttttcagaagttttttcagttttttctagagagagagagtggtgcacgagaacgagagagatggaagagagagaaagatgcaatttcagtttttaccaattttattttttttaaaaaa

SEQ ID NO: 336041 - DNA, 553 bp, Cannabis indica
tttctgtccccaagaagggggacaaacttaaggacagcttttatggcttccgggcccaccctttgaatgagggcccggtccccttcaaccagcaaaaacacgtcaaggagtaccgtcaccgcttcttcttctcctccgggttcctggctgtggaacacccagagcttctcacggagtgggttaggatccctccttatgagcggactgcgcctactcagctcttcctccaacgggccaagaccttcgccacatatgacaagaaggaccttgacgtcggggggttggtcacgacggagaattgccggaaggccaagctgatcctggggcatcagtcggtggaggactccaacctttccaaggttatctgcccaaacgtaagggttccggccgcagaaaagatattccgggaggagatcattgccatagcggaagagaagtaccgagagtacctctaccggaaggcccaggagaaggcttacactaaggcccaagcggttgctgggaggcccctttgcgttgggagcccggttgaaaggagggcccaggcggctgc

SEQ ID NO: 336042 - DNA, 1076 bp, Cannabis indica
cctttcccacctcagccacactgacttaaaaaaccccaaaccaaatccatcagggccgagatttagtattagggatactaaacatcgcagctctaacttctttgagagagaaaggttttaagagatgaacctgctgatcgagggtgagtttggagcccatggctatgcaatcagcttgtatctccatggtggtaggcttatctttccccattatgcctttaaaatggccaagaaagtgttgcacaacattaggaaagtgatcatttaggaccccttgctcggtagtaaaagaaacaatcatgttatcttccttccgcttcttcaacatggcatgaaaataagttgtgttactatctcctttttgaatccaattaaccttcttctttggtggagaaagttcaagtacattttttcctgaatgtgaaattgttagcacccgcctgctccaattcaaggaaatgattgttgtgcgggtttgcttgacattggaattgagcctccttgtaattgttcttggccttctcataagcatctccaatgttcccaatcgagtgcctattgaaagcttttaacttgtgcttgagtctcatggtttttaaataaatccccttcaacccaccacatctaagaggcttgccccagctatctaacacaatgttcttgtaatcctgatgatcaatccagaaattatagaaccggaacggtttgcttccaatactttttgtagcaaccgaatgaaccacacaaatacagtgatcagaataggtctcccaagagaaatgagcagaggtattcagaaaatcatccacccactcctcgttgtgaaacacatggtcgattcaagaaaatatcctattatcctacttattggtccaagtgaaagtcgaacccgtgcgcttcataggcccacagaagactgagcaatccagttattagagtcaacaagctctgagttactaatatcattccccccatgcctgtcatcatgatgaaaaatcgcattaaagtcaccaaggatgatccaagctttagaaacatttatcattgatacgacagtccaaagatcactcctacct

SEQ ID NO: 336043 - DNA, 885 bp, Cannabis indica
aaccatgcaacattaaatgttatttctgttctatattaataagtagatctgattatattgaaatgagttttatttagggcataaaacccaacatatacatgtttagcttacatgttagttgcaatcagaataacatatcagggtatcggtgaagtgtacatagagttgcaccgagatgccaacagatttatgctaggctatcaaatagtatgagttatctgctaccacatcagtacgactagagtactgggtataggttggattcgagttagtcatactttgtcaagaatgttcctgacttagttagggttacagttgggtgtatgggcgccttaatgtaacccgagacagtagtatgttttacgttatgcttttcttattgagtctgtcgactcacaatgctatgtttatgtgtaggtaagggcaaggctaaaactgaggaaccgtgaggacaagcagatgaagattgtacatgtcgaggcggttaggcctggagcgtatgatcctcgggacatcagggcttttgttgctagttgctgggcgacatatattttgtaaatgagtagcaaacttttgtaaagtatttttgtaaacgggatcccgaaatattttgtatgtaatactataagttttaattaaataagcaaattttaattagtcacgtttttcattaacctcgttgattagcaacgagctgcacagtatgtttaaaatcacgttaacgcgcctatgcaagttagggtgttacaatttggtatcagagccaccaggttgtcttctgaagatcgtcacgacatgtataatcatcatctgcagttagctcgttccacggtccagtaagctttattgctttagtagcttaattttaatattatgatttaagaa

SEQ ID NO: 336044 - DNA, 1027 bp, Cannabis indica
gatcccagtctcggtcctggaccaagacaaaaacctaaaccctgacctaggacatgaattgaaacaagactattacccgtgattgggatgcagatcttgtccaatgattagagaaccggggcttggacatgacccatagtcgatgtgttgattagggactcgaacaaggacccgaagctggaaaaggacatagacccaggcccaaacctgggacccaaaaccaaaacttgaaaaagaacgtgatcaggaccatgtaacaggaccgggaccatgacctggacctttacccggactcagaactagaccgaacctagcgcagaactcgggttcagacccagtcctggaccgagactagaactgaggctcgaaccagaacctgaacacgaactcgggacaggatccgagacccagacgaagcccttgacctaaattggaattcggaccttaaaatggacacgaacccatacccgaacccaaataccgacgcagacctagaccgcgattgaaacacgggacctaggcccagacgtagacgcagacccagacacgaacatgggacccagaaccaagacccgaaccttgaccttgactcagatctagacccagaccgagattcgaaaaacccgtacttggactcgaactaagactcagaccctgacataaacttggacatagacccggactcggaaccaaactcagacccacaataaaaactggaaattatgactaggacccaaatctaagacgataaccaaacccagaccataactcaaactcataccaaaacctggaccgagaccttgactaggactaggacctgagacctaacacttgaacctggactaggaccgggaccgggacctggacctgacctagtcctaagccctcaccggatcttgacactcgcaacccagaccacgatctagaccctgaaaaggacccgaacctaaacccagacaaagatagggatcgagacctggacctaaacacggaccgcgaccaggactaaaaccaagactcaggacct

SEQ ID NO: 336045 - DNA, 750 bp, Cannabis indica
gaaaggagggcccaggcggctgctgggaggccccttcgtattggaagtccggttgagaggagggcccccagaacaaggcctactgtccaggtgccaaatacgggggctcctgatgccaacactttcggttctggtaagtcccctttaacaatacattacgtccctcctgttcgtgagtacactagacttaggcccgtagggttcgatgaacgtctccttaggtttaggatgccctctacccagtggggggataatgcaaaggagtattacttctccaacataggtgattatttaggccggtgctggatgggttcgggtcctccggtgcctgttcccttggatccttcggcctatctttcttctagctggttctgtccctcggacagctatctcggggacgatgcagccagtgttaagattcgggactttgctacggccgaattagagagtcagggtaggactagcttgattacttttttaagtgttcactgctttcacagatattctaacacttaactcttttcttttgttgcagcagctaatcccatggaggcgatcttggccacccttactggagcccacagtcctgatgcttccctttctcctgcttcttcccagatggtcacccccgtgaaggcttcttccagtgcccctccaaacactattgacttagtggatgaggaggaggtacttcttgaggaagctaaagaaggtcaagaagagaaatgacctcttcctggggaagttgaa

SEQ ID NO: 336046 - DNA, 608 bp, Cannabis indica
aataattctttacatcatcttggattttatggttcggatcatagagcccttaaactagttttagataataattcgtatactgttcctagttttgtcaataaacggtttaggtttgaaaatatttggttagaagaccctgattttcattctactgttaaagaggtttggtctgatcactctgttccactgtctacctctgggtttcagtctttctttaataagcaacaacattgtgttaatcatctcaagtcttggggtagaaaacataattctctctttaagaccagaatttcccagcttaacttagaaattgatcaactccaaaataagatggccctcacccttgaggagtcccgtaggcttagtcatctgaagtttgctctagactctctgttgtataaagaagagatctattggagataacgagcgagggttaatgtaacaccctaactaacataggcgtattacgtgatttttaaacatactgtgcagctcgttgctaatcgacgaggtttatggaaaaacgtgattaattaaaatttttgctttttaaataaacttataaaataatattacaaaagactcgggatcccgattataaaatcatt

SEQ ID NO: 336047 - DNA, 727 bp, Cannabis indica
cttttctatttagttcttacgaaacccagaattctcgacccttgccttagtgtgtttggggggtatttatactgttttctctggggtaatccctagaattctcccatatatatttctgtgtaactttagtaggggcatgcattcttagctcatgaaaaataggaaatgtatggtctgtcccctaggtatttcaggggttagatagatatactcctttatcccttcttgactgatgtgatccctcataaagtagttgttagtagacttattaatcatagctacatagctgcagaaggggggttacgccgtcagactttaatatttatggtagtaccaatacgccttctcccatgcaacattaaattcgagatgactgttcagagagggtctgatatctcccggaactgctttgctatagctctgccctccgggagtgagtggttccctcatactttctccgggaggtgcctctttagccgaccctctaggtttacaaagacttagccaaattatatcaaatccatactcttcagatctacgtgtcgcgattgcattggtccacatattatgggcaaaatcaggggcagcacccctgaagagaacataacacttatctaaggtgtaagtatacctatagctgattatcatgccagtctaaatctagtgaactgacaaatcagggaattaaacttttgaacatataatcatgattatattccactgtgct

SEQ ID NO: 336048 - DNA, 673 bp, Cannabis indica
agaataggaatcgattaatagtaattatattaatgagtatttgaatggaacaactgattaaatgcagagatggtggacaatatttataacttgttgattgtaaagtcttaagcgagataaggatatacaaactattgtctcgtgtgttgatgagaaatcgttctacgataaaaggtacaaggcgagggatcaacctcgctatgcatgagaagatgaagatcaggcatgatgactgctaagacactttgcgtataatacacattatacaaactaagtctaatatttgaataaacttgaatggcgagatatgtatctcgctacaggaagacatactcatggtacctttgctaatcggattcaaacatctttcagcgaaattcactgcaccaccgagtcaagtctctcagacagagtattatgtatttaatagcataaacgacgagaattacattattaacctcagaaagatatgagagaagctctaactcgctgccagggatattattgctatgtccctagcgagatgtctgaggacaatatgctttataacatatttaatacacgtatgcattgacccagtagaaacgaaccaatcacagctgtgtgattctcagatattgacaaaatttattttacgtgggatgtaatccaatcccataatttcaggggatta

SEQ ID NO: 336049 - DNA, 1114 bp, Cannabis indica
tagttagggtgttacactaagatttcttgtttgtcccaaatatagtcatccctgccagttagcactctacccatcaaagtttgatctggattgaattgtttcccatatgttggtttcctgatggactcaactttcaacatgcatgcaatagtggatggaccaaatggaactcgatgacccctaacaaatgcactcacacaccctggatgaccctcagcaataacagtcctatctaggttggcatggaattctcgaactaaaatgggatgaggagcagacaagttagtgaccatgtttacccatttgctaagttttaaaaactcatgcagttcaggaaaatcatcgaatatgaccacttgttcgaaccaaagctcacgactaccaaaccatctttgataaacagaagctttggaggcatcaacaaagcattgtacagaggctgggtcgacaatagatataggggctttaggaagtttggattttttagagcctctagacgactgtttgggagacgagactggagatggaactggacttggtttggtcttggatttcttttcaggtagtttatacgtggtatcacgggaagactttctttttggctgaaccctttcactggtttgagaaggaataaagaccttagatggaggacgaggaggtcctatgggtttctatttaggcaaagattgagcctgaacaggtgaagaagggggatgtagactcgaggatgaacgagttactcgtttagacacagttggtggactaattttttaaaaagtggagaagccttaccgtgaaacattcgaggtttctgaattactggaggtgaaggcggagacggagttgactcaggactcgcagggcgaacagatgcaccaacctccaattggtaaagaataatgtcatgatagagattaggcatactagactcaacttgagtggcgactgtaggatcaacagtagttgacaatggaggaacgagcatgtcaacaggtgttactgcaatgggagtggtgttcaccattttagagagagagttgtgaatgttgcaggacttagggtttctgagagtaatcatgaaagagtgagactattcactttccttaggccttaa

SEQ ID NO: 336050 - DNA, 600 bp, Cannabis indica
atatatcttaatggaaaaaaaaaattctaaggctacctttatcaaaattgatactaccattatcatcctaataaggagtctttatcacaaaattaatttaactaaataataatatcatggcaaccataaaaatttctttagtaacaaaaataacatcttcactaataaattggcaaaatttcccttttcgacataatggatattacatataacatacgaacatgcatcaataatactgggtagcgagcagagcatttttagccgatatgtgtaactctcaagaacgttcgagactaatataattgtgcctctaatacacgagtccatactaaagactgtgatatgcaaaaggaaagactaggagctgtactatcccacatcgcttgagtaaggtcaagtgtgattattctaagactgtgtacgtatgggatgatatcaaagcattgaccaagccaaaagtgtggtcgatgaggacgtcagatctcgtaagggggtgattgtggcagtcattagtcttgtgattcgtacaaaaaaatatcgggtaagctgtacaatcctacatcgcctaaaaaatgtcaagtgtgatgattttgagattgt

SEQ ID NO: 336051 - DNA, 657 bp, Cannabis indica
gtccttctaaggctgaggaggaaggcgcaactcgggggctgcccttcgacagttataacgaggaagggttacccatgtcggaaattggggaacccctagtagactgcaaagactatgtcaccgaagaatatactgaacccatccccctcagaagacaaggtgtggtaggagcttggtgggtttctcctccatccatagtaacccaggaaaaaataaagaacttggagaagcacgactacttgggggatgtcgaattcttccttccctcttcaaatcaccaggcaaccagtccaagggaggggtactatgcttggtcgggtgctcatactaagaagggtgcaatgctgcccttgcttccgtacttcaagaggattttggattactatcatctttgcccaacccagttcactccgaagggcatcaaatatctatccgccctgtccattctttatgcctcacaaggatggggcgtgcgatccccgcacgacaccaactggctcttcgacctgaagtcaattcccaagcagagcaggtcgaggtatttttatttctgtcaactcgaggagaagtggctgacgggcaccacagactccaaggtgagcaaaatagggaacttcgtggatgagtactacgtcgttcatgttgggttttatgccc

SEQ ID NO: 336052 - DNA, 645 bp, Cannabis indica
tctagactttttcctagccggaggaccttggtggggtcgaggtcgcacaccgatacttcctcgacatcctccataggttctacaattttttcggatcccacacggggatccaatctatcctcttccgccattcctggctcaataacttcgcggaccatcaatacaggtaggtgggcagcaacattgtaacactacctggcctcttcctggtttcctctcacggtccctatccctgcctcttgagtagggaacttcaaacacaagtgcctgattgacgtaactgcgctgaactccacaagggccggtcggttgaggattgcgttgtaagctgttgggtagtccaccaccacaaatgtgcagtatttaaaagtgcttggggtgtatctgggcacaaggtgactgggagcctcacttttcccattgggataagtgttgtcccattgaacccccgtgagttgggaaccactgggtgagagatcccagtccgtgaggccgattgccgtgaaggcttctttgaataataaattcacagaactcccgttgtcaattaggattatggccacaattttgttggcgatgggagtctctatgaccagagggtcatgatgaggaaaatgcactgtctttgcatcttcttttgtgaac

SEQ ID NO: 336053 - DNA, 730 bp, Cannabis indica
gaagaagcaccggattttgaaacgtaaattactcgcctaaacaaaaatccacgcacttaaattactcgtaaccgaagaaaaaaaattactcgtaacgacagtgaaatttagattgtatgatatttaaattatcacgcgcttccttcgagcgtggaattagcggttattctaatattctttgttcgaaattataaaattggaagagtatagaccacgtgagacacacgtgaagagtgagtgtaagaaatattatgccccaaatgaaacgaaagaggaagtgttgtgttgctgtacaaaatgctcggacagtaacatcgtgtgacgtgtcagaccattcatattttaaagccgaaattattactatattaatatttttttaaaaaaaaattaagaaaaaaaactaggctaatccttctagggaaatatctattggtatttttattttatgtcagtagtactgtgcacttagagggcaatgcttattaatattattgaatcttaaccaatacacattcacataccttaataagataaacatcacacaccttattgtatttatcctattaaacaaattcagaaatctcagatcgtttcacatatttttttttaaaaaaagagttctacagcagtagcgtttttgttttctctcacatgtgtttgtagcatcttaatttcaaaaaaaaaaaaaaaaaaaaaaaataagtttttggctcttaaactttgacatata

SEQ ID NO: 336054 - DNA, 540 bp, Cannabis indica
caagtaattgaaataaaattcttcaaataaaagcacactaatttaaatgtataagctgcaaaagttcaataaacatacatagtatttaaaattccaagtaaattaataattaaactcaaaagatatattaactaattattataatgtctatatataattttacgtaattatagtcgttattataccatcaaagtataagtgaagaaaaaattagcacacttaaaagacaattttgagagtatttgattaaaaatatcatgatatatatatatataaaatagatgaatagaaactaaaaattaagaataaagaataaaaaattaggcaaaaagataaccattatagctagagacaagttttaatggtctccattaatgttttttgaggataccttcatttatgtatggttgttttaatttgcagaaaaagtgggattgtgacagtcagtagtcccgtgatccgtaagggaaaacaccgggtaagctgaaattccgtattttaatattcccagtttgattatttaattaaatgattaattaa

SEQ ID NO: 336055 - DNA, 850 bp, Cannabis indica
acaagtgtgtacaagtttgtaagtctcctctactaaaataaattaaaaatcctggttcacaatttttagtaacatgcatatcttttcctcaacatcaattcagtatggtttgttcttgagacactaattacttattctcttttgaaagtcataacatttttttttttaaaaacaaaaaggaaaggagaaaaatatatttttgcaagagagtgggctgtttccttttgttcatgggctggtgattatttttcaaaaattcaaaattggtttcttttttgcttcatccttcatgtttatttaaaccaattttcttgtcatttattctcaccacctacccgattatatttctttgtttttttgccttctgttgttcattctctctttcagatcaccatagttagaacaatgaacctagggcaaccaaaaagggtggaagaaaccgatgaaaccccctcaaatgttcctcatgctgcttcaatcttgctcactgctgctgcaactgcttcgaaaccaggagattaatcgcttcctcagcgtgaatctcagccagtgaagcccaagccaaaacgaattcctaaacaagtggttcgaaaatctgtgcaaaatgttggacctcatcgtcttcatcttcaaagggatttcctccacttgctgctgtttctcctcctgctgcaacagtgaaggaagttgctgcttcaaccccaactggtccttccactcgcactcgtgcccagcaagcttctatcgagaaggaacttcgcacatctcgaagccatgacaagccagttcctccagccaagaaaattaaggtaaatcccccttcggtttcttcaagctctgaagaagaaga

SEQ ID NO: 336056 - DNA, 605 bp, Cannabis indica
accgtagcttttgaattgtgcgagcaggtcgtgtattttgctcaaatatgctatcattttttctccctgagcctcgtattcgccggacacatgatttaccaccagttgtgaatcactgcagatttcaatgtgttcggccttcatttcttgggctagcttaagtccagcgattagagcctcgtattcggcttcattgttagatgccttgaatctgaaattgaccgcagcgtgcaggtgttgccccccaggcgtgacgagggcaattcctgcaccagatagttgatctattgccgacccatccatatgtagtttcgaggtcagtttgtcttcattgttacttagctgaggtattggctcgggattgctttctggtatgctttcttctttgcctgtgcattctaccctatttttttttgggaacttcaggcatgagtgaaatattgatgtgacagcttttaagtcatacaggactggtcggccaagcattacgttaaaggctgaaggaacatccaatattaggaactgtgccatgatagttatgctcgtcggagcttgtccaacaatgaggggtagccgaatttgtcctagaggtgcaactccttgac

SEQ ID NO: 336057 - DNA, 601 bp, Cannabis indica
tggtaaaataatttcaaacaagatctggcacattattgttttcattcccctaatttgtaaatccttggggtctttgaggtacttctcgacgaggtgcttggttattctattgtacatctactggaacattcctagttcccccaggttgctcctcgtgggtgttttggggacttccttgatttgtttcttgcctcctaattcttgaacctcgaggtctacctcgtggccttcttgctctaggatcaggttgattttgtgcattgtttcctagagtcgccttggccgctatagcctctctttccaactcagcgttttgttggtttgactcggctaagcgttgttggagttgtcgattttctaattctactaatggcagcctcacctagtgggatcataagcatcctcacttctgggtacatactttgtaatatcattggttccttcattccttccttctgggttttggttgttaccaccatgattcctttttgaatgtgttgttcaagaagtgggtggcctttgagaacccattggttctttcccaggacgatgtgtagtctcctcagggcaactattatcgttttgattatgatcagccatg

SEQ ID NO: 336058 - DNA, 697 bp, Cannabis indica
tcaagctcgagcctgcttccagttttgggtaataggccatctgaagagaaattttccacagttgcagagctcgaaacaaaagaaagatgatgctctagttcttgcttgggtattttctttgaccgaggcagaggacaatgttggtccttctactgtgacaggttagatttctattgattgtattgtgttgtctggtttaattaattctggtgctatgcattcttatgtgtctagtagagagattggcaagcctagcaaaatattatcaaattgttttggtactttactgcctactggagatttactatctccagcaggtgcgttaggtcccttccggtggataccacgagggaagtaccaatgggacgtgaacacgttccggtggtacgagagtttctagatgtctttccagaggagctacctgggttaccaccaaagcaagagattgactttgagatcgaattgataccacggacagagcctgtatctaaggccccatattagatggcacctgcagaattaaaagaactaaaggttcatttacaaggtaagttggatttgatgttcactaggtcgagtacctaaccttggggtgcactggttttgttcataaataagaagggcagaacactaaggatgtgtattggctaccgagagttgaataaattgatagtgaagaataagtatcctttgccaa

SEQ ID NO: 336059 - DNA, 571 bp, Cannabis indica
attataattaaactttattttgacaaaaagtcaattcagggtcctatatgtactattttagaaaatacaggatccattttgtcatttaacaaaacacagggtctaattggtaacttttgtaaaagagaaggtctaaaatgatatttacccaaaatttattaccgtggtctttaaattaaatatttttgacaattttaaaccgttgtgaaacctcttttgattatttattataatcacttaaaaattagtgagattttttaattaaatattctcaacgtttatataatcatgaataaggaaaatgatcttcacttctatgcgactaacaatatcaataatgagttttaatttataagggttacaatataatttgatttcactaaaaatatataattaaggatacgagtttttttatttttttcggagatcaccaaataattaagaaatttttacatgaaaaatcctttttacacactttattacaaaattaccctcacacgcctattactacatttctacttacaaagttatttttattgcacatttaccacttactcatcataccatgcat

SEQ ID NO: 336060 - DNA, 452 bp, Cannabis indica
ttcttgcataagctcgcaggtttagagtgcattcgagactagttgggtctaagatgtctgcgttcttgtacagttgcttttacggacatcgtataatgagctgatagaaccaaggcatgcgagtctacattggtttatcgagactgttgggtcatcaggaccagctcgcaacatagagaatcgacctctatgttttcgcaggaggattgtggggatactcgcatatatctcggtatatgcgggttaaatccgttccttgatcctacataatgcgagtcatacgaatgcgattagacttggtcatatctgcatcatctctctgagtctagttcgggtgaggtttgagctcgaggagtctctcattgacatctcatctttccttggggaaattgagtacacatgtcttttgtaaagaccgcttagtttaatttggaaattagcagttaaacatg

SEQ ID NO: 336061 - DNA, 1945 bp, Cannabis indica
aaaaggataaaaagggtgttggtggataatggaagttcagtgaatatcctttacaaggaaacactcaagaaaatgggacttgaatgtgaaaagttaaaaccttgcatggtgaatctatgtggatttacaagcgatagtgtcgccggttaaggaataattgaactcccattaactgtaggcaagacgcgtttatccattaccataatgcaagattttctagttgtcgacttaccatcggcctacaacatattgttgggtcgtcctacactaattggactaggggtagttagctcaattgaacacctatctttgaagtttcaaacacgaactggtgtaggtgtggtgcaaggtgaccaactactgtctcatgagtgctatcgcatagagctacaaaataaaaagaaggtcatcaactaatggcagttacaactgaggaaggtgagaagcatgctgaggatctggatccttaagttcaagatgaaaagaacctactaaaaccaatcgaggaattggaggaagttattgttgatccagaaaatcccacaaagtgtgtattcattgggaaaaatttggatgaaaaactaaaatagaaacaaataaattttctgaaggaaaaccaggattagttctcctagagccactcagatatgataggaattgaccctaaaattatctgtcatcacttgaatatcgacctaaattaccgagcaaaaagaaaaaagaggcgacccttggattcttaaagacaaagggcactcaaagaagaagtggataagttactacccaacgactttattcacaaggcattctatccctcatgaatatcgaaccctgtcgttgtcttaaagcccaatggtacttggagaacttgtatcaacttttcaaatttaaataaagcctttttaaaagattgctttctactaccaaggattgaccagttggtggatgcagttgtcagacacgagctgatgacatttatggacgcatattcttgatgtaaccagatcaagatgcacgtccctatcaagaacatacaagtttcttaaccaacatgggactttactgctataaagtcatgccttttggcttgaagaatgctggagaaacgtatcagcgactagtgaatgaaatgtttcaaaaacaaatagggaggaacatgaaagtctacgtcggtgatatgttggtaaaatcaataaaaattgaagatcatacaaaggacctcgggaagtgctttgaacactaagaaagtacaatatgaaacttaaaccaaagaagtgttccttcagggtttccttgggaaattcttgggattcatagtcaacgggacgggcattgaagcaaatcatgagaaaattaaggctttgaaagaaatgtcgtcaccaacaaaaccaaaggaagtacacaccttaacaggaagaatggcagctcttaacaaattcatctcgaaatcatttgataagtgcctaccattcttcaatgtgtagcgaggcaacaaaaagtttgaattgacagacgagtgcaaggaagccttcgcaaacataaagaaacatttatccacccctctagttttggctaaactaataactggagaaactttacttatctacttggctatctcggagaatacaattagtgcaacattagtgcgagaagaggggaagcaccagcaactagtttactatgtttgtaaaacgtttctgtgggtagaatcgagatatccatctcttgaacaactttccatatgcctaatccatccatctcaaaatataaggccttacttccaggaacatccgatataggcgttaactgatcaacccctgagacaagttttgccaaacccggatgcttatagatgattgataaattggtctatcgaactggggcagtttgacataacttatcacccaaggacatccataaagggccaagccttggtagatttcct

SEQ ID NO: 336062 - DNA, 642 bp, Cannabis indica
tcgagtctcgaacgatctcataaactgttccccatccaaaggcagagccagctcggaagaagtctacatgcaacctcagaggtcccgtatagacttgggggcaaatgttatcccaaattttgcactctgacgtggcatcatgagaatggtgacacgtggagtccacttggtgcatttgttcggaaagatagaccgagcaggatgcctcgctggcacatctagaataagatattcaacgatccgtgcagagcactcaacacttagcgaattcagctttcgcatcatgagtcatcagctcaatccctataactcagggatcaacttaagtgaatacgacatacacacgatcccactatcagtgtagttagcctcaatcccacgatccttgcattcagcattgatcacacaatctttcagtttatgcgcattgtaacgagagaggaaactcttcctcctcaagtttcccagccctataaatagtgaggtatgttcactgggcaagggaccaagagattgaaagacgatacacagctaagctaagactatattgttatctaagaattatatattcagagatactattgtaagagctataagaaaaggaatgttcttccttgttcttgagtcaatacaaataacgag

SEQ ID NO: 336063 - DNA, 902 bp, Cannabis indica
tgatggtaagctcttattcaactcccggtaatcaatacacatccgcagagtcccgtctttcttcttcacaataataccggagcacccaaaggtgagtagctcgatctaatggatcccagattcaataactcttacaattgtatcttcaattctttcaattctgctggagccattcgatacggtgctttagatattggatccgctctcggaaccaactcaatctcctaggtaggaggcaatcccggtaaatctttcgaaaagacatcaagtcgcataccaatcttgtattcacaggccctgatgtcataggttggttggtctccgctgcagtgactatgaatcccacacaacctctgctcattaggtccttaactttcaacaatgttattcttggtatgcgtgcccgctgaaccttacccacgaacattgctgggttagcactatcgggctcaaacaccaccatcttccgtttgtagtcgatcgttgccccatacttagagaaaaaatccattctcaagattatgtcaaaatcagacagttgcaattcaattaaattggcggtcaattcacaatcggcaatccagaaggacaaagactgaatccacctaatggatactataaggtctcccgagggtaacagggtaacaaaacccgaagcatatatatcacattgcttatggaaactttcaataactctactcgacacataggagtgagtagctcccgaatcaaacaacacagtatatgaacagccattaatagacaattgacctgtcacaactgacggactaccatcagcgtctgcctgggtcatggtaaaattcgcctcgagttctatgtagtattcttcttaggctcctctttcttagcctaaggacaatctctgataaagtggcccacca

SEQ ID NO: 336064 - DNA, 624 bp, Cannabis indica
cctgtgtgcctaaaaggctctgcttttctttctcgattgttttagaaaaattttgtgcgtagtaagaggttgtaacaatggtggcttttaaccttgatttaattgaaggcagaggtgattcaagtgacgttttctttttaaatgggtgtgattgtagaatatttaatatcagttcaaatattagtaggctctgcttttctttctcgattgttttagaaaaattttgtgcgtagtaagaggttgtaacaatggtggcttttaaccttgatttaattgaaggcagaggtgattcaagtgacgttttctttttaaatgggtgtgattgtagaatatttaatatcagttcaaatattagtaggatttgttttattattattttaataaaaaaaaaaaaaaatttaatattttattaaataaaaattaaaagttacccataaatttctcaaaaaccaagaatttcagttatatagacacaatttataatagaatagatatatatatatatatatcttaatttcataattcaagtaattaacttttcaaagtttatttgatagagtgttttttactacttaaatagtgagacaattagagtttgtaagatattgaattctctgtatacta

SEQ ID NO: 336065 - DNA, 518 bp, Cannabis indica
aaaaaaaatctaataagtacaattattcataaaaaataacataaattaatatgtatacatcaacgtatatttaaataagcatataatcaagtaactcatattaaaataaatgagtaatttacagtataaatatataagtttaacgttcaattgtagataaatattcaagtttaattcttgaaagtaataatatctaagctaaatttctggaacttccctaagtacatgatcattaaagagtaatttgcggcaaaaccccctcaactatcaatttacttacaaaaaaccatccaacctcatattttggtgggaaaaccatccaaagtactgttccgtttacatttttaaggtgtcgtctgtccagcctcgttaagtcctaattttgcccacgtggcaatgacaagtcactaaaaaattatcctacgtggccatattttacaaaataaaaattaaaataaaaataaaaaatttaagagtaatttgcggcaaaactcccccaactatcaatttacttgcaa

SEQ ID NO: 336066 - DNA, 1595 bp, Cannabis indica
gcagtggcaataatctcatcccggaaggtctctccgcagccgggaccgttacttcgggcagataaccttagaaaggttggatcctccaccgactggtgccccaggatcagcttagcctttcggtaattctctgtcgtcaccaaacctccgacgtcgagatcctgcctatcataagtggcaaaggtcttggcccgttggaggaagagctgagtaggcgcggtccgctcatacggagggatcctaacccactccgatagaagcttcaggtgctccacaactcggaacccggtggagaagaaaaagcgatggcgatactccttgacgtgtttttgctaattaaaacatactgcaccctcgttcaaagggtgcgcccagaagccgtaaaaaccgtccttaagtttgtcccccaggcagaataaaaaataaataagcctgaaagcaggcggtaagcttgtggaataagtttgtatggcgcaaggccgacgaatacaaggaaattaatgaaataatcctaaaggggaagcatagccccggtcatcaaatgcggctggctccaagctccgaagcctccgtagttgtgattgggcgtctccgcgtcacggggcggccggtggtacgtcccggacgtcgcgggtttgataccggccacctccacgatgttctcctgttggtgagggcaagttaaagtagagtgaagctcggccgcttcccatcccgtagcacgaggtctatacccctcctgggcgacgggacccaccatcacttcttccatggtcgccaaacgctttcctcccttcttggaccacttggaaccgtatgtagacattttggttctgaaaaagagtaaaaactctagcagtcaggccccataccaaaccctaaatcaaaaaagggaatgggggtcccctccggacgcttgtcaacaagaaagccttagaaggatttcctggacaaaagtcgggtgcaagaatctcacagatattgacattacacataagagaagaaaggaaaagaaagagaaagggcagaaatcgagaaagacaaagccttctctgtccccttgaaggccatcacgcaaaaagtaaatgggcctttacaaaaaaaactaatgtaatgtgcaaaataagagtgacccaaacaccagagacaagaaatctaagcgtattacgcaaaaactcaaggcgaaacattcccagaaacttcaaacattaaacccagaaacacagatgaacagtaaagcatgccatgaacacaaatagtaatgtgaggggtgcgaaaaacttacataaggtgttggaacttggggttgctgttgatcgacgaagaaatgtagactgacagtaacgaacaaaggatgataagaaacctgtaagtgtttgaaggttttctggtctaagggtttctttctctctcaaaaactcgaagaaatttggcgaaaggatgaaagtaaccaaatgaaggaaaggtcgtggcttttataggcaagggtgcatgtggaacaggcacaatcacctaccaatcgaatggttgggaggtgcacgattcgaatcctaagatccaacgactaattgatttgtaattaaggcggtggaaac

SEQ ID NO: 336067 - DNA, 1539 bp, Cannabis indica
tcttcatacttcgttaaccactttaaaacttattctacactcaattatataactcgttgtttaataaacaacctactttgtgatccaacatccaccaatcactcaattacgtgtctattaaattgcatctcaattcataagcttttctccattctgggtgagtatgcctttccataattgcacaataaagtaatcttttccaagaatgtcaatggtctccttatataccatattgactatctagtcaattataaagtactctccatcattaccgtatcaccttaagtaatttaggtaatcttctttaccttagtgataccactactcttcctgatgttcttttatacgttacctcagtaacgtcactgcttcaagcctccattgggcccttattcccacgaattaatggcttttatacatgactgcatcactctagctgtttcctggactgacgactggtcccacggaccaatccaagtgtttctaacgtgctttgctcttactcgcacgcttcatgggaaattttcttaaatgaaaccaccccaagtcaaggacactcaaccatggagttccgtcatggtgagctaccaaaaaaagatgcttcttgctaacataggtagtcccactcctacataatctcaaaattactacacaatcgtcaccttcaattcatctaggattccagacaatactcataaattgtcccacctttggtaacgctagatcacttctaaacaaaagattttgttatttgaatcaattagatcgatgcctccattaactactcattttctatattccactagggaatatcaacaatttaactcatattgtcatctttctaatctgtctaccctgttaaatgggttaccactaaataacatacatgcacagtccattcagatttcttgatgtctctaactaaatgtacaatgtttaatatcaataacaattataatattgcccataaattctaacttgagtcagccgaaggaccgatattcgggtccccttgaatcataactggcgcttgggcaagatctgtacacttttcttctttaacatcaatctttcttaactgtgggcaggctcttttcagatgacccactaccccacaataaaacaagatctggctctacattggttcaaatggcacctttttgcatcttgaacactcaagataaggtcaccatctcttatactcactttgaccactatcatggtcaccctagaacctttcgttctatcccataacttgtggatcatttaatttttgcttcctgatctactagtaagttggcttcatatattccaccacatttagtggtacaacaggaagtgtcggtagtataaaaacagacataagatgagcctgttatcttttcaaatctcagatttattttttttttctccttgtcgtctaatcatatcctgtctaacagaatttacatgttcccagcattatggcagtaaataattgtcttccatattgtttgccctgagcccaaatagctctctaatcagactatttgattgccc

SEQ ID NO: 336068 - DNA, 637 bp, Cannabis indica
ctgggaattcctgaaccctcatccgaaattccggatgcacaaccggaattccggttcctcgcaggagaaattcaaaaattcataacttcaccaaatcaaatccaaatcacacaaaaccttccagacctgttctaaacatcctaaagaacaattctaaagcaacaaaaccacccagaatgcacagaaacaaaaagtgccatgtgagctccaagctttgagtttcaaactcaaacttggctaaagctcaccaacaagcatcaaaccatgattcaaactacctaaacatgcatactaaagctgcagaaaaccaaaacaaactcatgcaataatcacagccaccaaaatctcaatttcactttgaaaaaccatagcttttgcatagaaaatccataactctaaacaacctaactatcaagcaccacaagtagcttaattaacctcaaataaacatgcttaaatctctgaaaataacaacaaaatcacagcagcaacaacatcaaattatcaagcatgcattacaccattttcatcaaaattcaacaaactttaagaagaaatgattaggagctaacctagcttggattgaacacaaaggagagttgaaatcacaaggaaaaatccaaggttccttgctgca

SEQ ID NO: 336069 - DNA, 697 bp, Cannabis indica
ttttttttttgattgaagagagttttttttattttttttttaagtgttgttatgttagttttttatatgattgaaggcttttttattttcttatttgcagcacattgacattattttctactatcttcgtaagaaaataaagtactcagccgaaccgaaaatcaaagtcaccacaactgattgtctttttgttctagcataacaaacttgtatgataagtttgttgagaaaaataatgatatatcggtgttgtctctttctcataatgtggcccagtacatccgtggtggtaagatattatgtgccactccttggcacttggttgatcacgttgttatgcctattaatgtcaaattacaggatcattggatttgtggtcgtttaaacatagctaagcggcggatatatctgtacaattcattgcgttctggaaggtatatgacagctgccaaagaggcttgcaagcctttttcggttattttacgctattatttatctatgttagactttagaggccttcgcaatgaatctaagtttagcacgatggaaccgttcccgattgttgctgttgatggtttaccggagcaggtcacatcataagtttagtgtataatgttcaatgttctttgctgcttttgtagtgttatgttttgttatgtgattttgtttttttactggtgttcttatggtgtttttt

SEQ ID NO: 336070 - DNA, 697 bp, Cannabis indica
tattgtattgtttcgccaccgcgagcaataattctgcattcgggtcaaggcgcgctcccttctttcctcaacgtcgtcggcagcttgtagtcttagggaagtattgtcttcgtcacttaactcggaccgcaaagtaggtacttacgttttcgtcgggataactgcctccatcccgtatacaagtgagaacggggtctcgcccgtactagtccgtggcgtggttcagttggcccagagcacgccgggcaattcttgggcccatcttcccttagcactttcgagtcgctttttaatattgtttatgatgactttgtttgatgactccgcctgcccattgctctgcggataacggggcgtggagaatatgagtttaattttccatcgttcgcagaaacttctgaatttgttgctgatgaactgggagccattgtccgctacaatttcctggggtagtccgaacctgcatattatgtttttccagacaaacccttctacttctttgtcttttatttgagcgaatgattcggcttcaatccattttgagaaatagtcggtgagggccaacatgaattttttctgagctggtgctgttggcaaggggcccactatatccattccccatttcatgaatggccacgggctttggacggtggttagctcggccgggggggctaggatggacggagcatgcttctgg

SEQ ID NO: 336071 - DNA, 781 bp, Cannabis indica
attacataacgatgagcctgatactgaatctttctagacagtgccctttcttggggcaactcaccttttgttatgtattctatgatggggaccatccagttgggttcttgcccaaccgttgctatggcctctttaattttgatgcttggctctgccaagtgttccacgggtactacccccagtccttcaatttcactgtctgaagcaaacttagccaggcagtccgcgtgagcgttcttttccctggggattctttctactttatagtccgtgaactcgtggagcagttcccggactatcgttacatatgcggccattctttcgccgcgcgtttggtattcttctgatatctggttcacgactagttgggagtcgctatacacttctactcttttggtccccacagcctttgctaatctcagccctgctatcaaggcttcatactcggcttcgttgtttgaagctgagaagtcgaaccgtagggctgcctggagtcgaagtccgctcggggatatcattgcaacccctgctccggatccattttcattagaggctccgtccacaaatactttccatgtgggggccgaaggtaccggcgcgttcgcggttgcctcggcttcatcacattcggtgatgaagtccgccaacgcttgtccctttatggagatacggggtatgtagtgcaagtcaaattgacttaactccatcgcccatttgaggagccttccggacacctctggcttttgcaagacttgccagagtgggtgattagtcaacacct

SEQ ID NO: 336072 - DNA, 582 bp, Cannabis indica
tttttaaaattgacttgggagttttccaccaaagaacttcccctcaacacaacagacctgactaaggttatcaagattggaacaaacctgacggaggttttgagcgagattctcatgggttgcctcaagagaaatcaagaaatttgtctagtcgcatgaggacatgattcggatcgacccccaggtcatctgttaagcacccaacatgaacaaagtaaacttctgacctgtacaacaaaaacacaaactccttgacaaagagcgctccaaagctctgaaggaagaactgaaagtctatgggagaacaaatccattagggaagctttctacctgattgttggaaattattttaccaggatcttagatgtactcacaagtatgtttattaacaccctaaatatgaactttctaaaacgatgaaataaacacatataaagttaaggaaaccttacattgggggcagcggaatataatgactccttccgttcaaatatctagcccttgattcctttctgtagcagagcattatcaatatctcaacctggatctctttctctaaatctttgatgctgaaacctcctt

SEQ ID NO: 336073 - DNA, 611 bp, Cannabis indica
gatatgatactaaaatagatagcaagcacaataatgaaccagaaatcactgacttttgactttaagaaactacaaaatgcaagccccaatatgaaaacatagatgagtagaaaaagagtaaatggagtatgtgggaatgtggtagacaatggtgtgcaatggaatacaagaaaatattgaggtgaagcgattggactacaagtgaagtgagaaaagcaattcaatgtttattttcagtgaatgtttccattgagtgcaactgtattacacgatttacttggaggcactgtaagcaacaatttatctaaaaactctcactcaatggcatgtaaattttaatttctctaactttaatctaatcaaatatggttgagatgttcctaaaaggatccaaaataacttatgtaaactaaagaactccataaagtacaaagaaataaattagatcaagagtaacctattattgagttcatagtccacatacctctagtagtatatttatggagttgaatcatatggctcttgtctttaatattatcatgaaaccagctactctcaaggcgccgctcgtcctcatgagccggtatcttgggcctggctccacgagaacg

SEQ ID NO: 336074 - DNA, 791 bp, Cannabis indica
atatatatatatatataaaggttgatttttgtttgctcagtcgatttattaccaaaaaaaatcgactgttcaatgtcattttaaccgttaacagtttttttcagttttcaattccgtcaatttcagttccaacagtgttcggtaggtcaatttaaacgaattttttaattttttggattttatccccagccctattaacaactttataatatataatgtggtgcaatttgaaccataattactaaattcaaaactaaaactgcaccgcaaaaaattttaaattgcattttttttatgtagcgtggcataattcaaacaattcgtgcaatatgagcaatttaatttggcatgtttggtttgttaaaatcgacattgtaatagaattaggattacaattccagtgtttggcttacctttaaactctagcaatgacattccattataatcactattagatcacttatgaaaagtgattacactccacctcatgaatgatcattataattacttaaaataactatcttacccttttttcttattaaagtaggaataattttatcaattgactatctattccaataatcatcccaacaaatcaaacaaagtaatcaattcctattccattacattactattaccattataattaccattccattccaccaaatcaaacaccacttaagaaaatttaaatttttatgtttaattttactatctagttaaaagaaatcattccacgtcaaaaaaaaaaaaaatttaattttgcatgagataatttaattggttctatc

SEQ ID NO: 336075 - DNA, 368 bp, Cannabis indica
tcctaacatagaaaagagcaattaaaaccaaacatacaaggtaagacaatcgggtatgcatgcaaaaatatcttaccataaaaggaaaatattttgtcatctaacttgccaaaaaaagactttacagaacgtaacatctagtatatatattatataataaaatggtacaatagccgattattttaatgtaaaatggtacaataaaaaaaattagcgagtgacccattttaagcaaatattgttggaaattattttaccaggatcttagatctactcacaagtatgttgaataacaccttaaatatgaactttctaaaacgatgaaataaacacatataatgtttagtaaaacttacattgggtgcagc

SEQ ID NO: 336076 - DNA, 947 bp, Cannabis indica
tctcagcagtaaaagcttcttgttgacttcacccagctccattccgatagctccgaattccaccctggcatcatcagcatccttcctggcccaagtcccacctccgccctcatggtgtttgacatggcagcgctcttggaggcagcagatttagctcgggaataggtgtaagccaactttaaaccaacttacatagagaaaaaacattagagtctgagccaagtaaagaagtattaaaggaaactttcaagaaagactcaccctggtaaattccctcaagactcctcccatcagcagctccagggaagattcggtgtcaacactggataacaaattactcacctaaggaaccaaccagttcatgttgtgagtgaacatctccttgcctctcttggcctctggatgcactggcaaaggttgggtaggagcccgcatctgctcaaatccactcttggccagctcggatacgcccttcgacagttcaggcttgtccgagcttcctcctcgagaatctttggacttagcagctattggagtagaagggtccgccatagttagctcctcagattgatcaataacctcgctggccggtgccttttccttggatggggtcacctcaccgcgcttagaattcttggtctgaggagatgagcttgagcttcctccaactctcttcttcaaagcatcgagcatcttccgacacatatctgcacggaataaaagcaacatggtcagaagaaaaaaggcatcagaagtataaaagcatgataatcaagaagtttaaaaacaagacggagtatcctgcgcttcatgagaagcgtttgtccgagcaagactcaaaagatcattgtcacctgataagtctcttatctctgccaggatggccttccctttcctggtacggggagggtagccgagcaggtaaactgtgttgggttttgtgccct

SEQ ID NO: 336077 - DNA, 906 bp, Cannabis indica
gactttaataatctttacttcattaagaagtaaccttgaaacctagaggtattatgatacaactctataactccgaatacacccaacattccaaatgtctatctataatgccccgctatttctaaaatactaaatcataataaaatgactctataggccaaacgtcgtattccactggggtcggtcataaaatatgaaaatcataatatttcacatataacacaattagtatagaatcaaatatatctccacacaattgcataaataataattaaaagtctaattctgaaattaagtcctaattctcatataaaaactaagcggtcattataatttagacttcaaggtccttgattacacgaacacaacacaagctactgaaaaataatagaggtaccaatcgactcctttaatatggtctgaattctgcttgagatcatgtatcatcatttgaatatagaccctgatgtgcgaggagtatgacaaaagtgccgcaaaatgaaccctacgaggtaccaaacaccgaaagaggaagtggattgcttacttgcatgcggctttattgaggattcattcttcccaaattggttagccaatcccgtcctagttcgaaagcctaatggttcatggcacacttgcgtcaattttataaacttaagtgaagcttattcaaaagacaactatcccttacctagcattgaccaacttgtcaatgcgaccgcaagtcatgagattctcagcttcatggatgcatacttgggataccataaaatcctaatgtacaagccagaccaagagcataccccttcataaacgattgatgtttgtattgcaacatatcaatggttagataacatgatgttcgcagatttgttaggaaaaatgatggaagtatatgttgagata

SEQ ID NO: 336078 - DNA, 891 bp, Cannabis indica
ttggtcgtctccgagaatgcagtcagcgcagccttagttcaggaagaagagaaagctcagcatcccgtatactatgtcagcaagcgcatgataggggcagagacgcgatatctagtgattgaaaaaatagtcttttgcctcctgatggcctcgagaaagctaagaccctacttccaaactcacccaatcaaggtattgaccaaccacccgctccggtaagtcttacaaaagccagaggcatatgaaaggatcctaaagtgggcaatggagttgagccaattcaacttgcactacatttcgcgcatttccacaaaggggcaggcgctaccagacttcatcacggagtgcaatgaagctgaagctaccgcaaacatatccgcaccatcagtcccagagtggaaagtattcatagacggagcctccaacgaaaatggatccggagcaggggtcgcgatgatatccccgagtggacttcgactccaagcagccctacgatttgacttcttagcttctaacaataaggccgaatacgaagccttgatagcggggctgaggttagcaaaaactgtgggggctagaagagtggaagtctacagcgattcccaactagtggtaaaccaggtgtctggagaatatcagacacgcggagaaagaatggccgtatatgtggcaatagttcgggaactgctccacgagttcacggactataaagtggaaagaatccccagagaaaagaatgctcacgcggactgtctggctaagttagcttcagacagcgaaatccagaaactgggggtggtaaccgtggaacgcttggcagagccaagcatcaaaataaaagaagccataacaacggtggaaagaacctagctggatggtccctatcatcga

SEQ ID NO: 336079 - DNA, 683 bp, Cannabis indica
aatcacgtaatacgcctatgctagttagggtattacagacagtccaaaaggacaattcagatacttgaagatatgttgcgggcctgtgttatggatttcgagggctcctggagtaagtaccaaccgttgaaagatttttcgtacaataacagttatcaaagtacgatagggatggctccctatgaattgttatatgcccgaaagtgtacatctcccctcctctgggatgagacagtggagaggaaatacctaggtccagaatcagtacagcggaccagtgaagcaattgagaagattaaagctagaatgcttgcctctcagagtaggcaaaagagttatgcagagctgaaatggacaaatgttgagtttcaagtaggggatcacgtgttcttacaagtgtctccaatgaaggggatcacgcgtttcgggaaaagaggcaagttatgccctaaatttacaggacctttcgagattcttgagaaggttggaccagtggcatatcgattagctttgcctccagctcttacagcagttcacaacgtattccatgtctctatgttgagaaaatacatttcagaccctactcatgtacttagctatgaaaatcttaagctgcaaccagatatgtcatatgaagaacaaccagttcagatacttgacagaaaggataaagtcctttggaa

SEQ ID NO: 336080 - DNA, 732 bp, Cannabis indica
ttgatgacaaggctactacttttgtaggttagatttccagctgatgcagcccctaagagcagtgaacacaaaccatgttaggatccttctagtgtctaggtttgccgcaaaatttgggtccacgtttatttcttccttgaactagttctctttataactgaacataatttcagtgtgcagactaccttgcaggtacctcattgtccattttagtgctttctaatgttcagggccaaggtctggaatgtacctgctgaccacacccataacatgagctaagtcaggtcttgaacagaacatagagtacatgagggtcccaacataacttgcatagggaaccttgctcatcttggatctttctgcatctatttttggtgactaagatgcagacaacttgaagtgttgagcaaaaggtgttgcaattggttttcacttgaccatgccaaacttattcaatattttttgtacgtaggcagcttgagaaagtattatcatgttaggcttaggtcttctaatttgcccagatctttcatctcaaactcatcactgagtttccttttataagcttgtcaatctctgaccttgctttgctaaagatcagtatatcatcaacatagagtaacaaataggccgattattgaaatacacacatgagtcatacttgcttttagtgtatcaaatattatgcatatagttgtcaaacctcaaattccattgcctaggtgcttgctt

SEQ ID NO: 336081 - DNA, 544 bp, Cannabis indica
tttatctcatgaaatttcagcatccatcgatggagggaccccattctgtgttccacacacaactagtaacactctctcatgcataccataccccacaacaataaggacaccccccacacgctattaattaatttcttcccccccttgtattaattctcataataataatgctagctacaattatatacatatatatacatacttctaggtaacggacccctaacaaaaaaaaaaaaaaaaataaattagcctatagtacaccccttcaaataatgttttcgggaaacttttcatttgttttaacatttagtagattttttagttttttttttgttttttttttttttttttttatggtgataatacttgttaaatattttgcttagtgcaaatgtaactgatgcactagttacttttattacaagtcccaaatttagataggctattgtctgggatttttaaattctcatgtaccagttgattttattgattaataaaatacaacttttaaataataataataatatttaaatattttattgta

SEQ ID NO: 336082 - DNA, 864 bp, Cannabis indica
ttaattcagtgttagaagttatgaaaccgtcgggtttagctccgtattaggcgctagggcattccaggaacgtctggctaaggccttccagtagtagcattctagagaacatgtaacttctgttcccttctgttagcagcgcattattacaaagaatctcggagtcctttctgcctttgatagcagggagaacctccgggtactacagcgccttctataaccccaaaaatcagaggtcgtacaatacaatccgtaatccgacatggcttgctttcgtgattgccatgtacacttcattcgggaacatggataacacttaccaatttaggtaatttgtgatttatgaccttaaatcattgaataatagcttctactcaagttgaccaatatatttgaattcataattgagttaagattagtataataatatacatatttacatgtttagagtacatattttgtagtttcctatcagatatcatatcagtaagagcaatattagtgtaaatagagtcgcactggatatttacgtatatatgttaggcaaattccaaaactgttagttcggcatatctgtgagagttgtatgaatgtacatagaattttattagatatcaacagatatatgttaggctttgtcgtaggaacattccaaacttagtatgcgttggacgcaggatacgattttaattaggtttatgggcacctggttatgatcttgttatatatttaggtttatgcttttctgactgaggctgtcgactcagaaatattatttacatgtgtaggtaaatgcaaggcaaagtcagaacgatagagaactcaggctagatgaagattttacaaatcgagatgattagacct

SEQ ID NO: 336083 - DNA, 649 bp, Cannabis indica
gaaactaatgaacgtaccaccccgttcaagaagaggaaatttgaaggctccgcttctctctgcacccgccctaacaaaattgttagacgtcatccgaatgttgttagggactttccttgggacccaaaggaaaaggactgcgagtcaaaggtggattttgatgatcgttctgaagaaccttctgaggggtcgagctcttcgagctgtaacaatggtgttaaaaggagtcatctgattggctcgtttgtaattgaagaatctggatccagtctttctgtgcactcgatcaaccctgtggaggagaacgtcatatctcctccacaggcgccatgagaggtgtagcatggaactgtagagggttggggcagacctctacagttcgtgaactgaagtccctgctcagatcgcgctctcctgattttgtttttttgactgagctcaaagtggatcctaaccatctggtacgtatactaaaagcttctcacttttactttaatatttttgtgccgcccgttggcactgcgggaggtattatattagcttggaaatctgggtttagttttgagtgtatttcttgctctcgtaaccatatttcggggcttgtctattcggaccccccttcccacccgtggctcctctcgtgtgtgta

SEQ ID NO: 336084 - DNA, 420 bp, Cannabis indica
acacatgtgacatggagtgttcctaggcaaattccttacacagagaatatggaatagggctgagcatatattccagaaaaccaaaacaaccgttcaaactgacctaccgaagaccgttggaagcgaaacatacagaaccaaaaaccaaagaaaggctaacaattaaaactgccattgaacggtcaatttttttggggtaataaaccgactgaaaaaatcaaaaccggctgttatatacatatattaatttattaagttttttttttgttttatgtagtgtagttactaagaatatataataataatttattattttataatattaaagttaaaagaataagataattagtttttgaacaattaatttgtatgtttgtagttgtaaaatgtagaataatatatttatagaataaattggat

SEQ ID NO: 336085 - DNA, 1284 bp, Cannabis indica
ccggagtggcaggatacgtgcccagagtccaactcccaggaaccgtaccttcggttactccacaaataagcggtatacaattctctgctactccaggatataatcagagccaggccttggctcccgcatcttcgcactatgggaacccctcaggaataagcggacaagtcccatctcactccgctcctactgcaagcctagccaaaccttctcaaggctcccggagcaagaggtcctcgaaaggtagcaaccggacggaggacaagcgccaaaaaagggggtatactccccaatacacccagtacactgagctgacggactcacaagagcgtgtgtatttcaccacaaggcaaaatacgcactaccggagaccgcctcctctatatagagatagttcccgaagggatcccaacaaaagatgcgagtaccacaacgacattggacacaacaccaatgaatgcaaaaatcttaaagatgagatcgagaacctgattcgattgggtcatctctatgagtggatcaagaaccggctgccccatctcaacccggttccggcagggggacctctgccccaagggacgccagggggtgcgcccggagcgctggcaccaaccgcaccctcgggaggacctcagcagactcccagcctgccaccaagacccaacggaagagtggctatgatctctggagggccccatattggagggaccactcgaaaggaactaaagcgctatgtcggggctgttaaacacaacgaggtgtgggaagtcactcagcttccagctcaaaggccccgactcatggatcagccaattactttcacggaagaagacgcaaagatggtgcattttcctcaccatgaccctctggtcatagaaactcccatcgccaacaagatcgtggctagaatactgatcgaaaatgggagttctgtgaatttattgtttaaagaagccttcacggcgataggcctcacggaccgagatctgtcgccaagcggttcctagctcacgggattcaatggaaccacacttatcccaatggtaaaagtgaggttgccagttaccttgtgtccggacacaccccagagcacttttaaatattgcacattcgtagtggtagactgcccaactgcttacaacgcaatccttagccgaccgaccctagtggactttggcgtagttacgtctatttggcacttgtgtctgaaattccctacctaggaggctggagtagggaccgtgaggggtaatcaaggtgaggccaggcaatgttacaatgttg

SEQ ID NO: 336086 - DNA, 458 bp, Cannabis indica
ttactagtttctcatatcataatctcaaatttaattttttttttgctattttaatctcaatctctaaacccccttctctaactacgtttgtatatatcttgatttattttctattgtaataaaatatctaatagttactaaaaagtttgataaaatttttgttaccgtagcattgaaccactattcatttagtaaaaatcggtgatagcacacacaccactactacaaaaatggccttttgtttcaatttttaagtgacatataaagaatttgcgtcagtttgtgtaattgacgttataactgtagatacaaatagtcttattttttgcttcacttattaatagacgctaaaatatttttgcttcagctcataaccaaagcaatagtaaaacgctgacgcaaattagttttttgcttcagttatgaagcgaagcaaaagaataaaaaataataataaa

SEQ ID NO: 336087 - DNA, 611 bp, Cannabis indica
ttctacggttcagtaagcttttatttctttagtagcttattatttattttaaaataagaaaacctgataggaagcatgttagtagcctcatagtagaataggcgcatgttttgttttaatatccaaattaagcggcattagtaagctctcctagatggatggatgccaagcagactaccaggagccagggcaattcagtagggtcgaatcagggacagggagctcagtttcccccgcaagctaggggccgaggtagaggtatcaggggcagggctagtggtcggggtgacgtgaacccgccacaggctgcccaggctgcccaagccaatcaggaagtccggaatggggagactaggtttaatgaaatgcaagccaggatagaggaacaaggtttagagattcagagattgaggcagcagggggctcctgcagtgcctgtgccagaagttccagtggcaccagcccctgctgctcagaccgaaattgtagtagcggctaatagaatagaacccttgtatgaaaggttccggaagcaagcacctccggtttttctgggacgtccagatgtcatgaaagccgaacagtggctaacggtgatcaccaagatactg

SEQ ID NO: 336088 - DNA, 624 bp, Cannabis indica
gccctcctggatatgaagtcgccaacaagaaccaaggaattacaaagtttgactggtcgtatcgccgcacttagcagatttgtttcaaaatcaacagacaagtgtgttccatttttcaacatcttgcaaggaaataagcaatttgagtggacagaggaatgtgaaaaggcttttcaggagataaaaatgcaactcgcaaagcctcccatactcttgaaacctctggacggagaagagcttggcatatacttggctgtcacggagcatgctgtgagtgccgtgctcatcagagaagaaaacaacatacaatacccgatctattacattagtaagagactcattgaggccgaaggccggtacccgttaatagagaaactcacttactgcctgattctagcaataagaaagttaaggccctattttcaagctcatcctatttgggtgtacaccgaccaaccattacgccaaatattgcaaaagtcggacgcttctggatggttactgaagtaggcagtggagtggagtcagtatgaaattaccttccaaccccgaacaacaatcaaaggccaggccctagcagactttgtggttgaatgcacaagaaaagatgaaagcatatcggaa

SEQ ID NO: 336089 - DNA, 943 bp, Cannabis indica
aacaacaagtaccataaccattaaaaagagaaacatggttctaaagttaataaacggaaatgaaacctaaatccaagtaatatgaaatataaatgaaaatcaaatgacctaagcaacataatagacctaaaacaaactaagaattaatattttttaaaataatggaaccatacctaaaagcaataaaatctaaactatgccaaaactaaaaaaacacaatacaaacctcaatcaaacgaggaacataattcttccccttttaatcaacatcaataggattctcctagatccctctcctttaacgattttaatttttttcttagcaggagccttcatctgtttgggtatgagctcaacaaaatcattataaaaaaaatcatcatctaattttttttccctttattttttcagagacagattccaaccctatttttgaagctttagggcctataattagaacttttttcatagagggagatggagaagatgaagaacgagttatagccatttatatagagaattataaaaaaaaaacgtgggttgattcttcaatagcagttgaagatcgtgatgtttcaatttttttttttttggagatactactttaaattatgtaggaaagtttagatgtgtagctaaaaattaaaaaaaaaaacagagagaagaaattgaaataatatacagggataatttaattgagtgtgatggaagaataatgatattagtatcaagagaattatgtgtgcaagtgatattttggtaaataaaataaaagaatgagtataaaaattatcctactcatataaaagtaaaaatataataaaaattatattttgtatttttatgtaaaagttttaattaaaatatccattaaagaaaaaaaaaaagaaaagaaaatgaattattacatagaaaatataaattgacactttatttacagaaa

SEQ ID NO: 336090 - DNA, 684 bp, Cannabis indica
attcgaaaaacatgcacctttgctcttcgaaagcgagatttaccgcagcatggagttcctcctgatcatgatgcaaggtgttgtgtgaccttgcatgactccaagagaagcacagaggttttggattttagtgtcatctacaatggttgttcgaacattggtagcaggcggaacgactgtcttaggaatgcccctgttggctgctgaactagtattcccagtctcttgcacaccaagtgcgatttcaacaacaagagtcgtcacaccgcgacctacagtggatggttgttcgggagtcgtggttggtggaacccttgtgttcccttggttctgcagtgcaggatccactgtctgtagattttccggatcaaccacgccgctgcgagtctgtaccaccattgtatttgcgattacatttgagataaagagcgatccttgattcttctctcaatgaaagcaccaaaatgttgacgtcgcttttagccaacgatagtgagtctaatttgtaagcaacaagtagtataataggcaggtaaaataataaagcaaataaagacacgacaaatttatagaggttcagtcccgagtagttcggtaatagcctattcctcttagcttgtattgacataagaataaggagaatggttctttttcttagagcacttacaataatatctctgaata

SEQ ID NO: 336091 - DNA, 1276 bp, Cannabis indica
ataataaatatgatactgaaacatttattatgtaactacaaaatacaattctgtaattatagaataaaactaaaaagacaaacggtgtagaataataaaaacgcacaagatttttgtaagtggtatcaacaatttttgcagattgttattagtccacggggccacacccagagataagattcattggataaatagactctctcttattgtatatcgcaagcttgatgtattccatcttctaatcaaatctttcgaaactctataagtgctcaaactcctttcgatctccttgaaaagtacttacttcctcctgaggcaagacttgaaaagctatctcctgaaagcttgtagaaccctctctcggaggtagcactgttgttcttcttcttttgtagacttgatttacaaactcaagataatataaaatacataaacatagagaaagagacgaacatcctcttgtctacaaagactctctttcttagaaaatataagtgaaatacaaagatgtgaaagaggtgctaaacctacctgttataaggtgtatttataatcaatatactttattgacagctcatatatgatctgaacaagagcacaactcactagaaacttctttaaaaatgatcttcaatcagcctaggaatttctacttccgtacttacagaatcatgaataataagtgcgactttcttttatagaaaaggaaagttttacttcagttttcatcacaagaaatttgatcaaaccaattagaaaactcatataggatcagattaacgcagcatgaaagataaaaattgatttattcataaaacttaccatttatgaaaaactttccaaatatagaaaagctaatcacttttcatactttatataaatcaatcaattaaatacaaagatatgaaaataaaaacacaactcagctgaaattaataattaaataataaaatattcttgtcaatctaaagatgacaaaaatagaattaacaatattccctttttgacactttgattgaccaaatattttataagaaaaaaacctatttatgaagtgttagaaacaaaacaatagagtatagaaaatgctgaaattgctttgatacctccaattgatactacaaataatttccaagctcttgaattagaagaagaaagtaggaataattacataaggcaccattttttgtaaaatatttacatttttacgttcaaagaatgttttttttttacatttttatggttttccaaaaaataacatgaaaacaacataaaa

SEQ ID NO: 336092 - DNA, 1128 bp, Cannabis indica
agaattagaaattggcatttttgtgaaaataagaaaaaattgtcaaaagtggaaaaattccaagtggggcccacatatccttggccggccacttgaagagtattttccatttaatttttatgttatttgaatgcataataaatccgaacctaaacctaggtggttgcctataaatagatagtgatggttaaatgtttatattcgaaccagccctctttccttcttcatattttcataccttgagtaatagagtgagtgcccacacacagtaaaacatattccaacaaatacgacaaaaaatgctcaaaggggaagaacacagcatgaagaagcaagtgtgacctcggggtgctcaaggacccacagttgatcaactcgaggaagagagagtacccgtcgtgctaatgatcgagaaagcacaggaaccagtaaatccgcaagtccgtcaaggacgaggtccatgagcaagacgaggtccgtaagaaggacacagtatgtgagtaaaacgaggtctgttagtaattactcccaactggatctacgatagcacttgaattagacaaaacctgatcttccccaacaactcggtccaaagcaagaggatcccatccaattgcgaatagatgagttggaagataagttcaggagatatcaagtgggggaattaggaagaaaatctggatacgactcaaacgaggagctcgagctgtaccatctagatattatgaatactccttttccacagggatttaaaaaccctcacgtctcatcgtatgatgggaccaccgatccggtcttgcatttgaataactttaacacaataatgcgagctagtaatgtgacaaataatttacgttgtattttttttcacctcattagttggagcagcaagcagttggttcaacaaatttactcatcattccataatttcctgggaatagctttccaaggatttcaaaaataagttctaagtcgcaagtgatagacgacaagtggcgtcattactaaccaacataaagcaacaaccccacaagacacttaagggatacttaagtcgttttatcacggctgctgcaagggttagaaatctggatgatagtacacagattattgaccttcaggcgggga

SEQ ID NO: 336093 - DNA, 567 bp, Cannabis indica
tataccttctttttgactaaatccctttgctacaagtcttgccttgtatctgaccttgccagttccattgtcactttctttttccctgaaaatccacttgcagcctatgattctctgtcctttaggtcttttcaccactatccatgtcttgttcttgatcaaagagttcatctcttcatttacagccattaaccatttttctctagccttaccctgaattgcttcagtgtaactgagaggttcagagttttcaatctcttctgcagcagcaaaggcaaaagcagtacattctgaagcagagtaatctgcataaccaaatctatctggggcttttgcttcccttctttctctgtcccttgcaagttggtaatcacttagattttcttgatttacattgtcatcctcagattcaactcgagcttccccagtttctgtcagtggtgcttctggtgtatcacagttttgacttggttcatcttgatccacctgaacttgtacccttctattcaaaattgaattctgtccaggtctcatagccatttcattctccttgaacactacatctct

SEQ ID NO: 336094 - DNA, 879 bp, Cannabis indica
ttttgtagtaaattatttaattaactaatgaattgattatatacaagatcaaaatgcagtaagttttaatgattgattatattatttattataataacaaataataatataatatatataaactaatataaatttttgcttatttttcagtttggagacaagcaagaatacaatccaaaaaccaatttattaccagtacatcgatagtagatagaacggttgatggcggtgattcacgaagacttagatgattgatgctgaaaggcctaagaatttttcttccctagcttatttttttaggttaacttgtagctagatttattaacttattgattaatacttggactaattttacaatctttgtgtaatatttaattgtaatttatttagttacttctatgaaatgaaattaagtatattggccaatcataaaattaatttaaatactttttaatttaccttttcaaaaaataaatatttaatttaaatttaaactaaataatataatgggtgactcaatggttacatttttattgtaaccatcatggttacatttcttttttacctgtaatagcaggttaccaataggtaaaacttcttttttttagaatccattaattataaataattattttcttaaaataattaattgatatttaacaagacctattttagcaattaatatttataaataatattttatataaattcatgctataattattttaacagataagccatttaattataatattttacaataaaaccttctttttttttttacaaaaattagacatccttttacacagattagaattctcttcttgtataataaatttttaaataataattatttttaattgatattaattttttttt

SEQ ID NO: 336095 - DNA, 508 bp, Cannabis indica
aagttaatacggatgcgggtgttagcagttctgcaggaagcatagtttgggtgtggtggttacaaatgagaatgatgaagttaaagctggactaattatacctatggctggttctgtaccaccggaggttgcggaggctaaagctcttttggctgctatttcttgggtacaagccactaagcttcctgttaatatcttgcaaactgattgtaaaagcatagtagataaaatttatagtgctagtagtcataattctgttgtaaatgatattatcctttgtattaagaactcattgttgttcagtcctaatctggtcattgcccatgttcctcgtgagctcaataaaattgctcatgtgtgtgctagggctggtttaggattagacagtgagtgtgtttggaatggttctttaccttcctttgtaacctgattttgtatttgtattttcttatttaataaaggatcaggtttttccaaaaaaaaaaaattcttagaccaacttttagta

SEQ ID NO: 336096 - DNA, 550 bp, Cannabis indica
cttggagattggaggtaattggctgagtttattactgtaaaactgatgtcaggtacttgtgatggtgagataagtagtttccctattaagcttctgtattgagttgaattttgtaagagcgtgccatcatcattgttgagacgtggtttagagtcgaggcaacatgagtcttttagcagttggagtgtgaagggtctttgactgactaattattcctttaggaacatctggctatctcgagaccaaggaagaaatgtagactgaccaagatcccttagtttgaattgtgcatcaagggtagagatgaatttgttcaatgttgtaatatttttagtagcaactataatatcatcaacgtaaatgaggaagatgtggtggttctatacgtgttcttgctccatctcgccgaattaatggttattttccaagtattctcgtgttgatgcggtagttctatacgtgtgtggaaaatgagggctataaatatatttcttcttccttctctatggctgtttttgtgtttttttattctgattctcctataaataca

SEQ ID NO: 336097 - DNA, 647 bp, Cannabis indica
aacccatcggccatattgtagcgtttttttagccttttgttccttccttctttgtctgaaagtgcgttcaatttcggggtcaataggagcaagttcaaggtcttcttcttcttcgttcatacactagattacacctgaaaaaagaaaaatcagcgcaccaaaatgagattaaaaatatcaaaccagaaaataaatcgcaaaatagttgataatacacaatttttagtttcaatccccgccaacgacgccaaaaacttgttgtgaaaattatatacgcaagtatacgcagtcaaacaagtaataaagtgataagtaagatcgtctccacagggattgcaaacaaaaatatgttgtaaaaccaactaattacaacttaaagtaaaaagaaataacatgaaagtgaatgagcaatgattcaaaattaaaataacagtaattaaacttgctaaaattaatgctattgttgctagaaaaatgctttcaaaaagaaaagaaaatacaatatggtaaaagtgacattgaatagctaattcctcctatgctggtttttttttcccagttgctacagcattaccttagcattcctgccagagataacaaaatttcctatgtgtttgtgagaattttccaaaactcacaatttaagt

SEQ ID NO: 336098 - DNA, 511 bp, Cannabis indica
tttggaaatgtaacctattgtaatagaatttttttaataaacaggggatccctatattacgacagtatttaaaatgaaagtctttattttgaatttaattaaggatttaaattaaaccacacttttcaaaaaatttatagactagtaaaaataagtttataaaagcacacacgtggcgtccgtgagggtcagggcattataccatctttctttcttaagacatgagcagggcaccctcagattctgtaatggcataaactgggtatacgaccattccataattttaaaggtgtcttagggactgatttacatggaacaacatttaaaatgtcagtttccatctgaatagcatacccccagaaggatgtaggtagagttgaatagctaagcatggacctaaccatttccaaaagcatctgatttcttctctcagcaactctattttcctgtggagtgctagacacagtcagttgggattaaattccaagttcaattaaatgatctttgaact

SEQ ID NO: 336099 - DNA, 957 bp, Cannabis indica
gtctggttccatgtttgggtctgagttcaggttcgggttcgggtctcgactctaggtcctggtccagttacgagtctggatctaagtccaattttatttatgattcaaagtccaagtcctagttccagtcccggtcaacttcttgttttggttccaattttgggtcacagggtacgggttctggtccactttttggtttgggactaggttcaagtccgagtgtgggttagggtccttgtcagggttcggatccacggttgggtcccaaatccaaacaccgactacgggttttgtccaagccctgggtccagatcagtatcccaatcttgggtaccagtctggttccatctcttgtgccgggtcacgagctgggtcctaggctcaagttctggtctgggtcgggtactaggtcccggtcctagttctgtttccccggtccctatcctgattctgggtcaacgtcttgcttattgtgtgggttttgggttattgcctaggttcgggttaggtctctgttagggttttgatttgggttcgggttttggtttaggtcctagtccttgtcctagtcctagttcggttctagttccatttgcgattctgacttcgagtttgtgtttgagtttaggtcaaaatttaagtcggtctgagtttgggttcgggtccagatttcaatctaggtccaattcaggctcccggtgagggttcgcgtcctgggtcctggtctaggttgggtccgagtcccaaattcaattctcgatatgagtttggattcagttcttggtctaagtcgttggttctgatcctggtctgggttcgagtttttgtccaggtcttggctagctttgggactgattctagttgtgggtttgaattctggtccgagtctgtgtccgtgtttgtgtcgaggtctggaccccgatctgggtctaggttcaggtccaggtccaagttggg

SEQ ID NO: 336100 - DNA, 649 bp, Cannabis indica
aacttattatatacgtgtacgactaaaaccttgtctttgagtatttagatgatctgacggctcaggtttcacagctaagaaaagcgaatcaccagatcatgacaagtgtcaacatcacaacgttgagtctgagaattctatcctcagagcccaaatgagtcgttggataagattattaacttcctaattaaacgcaagtaataatgctgtcattttgggtagaggaataattggatccaacggtggagatcatttcatggctgctgctggtgggagtttgtttcggtacggtcgtgcctatggaaagctttctgaaccaacctattatggcttctgcagatgtttttgatcagtactaaacttaataatttaattaatccatgatgggtttaattttctgggatttccatggttaagaacttaaggaaaaaaaaaataattgggtttaatatatatatatatatatgaggaaatttttttactagaatccttatctgttttggtatttaaaaaattttgtagtataacttttattcatgatcacgtacattacgttatttaaaatcgctaaatatatagtttacagtgccaaaaataaatagttgtgcatacaacaaaataagtaaatcttatttcagcattgtaaact

SEQ ID NO: 336101 - DNA, 843 bp, Cannabis indica
ggagatgaactcagaaatgcattcaatggtgcttcaaaagcttactatgctgctgaatatgaaaaatacatgagagatttagacaatattcataacggcataagagactatatggtcaacgaagttggaaacagtaagtggacaaggttatacagtcaaatcaagtgatacaaaacaatgacatcaaacatcgcagaatctgtaaatgcaacactcaaagaagttagagaatcaccaatagcaactttattagaatgtcttcactctttggttcaaaaatggtattggggcaacaagaatagagcattgtctattcacatacttggcacaaaaatcaaagaaaagtctacgtaaagaacgagatatgagcttaaagtacaaggtaacatattattgttctgccttataaatattattccacgtttatttaaggattaattacaccaacacacgctaattgtattttatttatgaatatatgattacgtaattaatttatgtgtataccaatatgattttctttacattaatatgcggtatacatttaagttagaataagttttatttgctttctctgtaaaatcttttattaaccatttaatattatttttttttctttttctaaaacgtgttctctctcctgtaagcattcaaaatctttttattggccatttcattccattgaaacaatagcctccaccgaagagaaagtagtagatttaaaacaatatatacaccacatttatatagtatactcataattttcttacactatattcataattttttcaatattaaaaaataaatctttctcttttctatttttaaaaaaaagtttaattt

SEQ ID NO: 336102 - DNA, 616 bp, Cannabis indica
atataccacacacactcagtactttcccgtacttgtgtaggtatcactatatagtactcataaacaatattcactataccaatgcactttataccttaactgtacaagtgttggtagtgaaactgacatttaagcatgcatatacacatagcatatacatacactcagatattgatatcacacattatatacagttcttaccttctttcaagattcaagtgtgctggccgacctgaatggaaagtctcgcgctagatggatgtcctaatcacataataaaaccgagtaaatcacatgatcaaaaccctaatctgggaaacccaaacccacaaccctaggttctgttatactctctaggggttactctaactctagaaatagggaaacgcccaactgcaacactgaaatgcacaagaatcgagaaaattaagcacttggggatcctgccaaaaccggctaggttttgcaggtactgtttgcaccggttcgccccaaactttccatttcttgctcaatcctccacaaaatgcaaccaaaccttccagagaacccaaacaatgcatagacaacattttctaaccagtatttcatagaaaactcagtgtaaacaaatatg

SEQ ID NO: 336103 - DNA, 966 bp, Cannabis indica
aaagtggctaacggggccccccatatctcccacatgctctttgcggacgatagttacttatattgtaaagccacccatgaagaagctctccgaataaaagaagttcttcaaaaatttgaattagcctcgggtcaaagggttaacttctcgaagtcttcaatcttcttcagctccaactctagtactgaagtgaaggatagattaactacgctcttaggcatgtgcattgcccctgaggggagtttgtatcttggtcttccaggttctatgggagaaacaaaacagcagctttgggttacttaaaggaaaagttaaggaaacgactccaagcttggggcactaaatttctttccagagcaggtaaggagattcttattaaaacggtggctcaagcccttcctatctatgccatgagtgtctttttactttcccttgagatcattagagacatggaaagcatgatggcaaagtattggtggcagtcctctagtaattctccttcaagtatccattggatgatcctagaagcatctttgtggtcacaaaagtaaaggtggtatgggttttcgcaaccttcagaattttaatctttctcttttgggtaaacaagggtggcgacttatggaaaataaggattctcttattttccgtgtgtttaaagacagaaattttccccatggttcgtttctcacggctactcttggtccaaatccaagcttcgtttggcgtagtattttggaagctcagtcactagtgaaacaaggcttgagataggttattggtgatggaaaaattatttctattttgggggaaccgtggctgcctgatgaagaaaaccctctgattatctctaaccatcctagtctcaataatgctaaagtttgtaacttgctctctatggatggttctgggtgggaaactgtaaagcccgcttagttaatttggaaattagcagttatttatgtt

SEQ ID NO: 336104 - DNA, 532 bp, Cannabis indica
gcaaaatacatgatctgctcgcacaattcaaaagctacatcctcaagcagattccaagagaggaaaatacaactgcagatgcgctagcccgtttggcgagcagcaatataagtgacaaggcgaacctggtcccgatccagtttcttgaagagcctagcatcactggcacggaagaaatcgaaatgatagacacatctccgaactggatgacgccaatagcagcctatctcaactctggggaactcccagataaccgaaatgaagctcggaaaatgagaagaaaggcagcacggtacatcatcgtagacgggatcatgtacagaagaggattctcaatgccattactcaggtgcgtcacaccaaatgaagctgcacgacttctatatgaagttcacgacggattctgcagaaatcatgcagccggacagagcttatcaaagaaaattcaatggtacggctacttctggccgacgatgatcgaagattcgaaagcttatgtcaagaagtgcgacaaatgccagagatttttaaa

SEQ ID NO: 336105 - DNA, 917 bp, Cannabis indica
ctgagttttgatcccgatgtgggtccgagtctgggttcgagtccaggttcgtatctggttccctatctaggtccgcgtctgggtcttggatcaggtcctaagtctaggtctggatcagggcctaggtccaggtccgtgtatatgaccgtgcatgggccagagtttcggtctcgatttgggtctggggctaggtccgagtttggttcaaggtctaggtttgggtcctgatcacggtcctagtcttgttcgagtatcctcgtctggaagttcttgttcaggttccagtttcaagtctcgggtctgggttagggtccgagttttggtcctagtctgggttcgggtcctggtttgagtcccagatctagatccctatcacgtgtctcggtccggttctggttctggttcagtcttgggtcccatgtctaagtttgggttcgggaccgtgactagggtgcacttctaggtctcggccccaattctgtgtcccgagtctggttccatgtttgggtctgagtttgggtcaaggttcggcaccgagtctaggtcttgattaggattcaggtccgggtcccagttcagatctaggtctgggtgggaaactgggtcctggtccggttacagtttcgggtctaggtccaggtcgaagtcctggttccggtcccattcatgggtcttgatctacttccgatttttgttccaatttcaggtcacacggtatggctttggatcaaggtttgggtttgggaatgagttcaagtctgggtccgggtttgcatattggtctgggttcgggtttggggctgggtcccagatccagacaccgactacgggttcggtccaagccccgggtcctgatccggaccctgacctcacgtgcttgtctggttccattttttgtgccgggtcacgagctgggt

SEQ ID NO: 336106 - DNA, 1070 bp, Cannabis indica
cccagtcctagttccgttgcccatgtcccaatcccgtttctggttccaggtcccgattctagtctaggtttgtgtcccggtgtaagttcgggtttgggtcctagtcgcggttcgagttttgatctcagtctggttttttatttgggtttgggttcgagtctgggtcttggtcttggtcctggtcctagtcctagttcggttagttctagttgcgattccgagttcgagtttgggtcagggtttgagtttgggtcagggttcgagtcctagtctgagtttgggttctggtctaaatcttggtctaggtcggaatcgggctgcaagttatggttagggacctgggtctagttctaggttcgagtctgagtcccaagtttcgatctcgatctgagtttgggtttagttctgggtctacgtcctgggatccgatcccagtctgggttcgaattcgggtccgggtgtaggtctaggtttgggtctgattttgggtctgggtcccaggttcgggatcaattttgggttcggttcctagtttgggttttgtcctgatatgggttcatgtccaggttttgtcctagtttgggtcgggggccggtttcgggtctgggtctgggtccaactttagattcgtgggtccaggtcaggtcctggttcaggtttgagtccaggatttagatcttggtctgggttccgagtcataggtcccaagtctaggtccccaatccaagtccagttcctaggtcctggtctatgtctaggttcgggttcaggtcccgagtcttgattatattctaggtctcagtctgagttcaggtccaggtcttgatcccagtctgggtctgggttcaggtttgggtccttgttggggtcttgatcctggtctgggtcgcgtgtctcaggtcccggcgagggtttaggacctggtcaggtctaggtctcggtccgggtctcggtcgaggttcaggtcccaagtctcatgtcccagtcctagtcaaggtctcggtccaggttctggtctgagtttgggttagattctggtctcaagtttgggtcctagtcatagttccaat

SEQ ID NO: 336107 - DNA, 786 bp, Cannabis indica
ttattcattgcatccgggaaccatcaaaatgtatcaggaccgaaaaccctacttctggtggtatgggataaaaagagaggtggtggactacgtgtccaaatgcttaacctgccaccaaatcaaggctgaacattaaatgccggcagaattattgcaacctttagcctttcccgagtcgaagtgggaggacattgcaaaggatttcgtaactggttttcttagaaccacaggaatgtatgattcagtatgggtcatagtggacagattcacaaaatcaactcactttctaccagtgaaagttacatattcaatggatcagtacgctgaactatatgtgaaagagatagttcctcttaatggagcttctaaattcattattttagacaaagatccaaggtaaacatcgacattttgggtgaattttcagaaagctattggttcaaagctgaagtttagcataacttttcacccttagacaaatgagcaattagaaagaacaattcagctactagaagatttactgcgagcctgtgtcatggacttcaagggttcatgggtaagtacttgcctcgagtagcattctcctacatcagtagctaccagaatacaataggaatagctccctatgagatatcatatggtaggaaatgtcggtcccctattcattgggacgacactggagaaagaaagtacttaggtttggaattagtcagaggaacaataaaactatagaaaagatcaaggctccgatgcttaaattcacagagtaagcagaaaggttatgct

SEQ ID NO: 336108 - DNA, 901 bp, Cannabis indica
gcatttattagaggatcgtgatagaaagcggtttagagaggtgactttacatgtgaggctttggccttcttttagtgggtgatggaatttccaccaatgctttgatcttcgcggggttggcctctatacctcattgattaaccatgaatctgaggaatttccctgaaccaactccaaagacgcattttagggggtttagccgcattttgtatttttgcaatatatcaaacattgcctgtaaatgggtgacatggtcttttgcatgttgagattttacgagcatatcgtcaacatatacttccatggtgtccccaataagatctgcgaacatcatatttacaagcctttgatatgtcgcccctgcgtttatcaaaccaaaaggcattactttataacaatacatgcctcgatctgtaatgaacgaggtatgttcctgatctggttcgtacatcgagatttgattatatcccgaatatgcgtacatgaagctgagaagttcatgacctcaatagtgtcttctgcggcttgggcggctgcagcatgatcgaggatccttggatccagatctggtccatctgtgtgtggcacctcttcgatcctaaggatttcctggcgaggaggcggtgcctctaataaatagatgacatttattgacttcttctctccgagcttgactgctgcattatagcattctcacgagtctgactggactcctcgcacagagcctactccaccaggagtagggaacttcattgtgagatgatagattgacgtcacgatcttcatctctttcaagattggtcgaccaatcacggcattgtatgccgaatattggtcgaccaatcacggcattgtatgccgaatattggtcgattactgcaaagtcagccattgacttggc

SEQ ID NO: 336109 - DNA, 638 bp, Cannabis indica
acataattattaatatttataacaagcttcaattattcaaaaaaaaaaaagttctttagaatagatagaaagttctttaaatgtaagaattctctatttttttctaaacttttttaatagtattttaataaaaaaaatactactactttttcattattttataaaattaatatatatctaacaaatttagattataaatattattaaaataatcaaatactaactaaagtaaggaatatgattaagccataatgttgaccgaagttttcggtaaccaatataataataatatttaagaaagctgtaagaagttaatgcacgagatttttacgtggttggggcattaatgagccttagtccacgagcctttgttatttatgagagtatttattacaaagaatattcttggtggtttttctctctagttcttatgaaacccagaattctcgacccctgccttaatgagtttggggggtatttatagtgtttctctggggtgatccctagaaccgaggtacatgtctttctgtattattcagtaaagccacacattcccaacgagtatatcataggaaatgcatggtctaatccctaggctttttaggggttagatggatataatccattatcctttcttg

SEQ ID NO: 336110 - DNA, 1271 bp, Cannabis indica
cctttttctttttcccgggagtggaagttgggtttttccgctagttcccttctgagggataccttataggtctaggttccctagacttatgcttttgggtgcttggtgaggactcttttggtgtttctccaagtcaagcagggatggctttaggatgcacatggatccctgccgcctccatggctttctgcatggcaagcatcacctcttgcatctttttgggctgtgatttcagcttcatgatcaacagccttttctcttaagagaactagttctgtgtaactaccttcgtcataggcgtcgtactcgtcaaagtttccttcttattcgtcgtcgtgggttcattctccttcctcagagcccacgttaactcttgaggccacttcctcatcttcatgatcttgggcgtcttgaggaggacggggttgacgtgtgttacgagtctccaccattgttgttttaatgtataaggctgttgtctatttgcagacgcttccttcagctctcaatgaaagcaccaaaatgttgaccgaggtttttggcaaccaagttaataatgtataaaaaaagctgtaggaagtttaatgcatgagatttttacgtggttggggcattaatgagccttagtccacgagtcttttgtatttgagagtacttattacagagaatgttcttggtagtttttctctccttggttcttataaaacccagaattctcgacccctgccttaatgtgtttgggggatatttatagtgtttttgtgtggtgatccctagaaccgagctacctgtctctctgtatttttttagtagggacacacattcccaacaaatataaaatgggaaatacatggtttataccctaggtatcctaaggattaggtggatataatcctctatcccttattgactgatgtgattcctcgtaaagtagccgtcactaggcttattaatcatagcgtaatagctgcagaagaggggttacgccgtcagacttaatacttatggcagttccaatacgccttctcccatgcgacattaaatgtgaggtgactgtttaaatggggtctggtgcctcccggaggtgccttgctatagctctgctctcctggagtacgtggacccctcataccttctccgggaggtgttttaatgttgatactcttaatctaaaaggacttagtcaaattatctcaagaccatattccctgaagtccacgtgtcccagtcgcattggtccacgtattttgggaaaaattaaggacaacagt

SEQ ID NO: 336111 - DNA, 1186 bp, Cannabis indica
ccgaaagtgcacttcttcaggttaagttttattccgtaccttcagaccacttcgaagcattctagtgagatcgtccgcatggctcacgcatgttttagacttgactagcatgtcgtccacgtaaacttccatgtttcatcccaggaggcctttgaacatccggttaaccattctttgatacgttgcaccagcattttttaggctgaagggcacgaccaagtagcagtttacccccttatcggtcttgaagctagtgcattcttgatctgcaatgtgcatcttaatctggttatagccgcaaggcatccatgaaggacaatagcttgaacctggaggtggcgtctaccatctggtcaatccgaggtaaggggaagcagtcttttgggcatgccttgttgagatcagtgaagtctatgcacacctgtcatgtcccatttggcttcggcactagcaccggattggctagccactccgggtaatatacgtctcagatcagtccattggttagtagcttgtccacctcttttttcagggccttcgtctttataggatcaaggggacgccgcttctgctggactggtggcatgtccgggttgacgtttaagacataagtaattacatgcagacttatgccagtcatatctccttggcaccacgcaaaaacatccgtggctgcccttagcgctttaacaattctatctttctcctctggttctaggttctttcccagtcggaggatcttggtagggtcgaggtcgcatacatgcacttcctcgacgtcttccataggttctacaatctttttcggatcccacacggggatccaactcatcttcttctaccaatcctagctcaatattctcatggaccattaacaccggtaaatgggctgcgaccttataacactgcctggcctctccctaattgtccctcacggtccccacccgggcttcctgggtagggaatttcagacataagtgccgaatggacgtaattgcaccaaaatccaccaaggccggtcgaccaaggattgcgttgtatgcagttgggcaatctaccaccacaaaggtacagtacttgaaagtactctggggtgtatcctggcacaaagtgactggcaacctcacttttcccatcgggataagcgtggttccatcgaaccccgtgagttgggaaccgcttggtg

SEQ ID NO: 336112 - DNA, 883 bp, Cannabis indica
aaaaaaaaaaaaaaagatgatggtagacacataaagcggaagttctcatctcttacaagtttctttgggtaaaaatgtaaatttataggggtgcttggttgggttaaaatgtgtgtatggtataatgtagcctaaatgacttcttatctacctttcacctaagccatgacaattcaaccgaaaaagaccttttgatttcgagcaggaattgttgactttagtggagagaggtaggtcatgcaagcatattgaacattggttggcagaacgttgataagagtagaatgattgtgatatatttttccaattgaagtattttgcatctatacataattttttctaacttgtgcatccaagttaattcctagagttgttgaattgaaattctggtttggtcaattgcttgaagttgcacaggtggcagtggtagtttaattatttagaggctcaattatttgttgtgtcgttgttgctttatctcagtttttagttttactcaagggcgagtaaagatctagattgggggaatttattaggctaattttagtctaagtttcgggtcgtattttcgggtagttttcactctttgtttctagttttagggctattttacgcttgattcttttgtttcaggtcctcgaatgtttaacgaagtatttgcaagagttgaggacaactggtgaaagaattgagaagaaaaacaaacaagtcactttgttgcctagtaccaccgcgacggggatcggcagagagttttggaaattgtggacaacaaccttcgccgcggcgaagcatcagtgatgggatttttggacagtttcgtaatttcatgaattttaaagattagacctggtttaatgagagggttgttgggttttatgcc

SEQ ID NO: 336113 - DNA, 664 bp, Cannabis indica
agaacctaaccatctcaggattctgatcatttgatctaagatcaactaggtgatattgaattgaatagatattacagtaagtttgttatatctaatccatgttcaatatgggtcccttccaatgcatactccatacacccaacccaagcttactttaaccaatgcccaggaaaggacatagcacttatgcaaggtgcaagtaaactacattctaaattatcctattggttaaaccatgtgtactgataaatcatagaaatacatataatcacacaatcttgattattttctactgtgttgacaacacaataaacaagaatatcagtgtgataaggattttgatgaatttataaatcaaataaataaataaatgatcacatgaaccaaataacacattaaacaagtaatgaaattaaatttgtttctttattgataattaaatagaaaagattacattgaaatagagttttatttagggcacaaagtccaacaataggcactgacagaatcatctccttgatggagataagttagagtttcatttaattcaaaaaatattgtaccattaacttggttgaactgattgttgaagacaatccacatcttagatgcaatatctaagtacatgatgctgttggattttatgccctaaataaaactcttt

SEQ ID NO: 336114 - DNA, 1135 bp, Cannabis indica
ccaattgtcaccaaaaactccatgcgttgggttttttgtgtttcgcatgactttttgcagaaccaaatcccctactcacagagtttgctctttgaccttcaaattgaaatagtgagctgctgatagaccgcgttcttcagatgggcctgatcgcacttttcttctaaaagatcaagttgaagcaactgtttatctgcatttctgctcaggttgaatacatctcttcgtagggatcctgccccaacctcgactggtaccatgggttcgcacccataggagagccagaagggggtttcaccagtcgtggatcagggagttgtattatacgaccataaacttttggaagttcttctggccatacccctttacgctcttcgagctttcccttgatggtatgcttaattatcttatttactgcctctatttgaccattactttgtggataaacaactgctgaaaatgctttttttaattcccaactcatcacgtagctggcgcatctccttatagtcaaactgttttccattatttgagatcaacttgtagggtatgctgaatctatagatgatggaactttacacaaactctcacaatttaacagctgtaatagtcgcaagggcttttgcttcggcccacttggtgaagtagtcgactgcgactacggcgtattttactctccccttctcttttggtaattctccaattagatctatgccccagactgcgaaaggccatgaggcgtctactcgcaatgtcgaccagtagtacccttgccacattatttttagagcaagggaattaccccctgtacggttgccgcagatgccaccatgcactttgtggagtatgtagtcacactcaatcccatctatacatttgagcaacggttggcaaaaacttctgcgaaagagcttaccatcataaatgacatatcgagcggctcgatatcgcagttttctagcctccatcttatcttcagggaggattcctttttctaagcaatccattattggggtcatccaggtgacttctttaactgtatctacctccattaccttgtttcgactaactgttagatgagttagcacatcaacaggaattacatcgagtaattctgcttctcttgtcgaggcta

SEQ ID NO: 336115 - DNA, 808 bp, Cannabis indica
ttctgcttctcttgtcgaggctaaacgggctaaagcgtctgcatgagagttatgagcacgaggtattctggagacaatcactttcttaaatttttgtagcaactcacaagttagggcgagatatccagccaaacgacctcctctagccaggtattctccatttacctgatagacaacgatctgggaatcgccaaaggcttgtaaatattcgatcttcatctcaacagcgagtttcaatcctacaatcaaagtctcatactcgacttcattgttagatgcagaaaattcaaatctaagtgcagcatgtaccttaaaattactggggcttattagtattataccaccccctgagccttcgctattggatgctccatcaacatacaaactccatccttcattgtttggtacatcaggatcaactcgttcttcgataactgccacttcgctgcttggaaattcgagtatgaaatctacaagggcttgtcccttaattggggatttaggtttatattttatgtcgaattggcttagctccactgaccatttcaataatctacccgaggcctctggttttgctaaaacttgcctcaaagggtagtttgttaaaacttcaatactatgggcttggaagtaaggtcgcaattttctcgacgttgttaccggggcaaatggcaatttctccatctgtggataacgagtctcagcgtctaagagacgcttgatgacatagtacactaggtactgcttctggtcttcgcggattagtaccaaactaatcacatatttggacactacgaggtagatggat

SEQ ID NO: 336116 - DNA, 549 bp, Cannabis indica
aagcttattaattactatttgagttgctcctccaggttcttcctaatgtacacacatttggtgggttttcctgggtcaagaataacgtcctccaattcttcaattggttttagtaggtttctctcatcttgaactcgaggatcaagatcttcatctttcttcttgttttctcctgccaagatcgtcatcagttgatgatcggccttcctatactgtagctctatgcgataacaatcgagagccagcatctggttgccacgcaccacccccaccccatctggggtttggaactttaaagacaagtgcttgatcgagctgattgcccctagttcgtgttgggttttatgccctaaataaaaatctatttcaatgtaatccggatatcaataaaaaaacaaaagtatttttcattcatttgtgtatgttttggttcgccttattaattatttgtctatttgatttataaattgtaaacatgactatgtgattaaagattcctaaatttatcagaacactagggttttactgatatgacaatctacaacagag

SEQ ID NO: 336117 - DNA, 716 bp, Cannabis indica
atcatacaatattgttgaatgtcatttatgaacaaatgcatcctaatatcatttctgtagtattgaattcatccacaccttttccaaattccactgacagtttagtcatccagcttctaaagtccaacatgttcttctatataacaaattatattcaaaattaaagcatacaaaatgtcttatacaatttttgatgttttacaacaaattataaactacttaactaatattttatattcacattatcaatttgttttaatctttttgacttaactactattttctcatattaatttatatttcttattgtttatattattacctttttaactaattatttattattctacttaaagattaaagattagtttacattttttcctttcaatttaaatattttcaaattatgctacatacttgtatagtttaatgtgagtttggaaagacacgatgtaattgaatttgtatataattggaggtaattatacaatttggcatgtttgtctgaccatgtaattacactgtaactgtgtaattggaagtaattgagggattccaattacactctccaattctcatggcccccgatgagaattgaatgtaattacactgtgtaattactaaaaactttctatatattaaacattagctactaaaaaatattattttctcatgtaattactaactatttgtcaaacaagatattaggaattcat

SEQ ID NO: 336118 - DNA, 1172 bp, Cannabis indica
ccaggtgtcaatatgggcactagatccaattttaggctgccagacggttgtatttgattaccgagtacacttgtatcttaatctttgatgaaaacaaagaatatacccagaagacttgtctaagaaaactccttagaattggcccatgttgacaaaatgtcaacctgggcactaggctagcatcaagtgtcaacctgggtgctaggctctctttttggctcccaagtcggtctgtttcttccctaaaagtacttgtttcctcatttttgataaagacaaagaaaaggcacaagatagttcttcagtttgacgcttggaagtgccccaggttgatagaatgtcaacctgagcgttgggtgcctgaggcacctagtgctccaggtgatcaaaaacaaaagtgctctaaatctaattttgatgcctcaaatatgtccgcgacatgtctaattcatgtcccaatacaaaattcgacctatttgcactaagacagtcctagaaactgaaaccctagttggattgtcaacctaggcgctcggtgaaacccaaggcatcctagttaaatttttgtgctgttgtttcatgtatttttagctttgagtcttggacttggatgcttcatgttttcatggtaaagaatactgaaagatagtgagttaaaaataacttggcagaatccaaacacacattccaaagttcccgaaatcaacctaggcgcaaggctagggacccttcctaggtggactactataactgagaagtactcaactctgggatgttttctttcttaccacatatcaaacattaacgtatgcgtcatcaagacaagtttatggatcaacaagtacaaacctccaagaccacacaatgtaacgtgcgtgccaatatggcacgttacaagctaggtgatgcctacaagcaggccaagtggtggtcaagtggtggcgcatgttggtgtgcatgctggcggcatgctgatgcttagtgtgtacatcagttgcattttcgtaaatatcttcaatattatctagatcgggacgggacttggtattcgctatttatttgggtctatgaatataatggtgcgatcagatttgagaaacttggtgatttggtttatggtgatgaccatatgtctacagagtaaaaattatatatcttccttgtagaagact

SEQ ID NO: 336119 - DNA, 731 bp, Cannabis indica
cacaaaaaaaatcaatgaaactcaacatgccattagagatcaaagcttaaacttgcacaaaaccaactccagacatcaaaatcagctgctagaagcaaaatataactcatataaaacttaaaatttgaattgtatcacaacctaaccctaacagcccttaaaacctaaaatcataaatcaaaccaagtaaaaacttacagaattcaattaacaaaagttctagggttaccttagcttcaagagtgcttgattctctattttttggtttttgttccaatttccttatttttctaaaataagactgttatccctatttttgtactctgacgtggcatcacatgatggtgacacgtggaatcaacttcgagtatctactcagagagtacaatccaaacaggatgcctcataggccttcctggagcaaagcgattagaaatccgtgcagagcgaccaacacttagtgaattcagctttcgcatcgtgtgtcatcaaagaaatccctataacttggggatcagactgcagagatatggaaaactatccaaatcccacgatcactatattctgcatttatcatgcaatctttctgcttatatacattgtaacaagaagggaaatacttcccttgcaagctcatagccctataaatagtgatgcatgctcactgggcaaagggtcgagagattttaccctagagatattatctaagaattcatattcagagatattgt

SEQ ID NO: 336120 - DNA, 756 bp, Cannabis indica
cgagagaccatcttatctcagaaggcacaatcttgaggaaactacgggcaatgtatggtgagacatccatctcactacatataaggaaatattgacgagacaaatcagctcttgaaacacttagcgtagtttccacaatataataacaagtgtaacaacttggaaacatgtaggacatgattgtccagtctacgaggccttatggtcaaagagcagttcttaagcttactcagtacactggggctcatgctactgttggaaggcatatgattaaaccaagttattattggtcatctatatgcaaagcgagatgcctctactcacgtcagcgtcaactgcctagaagataagaatgataagcggttgtgcagttatcgattgttatctacacgtatttaaatgaaacgtgatcaaagcccacatttcatgaaacagttatataattcaaatttaaatgtaaataactaccaacctatattcttataaataggggcagattctacaaaaaaggggacggaaaatctttgagagaaaaatatcactaactgtaatattgtgtcaaatactcagaaatatcttgaataagatagactcgtggagtatgcagatttacctataaaacctcgtaaaatacttggtgttattattatagttattatgcttataaatttttcttgtatatgtatatctgtatttaatttattacgaaaaaggctcatattcgttaacaaaaatctgcgttaacagtttggtgct

SEQ ID NO: 336121 - DNA, 822 bp, Cannabis indica
ctcaaaggtattgtaaaacctcaatgctatgggcctggaaataaggttgcagttttcttgacgatattaccagggcaaatgctagcttttccatctgaggataacgagtctcagcatctaacaaatgcttactggcatagtacaccgggtattgtcgaccttggtcttcgcggattagtaccgagctaatcgcatattctgacaccgccaggtaaatggataagacttccccagacatgggtttggacaatattgggggctgccccaaatgcgtttttagtgcttgataagcttctttgcatttttcactccattggaacttcttgttgccttttaagatctaaaaaaactctttgcatttatcagaagatcgtgatataaaacgatttaaagcgacaactttacctgtgagactttggacttcttttggcttagtcggggatcgcatttctactaatgctttgatctttgcagggtttacctctattcctcgctgattaacaataaacccgaggaatttccctgaactgactctgaagacacacttaagaggattcagctgcattttatatcgccccagtatttcgaacattgcttgtaaatggttgacatggtcttctgcatgttgagattttacgagcatatcatcaacatacacttccatggtatctccaatcaaatctgcaaacatcatattcaccaacctctgatatgtcgcacctgcgtttatcaaaccaaatgacattaccttataacaatacaaacctcgatctataatgaacgaggtatgttcctgatctggttcatacatcaggatttgat

SEQ ID NO: 336122 - DNA, 1043 bp, Cannabis indica
agtttggacttaaggtagatgaaccgatctttggacaatggtttggtaagcaagtcagcaatttggtcatgacttggaacatatctaacagacagtctcttatccagaatttgatctcttacaaagtgtaagtcaatttcaatatgcttacatcgagcatgaaacactggatttgcagccaaggcagatgcactttggttatcaacccatatgagaggacagtgagaaagagcaatctgtaattcagtgagaagagagacaatccatttcaactcagcagcagtgtttgcaagagcacgaaactcactctcagtgctagatcgagcaacaacctgttgctttttagctgaccaagaaatcaaattattccccaagtaaacaacatagccccctgttgatcgtctgtcatcaacacagctagcccagtcagcatcggagtagctttgtaggaccatttcagtggctggtgtaagtagaagaccatcagatacagtgcctttaagatatctgagtaatctcttgcaagtgtcccaatgtgaaacagtgggagccttgagaaactgactaagtttattaaccacaaatgcaacatcaggtctggtcaaggatagatactgaagtgccccgatagtgcttctgtagagggttggattgtcaaataactcaccatcttgcagagacagtttagaggtgctgctaatgggagtattgcagactttggctccgtccatatgaagtttaactaacaaatcagtaatgtacttggtttgagagagaaacatacccttggaatctcgatagatctcaacaccaagaaaatagtgaacatcacccatgtttttgagagaaaactgattatttagatcagtaataagctttgtaataagtgtctgattgggccccgtgaccagtatgtcatcgacatacacaaggagaataattgcagtgtcaccagtcccataaacaaacagagacgtgtctgacttcgaagctttgaatccccactgaagtaaactaaccctgagcttgtcattccaagctct

SEQ ID NO: 336123 - DNA, 1118 bp, Cannabis indica
aagagaaaacaaaaggagctaacctagcttgaagaatgcttagctttggatgagaatccactagaaaatcaaagcaaaatccacccctttgcacccacatgcacagccgaaaatagagaggaaagaaagagagagtttttctaatttttctattttattttctaagtgttgaaatgagaaggaaaaagagtaaatgccacatataccatattatttcagccatcaaataaacatttaaacatttatttttcaatttaataaaatcacaaaagacaaaaagtcattggggcaaaaagaccattttgcccctccataataaattctcataaaaaacactaaaggggtatttttgggaaattctaaattcccggccattcccgacattcccaatgtctaacaacccgtcccaaattaataacatactaagttgtgatttctactgagccaaacgccgagttccaaaataccgggcaccggaaatgcaaaatatgaaaaactactgaataacataataattaatcataattaactgataatttccaaattagctaagcgggctttacaaaacccctctactccaaaagttgccaagtctaaggagtctcgaggagggagtttagataggtcggaccaatcgagaggtgggtctgagctggtgcggacccctactccacctttgctagggcttccagaggccaagaaaggcaaggagatgctcgcccactatatgaactggttggttcctgaggttagtgagcagttggccggtgttgacaatgactcttctctggagctgctgatgggtggagtcttgaaggaattcacaagggtaagtctttcttgatgatttcatttaatcctctttacttggcttaaatactaaagtttttcctctgtgcaggccattctcaagttggcctacacctactctcgggctaagtctccttcttctaagaacacggctttctccaacaccatgagggcagaggttgacttggctaggaagaatgctgaagacggcagggcaaaactcagagctgttcagatggagttcggtgaagccaacaagaagctttttaccgcccagaagaaatagctgagctgactaaggatcttga

SEQ ID NO: 336124 - DNA, 629 bp, Cannabis indica
gtggtaagacctatgctgggcaaacaaagacaagccaaaggaggaagatgatgtagagacaacaccgacacaactaaaggagaagactactgatggccttccacagaaagaaactccacctctcatcagcattgaccatcacatcaaaattccctatcctcaaagactacacaagaacaagatggataagcaattttcaaaatttcttgaaatatttaagaaattgcatatcaacatcccattcatagaggctttggaacagatgccaacttacctgaagttcatgaaagatattctatccaagaaaaggaagttagaagaatttgagatgatgacacttactcaagagtgtagcgcagtcttgcaaaagaaataccacccaagctaaaagatccaggtagtttcaacatcccatgttcaatagggggttcaatacaaacaaaagctttatgtgatcttggagccagtatcaacttaatgtcactatctatgttcaaaagattaaaattaggagaagctaagcccacaacaatcacttcacacatggtagatcgttctttgactcatcctcggggtatgattgaagatgttttggtaaaggttagtaagttcatcttccctgctgattt

SEQ ID NO: 336125 - DNA, 1001 bp, Cannabis indica
gatgatctttttgatcaacttcaggggaaaactgtcttttcaaagattgatctccgatcgggctatcattagttgagaatccgagaggaggatataccaaagacagcttttcgtactaggtatgtacattatgaatttttggttatgtcttttggactgaccaatgctcctgcaacttttatggacttgatgaatagggtattcacggatttcctcgatatttgcgttattgtatttatcgatgacatccttgtgtactctcagtcagaagaggaggatgagcaacatcttaggatggttctacagcgactttgggaacataagttatatgccaaattcaagaagtgtgaattttggttgtcacaggtgtctttttttggacacattgttagcaaagaagggatcaaagtggatccgtgaaagatagaatccgtcagagattggccaagaccgaaaacagtgacaaaagttagaagtttcttgggtctggctggctactatcgtctgttcgttgaagggttttctaaaatttcaacacccttaaccgagctcaccaaaaaaaatcagcgctttgtatggacagataaatgtgaatcaagctttcgggagctgaagcagaggttaataaaagctccagtgttagctctgtcttctgataaagagaaatttgtggtttattgtgatgcatccagacagggtctggggtgtgttctgatgcaagccgatcgggttattgcctatgcctcttgtcagttgaaagattacgaatagcgatacccgactcatgacttagaacttgccgcagtagtgtttgctttgaaaatttggcggcattatctctatggagagaaatgtgaaatatataccgaccataaaagtctcaaatatttttttactccgaaagatttgaatatgagacaaaggcgttggttggagttagtcaaagattatgattgtgagatcctatatcatccggggaaggccaatgtagtggccgatgc

SEQ ID NO: 336126 - DNA, 533 bp, Cannabis indica
aggattttgaaccagatgcagacatcttagttctgaaaaagatggaaaaatccagcagtcaggccccaaaccaaaccctaagtcaaaaaagggaatgggggtcccctaaccgctggaaagaggccccctccggacacttgtcaaaaagaaagccttagaaggttttccctgacaagagtcgggtgcaagaatcccacagatggtgacattacgaataagcaaagaaaaggaaaaaggggtaaaaaatcgagaagacaaagtctactctaaacccttgaatgtcattacgcgaagaaaagatgggtccttgacaaaaaatacgtagaatagaagtaactcgaacaccacaaaagaggaatctaacgtgttacacagaaactcgaaacagaaattcccagaaaactcaaacatcaaacccagaaaaagcagatgaacagtaaagcatgcgatgtacacaaacaataaactaaagtacaagatgcgaagaacttacataaagcttgagaactgggcgttggtgttgatcgacggta

SEQ ID NO: 336127 - DNA, 681 bp, Cannabis indica
gggggaaggactgaatatgtaaaaaaaacaatgattatagtgataacgaaggagataataagtgatttaatcagcccgaggtggaagacgaggatccctgcactgctatagcactgcatctagccttttcttcttctcccagaagtgaacaagaacctcttcaggcttgggataaaagccgaggttaatattctagccattagtttgctaggccataaagactccatcatcaaagcgcttcttgcagtgttggcaagtgactggggccaggagggcatctctctttgccttggccacctctttctgagcctgctccttatattaacgaagccccttcactttaatagttaggttggctgtcgtttgcaaatcagcttgatgcagctcttccagagacttcagcttggcggtcagttcctgcactgcctccttagaatcctgaagctcctgccttgcagtggccacagccgcatccctggccttttagtgcctcatccttcgcctttagctcctcgaccttcgccttcttgatggttccgctttgtaagggcctctttctgtcgggtttcctctcagatagctcttttttgtgcctccaagtcccggagactcttcatggcctcctccatgcccccaaactcggacatggtgtacccatggtcgataagagtcttcgaaaga

SEQ ID NO: 336128 - DNA, 449 bp, Cannabis indica
atgcattactcatctagggatactgaattctttactgtttattaagtgcatctaaaaaaatagaagacaatgtctctaattttatccaaaatggaagagagataaaacagttaagaactttcttcagttgaataactttcagtgcctatgaaagcaacttagttatgtatcttcactgatggagcttaaattattatagatgggtttctacatccttctagaataattccttcacccccagagttaaccaccatctcgaattggttttgagtaggtgtagatataaggactctaatatacaccccttgttgagttttgtgccctaaataaaatccatttcaatataatcagatttactaattataaagatcaaaaatagcatttaatgttgcatggttcaaatgatttatttcatgattataaattctattaggtccaaaacatatgta

SEQ ID NO: 336129 - DNA, 1023 bp, Cannabis indica
ggttcatcataagaaattttaaaaaaaaatattgggaaattcttggtaccttcctcctcggccttgaatttattttcaaggtgatctcgaattttttaggcgtctttagtgtcggtgtataggtcataaagcctatccaaaagtgagttgaggatgtgccctttacatagaagtttgtcatcttctctcttcttcctttgtgccttgacctcataagtatccttgtctgtaggcacgggtaactgctccaaggtggacttaagagtataagcaatcttaagggtggttaggaggaacctcaccctgcaagaattttcattccccattagtaaagtaccaacattcactttcctataatcaataaattttcaagagtaggacacatatggtatatgcatccagaatcaagaatccattcattagtgattctttgatttgaaatatgtacaagtcaccatcagaggaataatctgagtcttctacatttgaagtagaatcatgcttattttctctgtcttctttgagtttattcttaaacttaatgcaaaacctcttgatgtggcctactttcccacagaaataacatttctgtccttgtgatattttcccctggactttgatcttcactgagatttgtgttggcctttgaaatgatctttcttgtggtgatctctaccattgtggttgtctcttcctctggccaggtatgcttcatccttgtcattgtctttttctttggaaatttcttgttctttggatttcaaggctctaagaacatcatcaagggtgtgagtatctcttccatatttgatcacaaccttcaattcctggtatgcagctgacaatgatttgagaagaatgatagcttggctttcttcatcaacattgtacttcaagttagctaatcctataatgatttgattaaaagcatcaagattaccatctagagacaaataagaagacatttaaaaccatataaagactctaacagattgatcttattagttagagagggtttcatgt

SEQ ID NO: 336130 - DNA, 579 bp, Cannabis indica
atacccggtgatcgaaaaactagttttttttcctcctaatggcctcaagaaagctaagatcctactttcaggctcactcaatcaaagtattaaccaaccatctgctccgacaagtcctacaaaagtcggatgtgtccgagagacttctcgaatggctatggaattaagccaatttgatctacattacataccacacacctccataaaaggacaagtgttagcagacttcataacggagtgccatgaggcggaggctaacgcaagcgtgcctacacctcaaatcccagcatggaaagtctttgtggatggtgcctctaacgaaaattgatccggagcaagggtagcaatgtgatatccccaaatggacttcgactccagggagccctacggttcgaattcatagcttccaacaatgaggccgaatacgaagcattgattgcagggctgagattagcaaaagctgtgggggccagaagagtagaagtcttcagtaattcgcaacttgtaataaaccaagtattaggagaatatcaaacacgtggagaaaaaatggccgcgtacgtagcaatagttcgagaa

SEQ ID NO: 336131 - DNA, 732 bp, Cannabis indica
taatcattgagctaattcatattccttttgcagtacctatgttagcttctaggttgatagctaaattttgaatataacaatagcccttaaatagtgctttttaattaaaagactttttaagtgtcttcaagggttacaattgtatttttctcgtttaaaattttcatgcttagaattagtggttcaaaactttgaggcacatcattcccatttaatgctctgaatattcttttcttataaagttcccatctgttagattatatttcttttgatcgaacggtggccactttttaggtataaatttgaagttgtgtactatttttgccattttcagcccttaaaccttcaagcttcgacaaaatctcaaccaccctagctttcgaatttgcatgccctctttgtctcttagattctttctgcgagtttcttctaattgcattactcttcctaaaaatcatcaagactcagctctttgatttttggaatttcaatcgcgaagttctcccctgcccgaaatttctcatcaaaatagtaagtgatactcctttttgttgatttttcctctatgctttcaatttcaatttttggtaagtgtttttcttctctacattatttgtctacttgggtattttagttttgagtgtttgaataactctagggctagacaatttaaggttatacgactcgtagatttttgggttttatttgtgctctatttttctaggaattggg

SEQ ID NO: 336132 - DNA, 805 bp, Cannabis indica
tccaatgcgcactaaaaaattatattgagttataggtaagatagtataaaaataattccaaattataatataaataaacaataagcactaaaaaattaaattgtctttacccgattccatggagtaaagaacatttagtgcttgttattcatcaatgataaccaagtagccaattgtcttgccgcgttgtcaaaagactgactcttctcttcatcgttgataccatttattgcgagaagctctgggtcgtaaaacgtgaagatttttctcaaatcgtttatgcgctcctagatgtgcctacataaaattgataagtattagtgtcttataataatttcactagaatttgagatatacggttaattagattaaagaagagtatacatcattccaaacaacattccctggttgccgatgatgtcacacaatgcaaccgactgcaaatcctctctaaataacgtgatctggatacgcggtgttatgaatcccttaggtacagaaattgtgattatatcacatttatctttgagtttcggaaattcaagaaccatccattttagcgattcagggatcaactccatgacctttcgcaagaatataattcatcttcttcatcatgaccgccttgtggagaaagcatgggagctttccccttcgacacatcacgtcttgaaggcggttgagcgagtggagcctacacaaaatgcaccataatatctcacatttaatccaaagtctaccgaaattttagcagcataacggctgtaattgaatgcccccaaaaattttaaacatgcatgtataa

SEQ ID NO: 336133 - DNA, 738 bp, Cannabis indica
gaaatagggaataaaattccaaaactaataattgaaactaaattgtttgataactaaaacaattaattcaaaaattaaagaagaaaaatgagctttatcttcaacttggacaatctccacccttctgtccaactttcgactcaactctctaggataacaatccaagtttaagcagctagagctgaaataagaagaacataaacatggttagcataactagaattaataacataaggggttaataattctctaaaacacatgagttcataagaaagtcagaaataccttgtttctttgccaaaaccttaggccactggggtttccagtgaccctttttcctgcaatagaagcactttcctttattcttttctttttgattagcagccttcttacccttattagctgtgttaatagctttaagaagcttctgactattcttcttctttttctttgcgggtttcaaagtaaaggcaatgtttgtctcaggctttgccataccaaccatagcattactagaacttggatctttgttttctcctttttgcggtcctccaatcagattttcaaatgtctgaaggttattgatcaactcatgaaagtcaaaagtcaacttgttcatgatataatttgtagtaaatggtagaaaagctggagttaaactatttaagatcaaactcactttagtttcttaatctataatagctccatgattctcagcttcctggaaataactagcca

SEQ ID NO: 336134 - DNA, 686 bp, Cannabis indica
tgacatgtaccaaatcacgcctcatgaattttttcagcagttaaaaattttctttgaactattgagattgttgaatttaaagatttttgtctaatttcattcaattttaccaatgcgatgattgtttatgtactaaactataggggtgttcatcaaaccgctcacaccacacaaaccgctcgcaccacactacaccgtataaaaatacagtttgaaatcttttgcgatgcggttacggtttgttttatttctatactgcgtggatctgtgtgatttgtggttttgaatttaatatataattgcggttcaaactgcaccgaactatatattataaagttaccaatttttacaacatgatttttatttttattttcatataagaacaaatatttgtaatatatgtatatattatattatttttttagagacaattcaatataatgacttgatgattagtatttatgttatgatgttaaaatttaatttgattttttttttgtattgttaagactttatagattaattttaaatttttattataatgttcgataatgatgatagtataaatcgctcaaaccgcatcacaccacaccatatttctgcagtctggttttacagttttaagatctcgcggtgcagttgcagtactttgagaaattacaaaaactgcatatgcagtttggttt

SEQ ID NO: 336135 - DNA, 526 bp, Cannabis indica
gactgtaacaatcataacattaacaatatacggttcttaatagttttcttaccttagtctagacattaagcgtgcatgccagcctaagtggaaaaacaaagcttgacgatccttggtccgatgtcacgacaacaacaacccaatgaatactttaatttgatattctgggaactaaccctaattcctgtaaccagacaaaacctaacttcctttagctctataataggccactcaacacttaaatatccttaaatagatactaagtaccaccccgagccaaaaccaattttgaaagaaatcatgaaattttcccctgtagtacaaccagtcgaccagttctgttacaccagctagaaccaaccggtcgaccggttccgttacaccagaacaaaccggtcgaccggttctggcagaccaaacttcaagagtttttcttccccaactcaaacgaaaaccaaaccaaacctatccactgcgatgagacaggggagaggaagtatttaggtcctgagtcagtacagcggac

SEQ ID NO: 336136 - DNA, 621 bp, Cannabis indica
agtgaagtatttcagttttgtttgatgttattttgataaacattcaacatctcacaacaagaaccttgtagctgcccgcaatgtaattaaggatcttgtagctgctcatcgtataaagattttgcattgtctcgtattacacaacagtgatgaatcatctcatataatacaacaatgatgaatcacttcgtaataaatagtagtgatgaatcacctcataatgtacaacagtgataaattacctcctaatacacatcagtgataaaatattctaacatatttttatcccattttttatttttctcgagtataaaaagtgggataaaatgtctcattttttgtaatttggagaccaaatttttgatggtagaggtacgttgccattaaaagtgagaactgtagaaggtgtgagacaagatcaggagaagatattttgtaaattgttaatagttatcagtataaaagtttatatacaggtgtaaatgtattttgataataaaagttagctatttatatattttttatgtaaaaatttcaaaaatatatgcaatattttgttgagatattttccttaataggctttttagatccaaaatttacatttttatcttagtatgaaaa

SEQ ID NO: 336137 - DNA, 720 bp, Cannabis indica
gaagggtattagagatgtaattaacatttatctaaggaaatagctaagagtgattagtcatgcttcttcatgaaacttattttggggagaaacacttaagactgcaacgtaaatcctaaactgtgtatcaagtaaagtataagttaaaactctttataaactaaagttgtggttggactaatagtctaacatatagatatattctatttgtggatgtccgattataagataaggtcttataagcctcatataaggaatatggactccaaaacagtaaggaactatactttactatatactccagtaattaaagagctacaaattttgtgatcccacactatggttcaattttagaaagagaaacttttataattttgaggatgtcgagtttggagaagaaataaaattattttatattgttcttgaggaggaattgacgttaaacttaattccaactatcactttcgacaatatttagatttccatgattttattgatcaataagtgaatcaagaaccttgataagacaatatcaaacaacttctcattcaagatatggtaaatgctccaataatcaaactcaacaacctcaaagatcagtgtcattaaagaaatctatgagagaaacgacataaggaaataatggaatgatagacgatgatctaatcaacttttatcatgccatgaaggttcttactctaaaaactgttgggttttatg

SEQ ID NO: 336138 - DNA, 641 bp, Cannabis indica
taatactagactatgttgttgacttagtctagaaaggaacttacggtttcagacaaataatatgtcataacaagatattcctcaaaaacaatagtaagaggttaaatgtacttctatgtatgaatttaaccagactcctattgttgagtgggagccatctgagatgtaatcaaacaaggaacataaggagatagtcaagaaagatttatgaaagtgacctatatgttagataataaggatgtatatattataagtccttatatttacaccaactcataaagaatccaagatggtggttactctaggggtggagttattctagaagagttcatcagtgaagatatataactttgtaaattcgaaattaccagaaaattattcaactgaagaaaattctacactgtgttatctctatttcatgctttaaaagaatgagagatatgtcttctgtttattcagatgcactttaataagcagtaaggaaattattatcccttgatgagtaatgtatatagaaaataatgttacataatgttttatgaacatagttccagaaattagggttgagtcaaatatactacacttgatctgaagatcaagacagattgattgaaatgcacaacttgttttatgttagtgca

SEQ ID NO: 336139 - DNA, 351 bp, Cannabis indica
agggcacaaaacccaacaggtattaactggctctagttagtgtctgtttgagcgaccctttgttcttggatagccttgacgtatttttgtaagtgcatgttgttttttctgatgaggaattcaacttctcgcttcaaattgttttactcatttatgtcatggtcgtagtctacatgaaaatgacagaacttggttgtgtcccatttgcacatgtccttttcatgggacagtgtttcttatatggtaccatagactgggtagttgcataaattgtttctatgtcttctattaggactgaaaaagcagtgaattttgtggcattctcccaaggatctctagcccttgattcct

SEQ ID NO: 336140 - DNA, 761 bp, Cannabis indica
tcgggtactgtcccgatcgcggctccaccgatgagcggcatacaattctctgcccctcccggatatagtgagggccaagccttggcgcccgcatcatctcattttagaaatccctcggggataaatggataagctccctcacactccgccccaactgctagcctggtaggcccttcccagggttcgagaagtaaaagatcctcgaaaggcagcacccagacgcaggagaaacgtcagaaaacggggtacactccccagtacacccagtacacggagctgacgaactcccaagagtgtgtgtactttgctactaggcaaaatacgcactaccggagactgtatcctttgtacaaggatagctcccggagggacccaaacaaaagatgcggataccacaacgacatttgtcatagcaccaacgaatgcaaaaatctcaaagacgagattgagaacctgatccgattggccacctctatgagtggatccgattgggccacccagggaacaccgggggctgcagcaggagtattggctccagttgctcccgcgggcgatgcccaacacatccccggtctgccgcccagacccaacgagagggtagccatgatctccgctggtccccatattggaggaactacccgcaaggagctaaagcggtacgcaggggctgtaaagcacaatgatgtttgggaggttactcaactcccagctcagaggccacggctgatggaccaacctatcacgttgacggaagaagacgc

SEQ ID NO: 336141 - DNA, 577 bp, Cannabis indica
gggagtattcgtccatggcatagttatgcttggctatccagagctcttgcctcacctcatccccaggaactggagtcagcacaatgttgggaggagcaggatgttcttccatgggggagaccccaccgtcgagaccatgggcaggagtgtcagctctccgaggccgcttgggctcgtcctgggcaaccatcttgcccttgcgcttgcgaatcagagcaatctcaggctcttcttcaccttcttcagcttcctcaggaagagcccggagctctcccgcaccctctgcgacttcctcagaaaagccccattgcttttcttgaccttctcccggtagcacctcctcgtcatccactaaatcaatagtgtcagggggagcgctggaagagacctttagggcaggggctattggggaagaagtaaaggccggaggagcctcgggagtgtgaactccggcaagctggtccaagatggcgtccatggagatacctgtttaacaaaaataggcaagtgttagacatccgtgggaaaccacttacacaagatatggcaaataagctactcctacccggacttccta

SEQ ID NO: 336142 - DNA, 1225 bp, Cannabis indica
tgatgtttatggttttgtaatctgaattttggtatattttatagatggatttaatgcatggaatatgtattttaaactctctgtatgatgatttaaaacatatttgatggtttgtgagttttggttaagaattgggttgtttggatgtgatttaagggctgaaattcgtggtttattgctggtttttctgggttttaaacccaggtgccgcggcacgcaattttttctttttgggcagatccttatggaaacttcaaatagccataactttgtgatccggactccgttttgggagttctatatactgttggaaagctcgtttcgagttctatgtaaatatttatattttgaatgccaagtatgtattttgtaaatgtggaattagggattaacctataagtgtaaatctcggaattgtgagtaggattactggcacttggtcaggagcacccggggatttggaatctcctcttttgcgggcattaggtaagacagtagttagctcgtagagttatgtactgtggcacttatactagaaatggtatatgtgagtatttagtaactcgggattagggttactaccctaaagtgaatggttatttggtctagggttattaccctagtagtcaaaagatgttgaatgtttggccatgttaaatatgttggaataaagagttatgcgtctaaggcataattaagttagactcaaactagtaccttgagtttaattttaatgcggtctagggtcattaccctagaatgttatgaaggtacgaaagcgttaatgtatggtaatattattaatccagttaaaacatgagttagggttaatactcttagtaaattttatttgagtatatagtaatgtattatatgagtaattacttagtatgcaagttagggttattaccctaagattttatatgttatggtaaatattgaatacacgcatgtatgttaagagttatgtgtataagacataactgggttagacctggtatatatcaccaggataaaccaccgaaagaatgtaatgtatggattacgtatatatatgaataagattatgcgagcaaggcataatcaagttaggctcggtaaccaaaactgaggtaaaccctactaaagcgttattgtatatagacgtgtaagagcaacacgtaggtctatgccacatagacatatatagacgtgtgagagcaacacgtaggtctatgccacatag

SEQ ID NO: 336143 - DNA, 745 bp, Cannabis indica
taagaaaattttaccaaagttgctagagctataaaacttgttctttcattaggatgaagttggcatcagctagtgctatgatttcaaattcaaaaaaagatggttttagtattgaatttctttagattcagttaaaccaataagacataggaatctattaccaccttagttttattaagtcatatataattagaaagctagttgaactccaaacaatgatgtatatatgtacaaagtggctataagttgctgccccagtgtcatctgctaaaccagaaggattctgcatctgagtcttgctctctgactttggtactaaaagggcatttctagtttgttgtatgtgtgcatatttttttttttattttcttttatgtgatatgatgaagaattattcagtggattgtatgaataatggtaagtttcttttgctcaattattgtcattgtaggataatggctcgcttaactgtaagtgagacaaattttgagaaagaagaagatcatgactctttatatgtattggatgaatgtgttgcatgtagtgcaatggttttttaaattatgggaaaaaattattgaacatagtattgagtcaagctctttgggaagacaattatacatacttgatatttttgtcaataggcaaattgtgcaccaaatagcttatgagagtgatgtcatttgttttgatcaacttaggatgaataggaaagcatttagcactttatgcataatgcttgaaa

SEQ ID NO: 336144 - DNA, 607 bp, Cannabis indica
gtatcctttaaaatagaatcacgcctgtgggagatgtagaaatcatcatcaggttttctgacgccatcaaggagagttttgaaataattctcagccgattcttcgaacggaacatccttcttgatccggaaggcgggaatctcgtcccattcagccgacacccgcggcggatgactgggtagaggcggggagcctcagtcggaagaaaaggatgtagggagagttaaagcaggagaaagggcgagctgggaagacgccgacacgcaaaggagagaggcagaggtccgagcaggagaggaggatggaagacccggcttagctgttgggaggatctcaggctgagagaaaccttcccgaccaggatgccctaaattggaggctcccgccggggccagcccctcggaattgccttcaccttcgcccacgcccgacgagacctcgggaagagcgctaagcagggccccaatggcatcctcagtggctgagtcatgctgagacgacatgccgagatccgatggggcattttcctcaacccttactcccttacttttcttcgccctgctttttcgtttgggggacttcgacatcatcctcttctgacggccgc

SEQ ID NO: 336145 - DNA, 755 bp, Cannabis indica
actgaagcttaatgtccctttttaaaaataatatagcaaatggtttttattattttttagtacctaaaatacccttagttatataagggtattattattaacattatatctatttttcaaatagaaacagaagttctgctccaaaatttaaatgacaaagcctccctctccttattttttctggttagtttggatttcttcaaatttttttagtaaattatcgtgaattctcccaaaaggcgataaaatatttttctctcatccatttattcgattcattcgttggatccaatcattttctcctaattcctcacaatcgaaagcgacgaagctatgctcattttcttcttcttctagttttctcacatctccaaattacaataattactcccaaacaacgatcaaagtcttagtcaattttttttgtcagtggtatatacattttgtattattgtatatatattttctatactatggtatactattcagaaaataaaataaaaaaacttggattgtgtattaattttattgtagcatacatatatttgtaatcaaagaataccaatctttagttttttctttcttttttatttcattcgtcatattataatatgtatttattcaaagaaccaccatttttaaagttttttctttatttttcttgtttgatatacatcagcacgtaaaaaagatatttttatagattaaatagatatcccatagtgtaaaataaatataccacgagcttaaatttt

SEQ ID NO: 336146 - DNA, 861 bp, Cannabis indica
gctatgaagttcgccccacaaacagatagagagagggagagtttggccaagggctattcctgctacaagaagaattacgaaacggccgttgctgcgaagacggttgctcttaccaaaattagcgctttggaggtcgacgttaagattttgaagagcaaggccaacaatcttgagtcagagaagaggagctgggaccttactcggtcgacccttgagtcagaaaaggggactctaagcggcaaggtagcctccctggaaactagtctgtcagcggtgaatttggagaaggccactttgttgcaagaacgtgatgcttctcgttctgaggctgaggcagtgaaggataaactttcttccttgagtggaaagttgttcgaagtcgagaaggcgttggctgaggcccaaaaggctctggttgctgagaaggaatccttggccaaggaggttaaaatcctgatgggccaagtcaaaaaggcattccttagcgagagttatcagtcgtcctttaaactgtactctgagtttaaggagggcaagtccgatgcctggaatctggacgaattctttgcgaaatactccgagtttaagaaggatgaagatttggtggattcttcttcggagtccgatgaaggcagcaggggcgaggatgacgacggcgcctaaagagatgggcggggattttccccactcaaatttcaataatttccttactgttccctttttatgtgtgtatgacaagttttatggacaattttttatcatcattatattgttttattttttttttattatcgtttttgttcaaggacaaatttatggaacaatctttttatttatgtgtttcgtttattgtttaaaggt

SEQ ID NO: 336147 - DNA, 714 bp, Cannabis indica
attcatcaattgagactctcgtgttctttttttatcattaccactgaggtttcactccctggttcataagttactattgcttccttgcaatcatcactatcttcatacttggttaaccactttaaaacttatattacattcaattatatagtttgttgtttaataaacaacctactttgtgatccaacattcacaaaccacttgaatacatgcccattaaattgcatctcgatttataagtttttcccattctaggtgagcatacattttcatcattacttaataagacaatcttttcttgaaatttcaatggtcacctcgtataccagattaaccatctagtcaaatataaaagtattctccatcattactgtatcaccatgagtaatttaggtaatcttctttaccttagtgataccactactctccctaacattctgttattcgttactttttgtaacatcccgcttcaagcctccattaggtctttccctacgaattaatgactcttatacacaggtatgccactctggccgcttcctggattgatgactaaccgtggagttctttcgggatgggtgttgtggtattttcaacacgcaagtatacatattgttaacaagttatagactcgcaaagagtgaggtcgatcccacgaggattgtagttaagtacgttaaaattaaatccttacttctatttggctatataaaa

SEQ ID NO: 336148 - DNA, 585 bp, Cannabis indica
ctgtacgggacttccgaagttgtatgtagacttaatccgagctgtccttgagtttggatgggtgacacgtgtcaggcgcgtctgttcgcgattcgatgtgaggctgaccaggcgtctcttcagtttttggctaattaatgctctgacgcaattaatgcttcaaaacccagttttctctcaccacattttgacagttacacttgattatatttgattcctaatattcacttttggggggaaccaaggcgtctaagccgtttgaaatgattgccctttttcatttttttgcttataaatagggctatacattcttcacaaattcacttttaccaacttctccattgagtgaactcggagcaaaaaagaagttgtcgctttaagtttgtcgtgagatttccacccaatgtatccaagcagcttcgtttggaccaaactcagacgtcgaacaatgagtgatttttcaattttttcctcttttactttgcatgcttaatttctggatgtgttcttgacttcgatgtagaagataagtagaaaatctaggtttaaaactttgtgattatctttgtaatgatctgtgaagct

SEQ ID NO: 336149 - DNA, 564 bp, Cannabis indica
gaaataaggcagtaaatgatgaagttgcaaaaatgcttaagaacaataccattgaagaggtacaatatccaacttggctcgccaaccccgtggtagttcccaaaaaagaatggaaagtggagagtatgtatagatttcactgacttaaataaagcttgtccaaaggacagtttcccgctaccacacattgatatgataattgacgccaccgcgggacacgaactaatgagcttcatggacgccttctcagggtataatcaaataatgatgcaccctcccgaccgagataaaacatcattcatcactgagagggggacatactgctacaaagtgatgccgttcagacttaaaaacgccggggcaacgtaccagcgaatggtgaacaaaatgttcgcccaacagttaggacttactatggaagcttatatcgacgacatgttagtgaaatctaaagatggcgctaatcacgtcgatcatctgcgagagtgtttccagatcctcctagcccactcgatgaaactcaacccagcaaaatgcgcttttgctgtcggatctggaaagttc

SEQ ID NO: 336150 - DNA, 1159 bp, Cannabis indica
tttttgagaaaatagaagtgaaaattgtcaaaattgggaaaataccaagtggggcccattactctatggccggccacttatgaggttttttccaattaatatttttattattttaatgcctagtaattcctaacctaaacctagtggttacctataaatagatagtgatggctcatacttaaagtggatgaaaaccagaaatttttgcctttagaaaaattgagcctcctatcctattgtctatagccgaacctctctctccctcttttcttcttcaatttttcgaaaccttaagtgatagagtgagtgcccacattagaaattcatattaggatgttgatgaaacatacttgttagtaaatctagatcctggtaaaacatattccaacaggtggagtccaggtctccctcaagatcggcgtaggattgggcaagagagaagcatgtaactctacaaaagaagtacaaatatggtcaatacatttcaacacattaggaggagaattattgtgtaccctttcattgcacgtcctccatatagtgtcaacaacaatcgaagcataaagaaagacgtcctcaactcggatccccctatttctaagttcccaaataaatttcacccagtcccaaacacagataccagtatcacaaacagggtagattccccaaggtgaagatcgccacaagtgtaacgtcacatcacaagaaagaaataaatgttcaatagattcatccctcaacccacacactggacaacttgtatcctcaatctgaaatcgtcttccaatctcagatctaacagggaacgcattagataggatgaaccaccaaagaatcttatgacggtccaaaatttttctattccaaaacttattccaaagcaacagatagtgccagccctatgtaaatttgggctttaggcaaaaataaaaattggggcctagtgaaaaagtgaggcaattaggatttgaactctcaacatcttagttgttaaactaatcaaattaccactgggatacaacgcatatttagcattaaaattattatttattttatgagggaaacaaagtgatcaaagatgtgtgtatttcctcaagccaacactttctatttatagaaaaccacatagggttaaggttgaattacttagcatttaaaa

SEQ ID NO: 336151 - DNA, 563 bp, Cannabis indica
catggctgaaaacccaaaaaacattaatacactacatgaagaaactcatcatcatccaggaaaagagcccatgggctccagaaggccttccaacccatagtctaaatggaccaccacattcgttcgatgagaacccaacctgacgttgctgccactacacgaacgacacgttcgaggagaactcaacatgggaatggccaaaatcctagaatgagggatgaaggacccaatcgttgaggttctcagcctatggcagatgttgggatttgtaccttaaataaaattctattttaatgtaatcttttcaattcaattatcaataaagaaacagatttaatttcattatttgtttaatgtgttatttggttcatgtgatcatttatttatttatttgatttataaattcgtccaaatccttatcacactgatattcttgtttattatgttgtcaacacagtggaaagtaatcaagattgtgtgattaaatgtattcctagatttatcactactcagggtttaactgatacgataatctacaacgtagtttacttgcaccatggata

SEQ ID NO: 336152 - DNA, 529 bp, Cannabis indica
acaaaaaaaaaaaaatacaacttcacaaatttttaaatattttgacgatttatgtgattttatttacagaaaatacgattttttttatatattgtactcttgttaatacgaaaacagaactggttatatttcaattataaccgatttgagttattttatgttatttgtttttattcattatgttataaaaccaagggcggagccacacccacggcaagggtggctatggccccccaacatttatgtatctccatatatatacatgttgcccctgattttttccaatatacgtagaccaaccgaataaggacacgtggatcaagcaatgtacaatccaaaatatttgctaagtctttatgctgaaaggtaacttccaggacatagctcccggagaaggcatatggaaccccatatgctcccggaagctcgaagtaacgttaaggcatctccgtgacctgtcaggtttctcctgagcaatcaagtcgcatttaatgccgcatagtaggaagcgtgttgggactgctacacg

SEQ ID NO: 336153 - DNA, 1222 bp, Cannabis indica
cgccgctaataagtggccgctataaataccattagcggcggaattggttcccgccgctaataataccattagcggtagagcattagcggtgggaccccgccgctaatgctctttgtcagttttgtgtttcgagatagaaaagagcattagtagcggggtcccgccgctaatgctaaattaaaaaaaaaaaaaattgtaaataacgttatttaaatatataaataattaattaattataaatatataataaatcaaattacaattaatataatttaaatccaataaaatttattaataattttaaattgtctcaaaataagttactttagcattaattctatcacaatattgtctcaaaattaaactaaattattaaaaaccataaacaaattattccataacatcttcattaaggtctcgaattataaagtcttgatccggattattatcattacgagttcccgaagcccgtggcggagaaagtacatatgcttgatctgatgataaatccagtgttagattccccaactcagctttgttaaaaataagagttgaataaaattgttgctcctgcgatgaactcccaaataatccaaaatcagcaaaatttgagccgagcggaggacactctgatggtgttctatataagaactgatttcccaatggcggaccagactgttgttgctgttgaggaaaagattggagttgctgctgcgaaattttttggaattgctgttgcgaagaaggctgaaattgtgattgcaaaggaggaggttgttgttgatgttgtggaggagcggcataactctaagaagacgaaccaccaggcgactacgattgactatacgtttgaataaagttctcaaatcgtgggttatataaatgagcacgttgttcaggcgtcaaattacccccatgtggcacgcatagttgagaatatttctgccatagtactcatcatttcagcagttggcggaggaggcaccgttgactgactttgagtaaatgacttctttcctttgcctttgagctttttacccacgcctctttgatagtcagatctttcgcttagggctgtttccagaacgtcgtactgataacgagcatcagattcagtaccatatgtatcgctttcggattgtcgttcaagtgttttcctatcaagctccttcaccagttcctcctatttaaataaaaattattagaatatataattaatata

SEQ ID NO: 336154 - DNA, 431 bp, Cannabis indica
atgtccttctcttgaatttggatccttcacagtcttccaaactatgattgaggtactgtttgatgtgtgtgggcactactctcttcactaaggtatttcgaaattgtgattctattgaaaaagaagaggagggttggctatataaaaaaaaaagggaaggctcaattttctgaaagaggcagtttcctcaattattgaataattgcttaactgtctgatttggtgtgagccatcactttctatttatagacaactgttaggtttaggttagtaagtaattcgcattaaaataatgaaaataataattggaaaatgcatgcacaagtggtccgccatgggtgttaatgggcctcacttggatttcgcagttttcacaatttatttctattttctcaaaattgccaattttcaattctaaacatttaaatgcc

SEQ ID NO: 336155 - DNA, 671 bp, Cannabis indica
gattacatagaaatagagttttatttagggcacaaaaacccaaaaaactcccacttgcactaacctaaaacaatcagtacatttcaattaatcctagattctctctatgcctttcaaatgtagagactgtcaaaatcttggtgaatggataagctaaattatcttcagtatcaactttttccactagtatgtcccctcttgccacatattctctgttgatgtcgtacttcctctcaatatgttcgcttctattgcggcttgtggctctttactgttggctatagcacgaatgttgtcacgaagtaaaaccagtggtttttccattctaggaacaataccaagttctatgaagaactttcttagccaaaccagttccttagcagcctcagcgacaactatgtattcgaccttcatggaagagtttgatattgctgatttcttgacacttctccaaacaactaatccaccgccaaagtaaataccatcccagatgtagacttcttgtcatcaagacaagcttgtactctaagtcggcatagcctacgggatttaaagcaccacccttgtagactaacacataatgccttgtactttttaaatattttagaatatgcttaactgcagtccaatgttcctttcctgggttcatctgatacctgctcataattcct

SEQ ID NO: 336156 - DNA, 777 bp, Cannabis indica
atgggtgaagcatcctatgtcataagcattaagattcatagagatagataccgaggtatcttaggtttatctcaagaagcctacatcaatagagttttagaaagatttcaaatgaaagattgttcaccgagtgttgctccaattgtgaagggtgataaattgaatttgagccagtgttcaaataataattttgaaagagaataaatgaagaacattccttatgcttctgctttcggaagcttaatgtatgctcaggtgtgcacaagacccgacattgcttattaggaagattttagagtaaccccgtgatagaccacttgaaagttgcaaagaaggtaatgaggtatattcagggtactaaggattacaaactgatgttcaaatgaactgacaatctagaagtatttggctactcagattcagatttcgctggttgtactgattcaagtaaaatcaacatctggttacatgttcatgcttgctggtggagttgtgtcctgaaggagtaacaaataaactttaactgttacttctactatggaggccgacttcgtttcttgttttgaggctacatcacatggtgtatggctaaagagttttatttcaagccttagagttgttgattccatagtaaggtcgttaaaaaatttctatgacaattcagttgctgttttcatggctaagaacaacaaaagtggaagtcaaagcaatcacatcgacattaagtacttagctattagagaacatgttaaaaaaaataaagtgatcattcaacac

SEQ ID NO: 336157 - DNA, 926 bp, Cannabis indica
ataacctgaagcaggaaattgaaaaaataaggaaaaacaacccacacttacaaaagtatgtcaagaccgatcagactcagaggaacgacaataaccaagacttgctagctccaccagtagacggacgtctacaagtcattatttggggcccgcacatagttggagatttgggcgaagctcaggagaagtatgcccgaacggcgcagcacgagaaagaagaagttatcatggccgtagaagaaaggaagcctgaaatccacgaggaggaggggcctaccataaccttcagcgacgaagatgctgtcaaaatcagatttccacacaacgacccgttggtcgtagaggtccagatagctaataagatggtggccagaaccatgattgataacagagcctcttccaatatcttgttcaaaattgcttatgaaaagatgggactccagctcaaggatctagccccgtgtctcctgcctgcctatggtttctcaggccaaggagtggcacctttaggagaaattcgtctacccctcactgttggaaaagcttcgacgagcatgactatcatggcgcaattcttggtgttagatgttccttcagcctttaacataatgctaggtcgactagccttgtatgacttaaaggctctcacatcgatattccattcgtgcttgaagtttccaacaaaaaatggggtaggatgtctaagaggaaaccagcagactgttcgggaatgttataaccttgcagtggccaaggctaagaaggaagtatcctccagctagagcacagacaaggggaaaaacatttccaagtagggaacttcccaaggcagggatgaagatgtggatcctcaacttggggacccaagcagcaatgttggacctgtggaagagttagaagagatcgaaattgatccagatatcccg

SEQ ID NO: 336158 - DNA, 1004 bp, Cannabis indica
attgtgcactattgagcaccataatcttgtcactacaaacaaaatttacaaattttacttttagtcacataaaaataaaaacgttgtaattaattataaattatcatttttatgttgtaattaaaaatccatcattaaaaatttaatcacaaaaattataatttactttgactaaatatacttttagtcacaatatttattgtgactaaaagtaaattagagatctaaaaattatattttagtcacagcactattgatctaaaaagttcgtcattaaaattttaatcacaaaaattataatttgctgtagactaaatatgtttttagtcacacagtacttattgtgtaactaaagtaaattagtgatttaaaattatattttagtcataagtaattttttgttgtgactaaaagtcacatgtagtcacaaaaaattatgttatgactaaaatttatcactaaaaggtagctgtcttttgtacgtagtgggcattttcttagaattcgttaacaatatatattctcaaaaaattgtttttttaaattatataaaacttaatactatatcaataatagtatgatgactatcaagaagttgctagacatttgatactttttagcgtattctcttactaatataactatcctaactcttctacatatagaatattgttattggatattattggtgtttattatacatgtcacttttaaattagttagcgatagtctctaaacattattatattaattaaattatataaaatctgatacttaattgtactaatatagtgatattagcataagagggtattatgcagtactactagcgtcttttagtatttttcgtacttttaataagaacattgttattgaatactaatgacatttaacatcttactactttttagacgtgtcttcttataatttaatagcgatattttttaaaaattattatattaaattacatcaaatttgatatttaattatagagaaatgttaaa

SEQ ID NO: 336159 - DNA, 675 bp, Cannabis indica
ccaagttccgtttggttttgggataaggacggggttggatatccatgaggggtagaatgccttgcatataaagtcgttaactaacaacttatccactttctgcttgagtgccccttgtctctcagaatccaagggtcgtcgcttttgtctcttggctgggtaatttgggtcgatattcaagttgtgacagataatcttagggtcaatccctatcaaatttgagtggctccaggtgaactgatcctggttttccctcaagaaacttattagttgctattttagtttttcatctaggcttttcccaatgaatacacactttgttggatttcctagatctagaataacttattccaattcgttgattagtttcaattggttccgttcatcttgaatccaaggatcaagattctcatcctgcttttcgccttctttagtcgtgactgccattagttgatgaccagattttctattctgtagctctatgcggtagcatgcatgagccaaaagttggtcacctcgcaccactcctacacctgtcggtgtctgaaacttcagggataggtgcttaattgaactaattgcccctagttcaattaacgctagtcgacctagcagtatgttgtaggttgatggtaggtcaacaactagaaagtcttgcattatggtggtggataa

SEQ ID NO: 336160 - DNA, 677 bp, Cannabis indica
aaatattaaatatataatataacgcatatttaacattaattacattgcacatgcagtggtgggttttaaattttagatttggcattacattaaataataatatatatgggaatttcgaaaattgtttaatatttaaacatgcataggaaaatgtagaaattattatggtgaacttttttcgataatataacaaagagtaagattcttgtaaatagtaaatatataatttaatacatatttgatattaattacattgcacatgtggtgggttttaaatttcagatttggcattacattaaataataatatatatgagaatttcgaaaattgtttaatatttaaacatgcatagaaaaagggagaaattattatggtgaacttttttcgataatataacaaggagtaagattcttgtaaatagtaaatatataattgtttgtcattttcaaataggagtcgaaattaatgcaaaatagtaatacaagtagattatgaaattatataaaggatggaagaaatagtaccattaccacctccacttctagtatcgcaaaagcttctattgatttatggttatttagattttggtacagagtatgatgatagagatggtgaacatggcgtggagaagaactcttgatgatactcttggattactactttactataaagatatt

SEQ ID NO: 336161 - DNA, 585 bp, Cannabis indica
aaaaaaaaactttttaaaagtaaaagtaattttttttattttcaaaacttttaaaattttaattctcaattaaaataattttatagaacttgttttaaaatttaacaattaataaaagagaattgctaaaaaaaatattactggtgtctagcatccttgtttgtgtcatattattattggtgtaattaagtagcgaaaacccatataacttaagaaaataagttttaaaatatattactaactaatcttaaaataacacttataaaaaataataagcatcactagtacccaataacaatattcataataaaaatcgtgaaaacaagaactaaagcttcaaatctttaaattatctaatttttgcatgttcccaattaatagaatacactaatcagccggacagttcataaaaaacaaaataataaataaaaatgagttgagaaattactagtacgagataacattatttgtatttttattttctaaaatgattaaaaatttatatttttataaattataactttttttacatttttacgtaattttaattttttttttttttttttttggtttattttctacttt

SEQ ID NO: 336162 - DNA, 932 bp, Cannabis indica
ttttttttttttaaattgggcggattgcacttaaattttagtaacccgaactttaaattggattagaaatatataggataaaccgctcaaatctgtagagccctaataaatattattgtaattcaattacttttttatttgtatatacatgattaaatccctattactatgattattattattattattttaaaaacaatattctatttcaaataaaaatgattgtgaccgtatgtaatgtttactacctaattgggtgggcatcgtatgtaatatttactacctaattgggtgggcatatctcaaatctcaatacatatatatggtcaattattatatgttgtggtcaaagaagtaacaaaaaaaaaaaatgcacgtgtgtacttgtgtggcattattataaggcttactgagctaagcaagaggcggctgagctgagctgggccggactggactggactggtccacaatccattccatcccaaagccaccaagcaaaggagcatctgcgttttaacaattaatttggtattttattaattaagaacgacaaacaaacaattaacaaatgccgccgctattaaatagaaagaaaaacaatatattaaaacagtttacaagatcaaaattgggaaatagttggcggaagattgaaattttcagaagaaagtcaaacctgagtattttgaccataaagtagttgtttgctatttgtattgtattattattacatcagagatccacttcccgccgacggttaaggacaaaaaacgacaataaatatcaacactttcttattcaaatcaacttaatctctcattttacttctatataacatcaaaactgtcttctctctaattcactccatttcaattcctttaataattaacccagaaataaaacaccacataataacaaatatggaagcttat

SEQ ID NO: 336163 - DNA, 558 bp, Cannabis indica
ttttatgaacttgtatctgtcctcaagaagggggacaaatttaaagacagattttatggccttcgggcccaccctttggacgagggcccagtccctttcaaccatcaaaagcacgtgaaggagtatcgccaccgcttcttcttctcctctaacgtccaagccatggaccgcccagagcttcttacagagtgggttaggatcccaccttacatgtagaccgcacctactcgagtattcctccagcgtgccaagactttctccacttatgacaagaaggccctcaacgttggggacttggtcacgacggagaactgtcggaaggccaagctgaaattcgaaaatcagtcgatggatgacttcaatctttccaagatcatctgcccgaatgtaaggactccggctgcgggaagggcgcttcagatggacataatcgcctcggcggaggactagtaccagaagtacctctttaggagggaacaggagctggcctacatcaaggcccaggctgcagctgggaggactcttcgtctggaagctcctccagagcggaggccctcc

SEQ ID NO: 336164 - DNA, 915 bp, Cannabis indica
gattttaacaaaattaatataaatataccataatctttatgtaatttgctttaatttaaaaaaaatatatatatgaaaaaaattattaatttttttatgtgacaaaagacaatataaataaataatagtataaaatagtcatttttctataaattttaaaataaagacatttacttacatatgctatgatttgcgatcatttgttataatttacttaaatggataattatataaggcactattttcaataaaaaaaaattatatttttacgtttaaagaattttttgtttttacaattttactgtttttcatagaaataacacaaaaataataaaaaaactacataaaagtaacatgaaaataacatctaaataacatcaaaatatcaacaaaaaataacaaaaaatcaacaacaaattaacaagaatacaacataaaaagaaccgtattttctgtaaatgaaataaaaaaaatcgtaaaaatatttaaaattccataaaaccgtatttttataatttttctgttgcttttatgtatttgtgaaataatccctttcttaaattaaaatataattaaaatcatgtagatattacacaatataagagaaaattataagactttacttttttatggcataaataaataaggaattattacatagaaaatataaattgacattttatttacaaaaatacctccctaaggcaaagacaacatttataccttttatgtgattttaattactaaaataccacttacactatcatcacttacacaatcagacgatggttgcagggtggttgctacgtggttgcacggtggttgcatcagacgactcagacgatggttgcagggtggttgctaggtggttggccgaaggttgcatcagatgaaggtttcaatcagatgaaagtt

SEQ ID NO: 336165 - DNA, 849 bp, Cannabis indica
tcaccacaccacaacccgtaatcgaaagatctagagaaggcagctgtcccaacgacggcaagaagctgcaattatagcaatatgaaatcttcaaccttactaaattagacaagcagcgatgatcccccatccaatttggaaaattgttgcctttgtagttacaaatgctaagttccttcaggtttggatggggttggagggcattgagtagctctctttctttgtgcaactcatcaacttcacgttcatgttgatgaccatattcccattccaaagataggtgactaagagacttcttactctttaataatggtgctgcagcatctgaaacttcctcaagcctaccaacattatttagtccttcaatccgaaggctgccgtgtagatcttgaaactctttcaacaattcaataccaccacaatctctatttcttcccacaacaaatctatttagtgtttgcagattttgtagcttccccaattgcaatggcatctcttctaatgaatccacaggaacactaagatgtcgcaacttgattaaatttcctatatcagctggtagtctgataaccatttcacattgcttcaacaatagggtctccaaattatacaacttacaaattgtattaggtatctctttaatcttacgaaaatgtaacttcaaatatcttaaatacttcaaattgcctattgaatcaggaagcttggtgatattacggtcctctatggataatactctcaagccttggaatgacttgtccaagtcttcaatctttaacaaccttagttgatcactgcttgaaccttgttcccacaatagggtgcgcaagcatttggctttaaataaat

SEQ ID NO: 336166 - DNA, 979 bp, Cannabis indica
gaaatatgttataattgttttactttggtttgtggtaagattgaatgaattgcttagaacttgcatgtcttattctcttgaggcgaaaaccttgacaacatttattaggaatatgatttaggtaatttttggatagtttgaacctttcaagcctaccatacaatgaatacccgtagtgaacccttttgagcctaaacctgttttatttcttcacctgcttaaccaaaaatgtttccatgttttctatcctcattgtattttgaatgataccataagtttaggagaatgaataatggtgtgagtgaaagtgttgaagaaaagaaggaaaaaaaactgcgtgattgagaaaggtttgaaaaaaaaaagtttaacctgacatcacttgcaaattttagaatagtaatttctcatgaaaaaaaaagaaaaaaaaataagcgagagatcaaaagctaaaagtgaaaaataagtgatgtccgaaatttttttataaagtctcagttattgttagttgtgggaacacttcggaagaatttaattagtgaaaagtttgcgggttctagtgtacttatggcatttttagccaaaatgttcttcatgtaccgagtatcaaaacaattaatttctaacctgaaaagtccttttgattctgaaaaatgttgtcaatattagttgagagaggtaagcatgcaagcatattagccattggagtgtggattggttagaatgagtaaaacagttttgacattgtttcgatactgaagttaatttacatcattacattgtttttcaaatttagcatcctaattaattgttagagtttttcgaattgaaaatctagtttagttaatggaaggaaatttcacatgagtcagcggtaatataattatctgatagcttagttaatcgagttttagtgttagtcttgatcttactcgagggcgagtaagaatctagttttggggaatttgttaggctattt

SEQ ID NO: 336167 - DNA, 815 bp, Cannabis indica
cttggatagattggagtggtggttaaaaaaaaaattagtggtgtggtgttggacaaattttaaaaagagaaaagaagaggggaatttctttgtggttgtgtagtcttcaaccgaagaaaaatgcctaacattcaagagggtgacgccacatatttgttgtggctgccaagttcccacagattcctcaacaggttctcgacccgtgggaagcgccgtcagtatcgaatccagatgagccccacgaggactccgggtaaagggagtttcctaatacctaaactattttatatttttctgttatgtgtcgtttttagtttgtattgtgctaattgtgtgttgtcttttgtgttttaaaacttttatgtcatgtcatttatgtgtgtgttagtttgacagtgagagatttaagagtttttctgtggcctagtgttctgctcgatgatgatattttttgctcattccatgtatgttgctgcctaattttacatgtcgcctttgcatgttgaattgttggatatcatggatgtttttccttagtctcttctcaatggtgcatacttttattttctcaccatgctttgcatttttcatacgattgcttcttatgtaattttagcatctagaattggttagtgcatttccttgaagcggaatcctagctagatttgtcccttagacatgatttaggccatctttggacgtttgagcctttctaaccttccctataaaacaatttttttcctagtcacccaagtttgagctgtttagcctattcttgttgtgcaacccgatcatacatatcacatcaatcctaa

SEQ ID NO: 336168 - DNA, 956 bp, Cannabis indica
ctaaccgataccgaaatagggttgcacttagtgtttccgatgtacaatggcagtagtgacactatcactgtcggtgtttagggttcccgagacacatagtatgtaatcaagttaggggtagtgttccggagtcactattttcgtgacgaaatcactaatcgataccgaaatttggttccactcagtggtgtcgatgtacaatggcagtagtgaccctagacctaactttattacagactttgtgtctcggaatactattgtatttagaacatttaaactttttttttatatctatatttgtataatattgaaaaaattattataatctatattctaatgaaaaatattttaatgtaatcttaaaaacttatttaataaaaataattagttttcattattaataaatatgataatttcattaattattaaataaaattacataaaaataatgaaagataaatattaatatgaataataattatttcaataataaattttttgattacaaaaaataaacataaagacaaataaaacgtaagagatcattttagagagaaaaaaaattgtataatgtgtttattcatttgggcagacttgtttatttggacataatatttggatatttgttgctacatgtgagaagtttatgtggatatttgtttttttttatgaaaaaattatttaacttatttatattttgaatttttcaaatcaaattgaaccaaaccgcccatttggtttgttcaaattacgtcttccaagaaaaaatttaatcgaacaacctagtttgttaggtttgttcaaattacgtttttcaagggattgaaaaaactggctttatttttgggtaatatcaggccttgtttagttgtaccaggtttattaattattattttttaatttgtgataagactacacatcacaatcacatccacaagtactatatatatccctct

SEQ ID NO: 336169 - DNA, 1136 bp, Cannabis indica
ggccgaccaatcacagcattgtatgctgggtattggtcgattaatgcaaagtcagccatcgaattggctactacaggggcggttcccaaggtaatagggagcttgatcatcccttttaatgcaatgacgtcgccagtaaaaccgtatatacaagatgttacagatcgtagatccttctcatgcaaccccatctgtttgaaggcttggaagttcaaaatattcacggaacttccattttccacgagtatacggtggacgtcatctctgccaatattggaaacgatgaccattgcgtcagaatgtgggcggtggacccatctcgcatcactttccatgaacgtgatgtcgtcgcactctctcttgaacaacttctccggtcgctcgctcaggttgttcacattggtgagtggcttttctttcgcttctcgtgcataccgctcctgcgactttctggaatcacctgccatatggggtccgcctatgatggtcaggatgttgcaaggagttctcgaaccactcgcattctggttttcttctttgtcacctgctcggggatgactttcctcattccttttatatttgctgaactttcctctcatgatcagctcgtcaatctcgtcgtgcagaaaccaacactccaaagtagtgtgaccaatatctttatggtacttacagaatttttaggggtctctcttgtcgtgatttcccctgatcggggaggcttctgaaagaccccattcttctcttcgatggcgtagatatggtctcgaggtactgcgagctcggtataattcacgaagcgtggtccaccttttttttggggaggattccttctttggaggggacttggccaatttcagacttcgctgtctctgtggactgcgtcttcttgggcttcgtcctctggaattcttcactcggggactgcgggatcatgatcgcggcattggcgatttacgcttatctttgcctttctccaactatgccagagaatcctcaatcctcttatgcggttctgccatggcaaagaactcaaccaacgattctggtcttcgagcttgcagctccttctagaaatcgattcttggcaagacacctgttattaacatacatactagcgaagactcgggagcctt

SEQ ID NO: 336170 - DNA, 1008 bp, Cannabis indica
taggccttaagcgtctcgcccggttgctgctttatgttagtgagtgaggacgcctcgggttgcctatcccttgtgggaactattttttgaagtccttagacaagtgtttccaagaggtgattgaatgatgagtaaatttgttgaactagcagctccctactccaactagcgaagtggggaataaagtacagcgtagattattcgtaacattgctcgctcgcatgatagtattgaaattatttaaatgcgagactggatatgtggtcccatcatacgacgagacgtgagagttcttgaatccctaggggaatgtagtattcatgatgtctagatggaaaggatcgagctcctcatttgagtcgtatctagactactttccatgttccccaacttgatacctcctgaatttatccttcaacttatcatttcggaattggataggatcctcttacttttgaccgagctgttggcgaagatcagatttttttttgttcaagtgattatgaaggtctcgttgttgctggttatagttactaacggacctcgtcctactcatggacctcgtcctgctcatggatcttgtcctattcatggacctcgtccttgagtaactttgagttctactcgtgcctgtagtttctcgattagtattgcgatgcgtttcgtctccccctcgcgttgatcgactatgggttcttgtgcaacctgagctgacactcgcctcatcacgtcccgtccttctcccttgggtatgggtcgttgcatggcccctacaggggtttgcacgtgccccttccgtattggtgcaaaaaggatgttggcaatgtctcggtggcaacccacctgtcccaagttcagtcccgagatttcccttattttcactggggatttcctgttccctggtcacgggtcgcctcctattctcatttctgtgagaaggctccggttggtcatttggttgttcattctcagggggaccctcagtttccccaggttgttcttcctgag

SEQ ID NO: 336171 - DNA, 942 bp, Cannabis indica
cattctgtatatcgttggaaagctcgttctgagctctacatgttaatgtgtattgaaatgccaattatatgattatgtgaaagtgaattttggggattaaccctatatatgaaatctcgagaattgtgactaggattactgtcacttgttcagcacccgtggatttggaatctttacatacttgggacaccaagtaatacagtagttagcacgtagtgttaagcgcggtggcaatcatgtttgatattataattgtgatttaatgaggaaccgtgattagggttattaccctaaagttagcggttacatagtctagggttattaccctagtgattaaaaagttttgtatataatgctatgcttataatgttgaaatgtgttccaggcataattaggttagactcgataattagaactgagataaaccattctaaggccttattgtaaatagacgtgtgagcgtaacacatgggtgtatgctacatagaaataaataggcgtgtgagcgtaacatgcaaatctatgtcacaataattgcagtggcatcaataattatgtgacatttgtttattatgtatatcgatatttatactgtcttgctgggcttggctcatgggtgctctactgtgcaagaaaggataaatctgtctgtaatcagccatgagtgcgaggattggcgatggatcgtacatgttcaggaaattgtagatgaatcgggtaaggtctaccagctgctgcattttgtattcttggattttgccgtctaggttggcatgtaagagtaacttgtaatattttgtgaaaatttttatgagatctcgaaacatgtttaatattatggaatgatttgtaaagttcaaattattacaagttatatttaattacgtaagttaatcaaagtttaaatgttcctgctcttattttctagtaatcccagtttag

SEQ ID NO: 336172 - DNA, 787 bp, Cannabis indica
aactttttatgaaaacaacatcagttttttgacgaaattgtctcaaccggtctcttgacactgcaacaacatctccttaaaacaatcggtaacaatcactccacacctagaaaatttctcaaaaagatttgctcccaaactactctcctaaacacccctcaccaactgttcacgcatgggctctcgtaatcatgaattttcaaatttaaattgtttcgtacaccaaaaagtgatttgagtttacggttctaaaaaaattggacaatgatttaaggtagacaagtcaagattagccagatgagtttcattaaaaacaaaactataactattattaaaaatatgacatagttatattttcttataaatttatgggaaaatattcctaaattattaacttttaaaggaaaaaaaaaaactaaataaagagagaaacttaaaattaaaccccatcaaaatacataaattaaaggggagaaaaaaaaaaggcctatattttgtgtgctttccacttgttttattttattttgtagttttgtatactatttaacttggctatattttgacttgtcttatttgtaagtattgatgtatagttaattttgtacctttttacttactattaactttttttttgtaatcattaattactattaacttcattttctctatgtctctcttttcattttactttttcttttctcacttaaataaaaaaataaaagtagaaactaccaaaaacatttttattactaaatatatttttatttatttaataaaataaaaaaaa

SEQ ID NO: 336173 - DNA, 1675 bp, Cannabis indica
tcagggggagaccctcagtttccccaggttgttcttcctgagtgttcagaggattctcttgagtcatctcttgccttctagttcgtgaaccgtgaggtctgcctcgtggtcttctcactccaagattgggttggttttgggtgttgttttcctgtgccgccctggccgcgactgcctcctgttccaacttaacatttttttcagtttccctcctctaggtggtgcttgaggtggtgattttccaactcaacaactggcacgtatctcgtgggatcataagcaccatcattttcatattccataggttgagcatccctaacattgggttcttcattccctgcttctgggttctgacgattttcacactgagtcctccttcaacgtgtggaccgtgtattttggccaccttcatattgggtccttctggaacgagtggttcgagttgaacgtgaattgggaggcctctgtgagcccattggctcttttccaggacggtgagttgtctcttcaagatgagtatcaacattttcttcattatcagccatggatataaggttttttttttggttaggagggttttctctaagcttttttcacgaaggctgtcactaaaagcaccaaactattaatgcaaattttcgttaaagatattaaagcctatttcatgattaatttgcacagaattaatagtgaaagaagaagaaataacacagctttttttacgtagttttacagttaaaattctacatagtccacgagtctatcttgttagatttctctgatacaaaactgggattctttcgctaaaggtctttccgtccctttttcggtgtactctgcccctatttatagttacaaagggagaaagttaattacaaccagattaatattgcacaataatattcccctgaaattatgagatttgattacttcctacgtaaaataaatgcggttattatttgaaaatcacacaactgtgatttattcgcttttacttggtcaatgttgacgtagatttaggtacactgcaaaatgtatcttcgctggatcatctcgctgggttagcaacaataaccctgacagcgagctgaagctcttcccctgtctttccgtggttgattatataaatatcattgtttctgctattgaagacataacgctccatcagacaatcacagttcttggtgataaggtgaacttcagtagccaacatcattttaatgtcaacttctatctgagagagctaactcgacggagtagtagatctcattgaaagatgtctagagctaattagtgaaggtaccatgagtatgccttcccatagcgagatggatgcctcgctatttgttgttcgtaatcaaccaactattatgcttagtttgtataatgtatattgtacgctaagtgttctaacaatcaacatgtctcatctctaccttcttatacgtagcgaggttgatgcctcgcctggtattatttaggccactcttttaattgtgtcttctgatgtagaatagtttctcgtcaacgcatgaggcaataatttgtatatccttatctcgcttaagaatttacagtcagcgagtcataaatatactctatcagcatcgcatttaatgagttattctattttaatatcatttaatataattgccattatattcgttgattcgta

SEQ ID NO: 336174 - DNA, 734 bp, Cannabis indica
cacatttaatatttctagttacaattaagttgctcgttagttgaataatagttttgctactacgatattatggtatcataaaaatagggctcagaattatcaaatacgcgacctgaatagataaaacatgattgttgtagtactcgattgtattaaatatgcagaactattcgttgttttgtggtattatgttagttggcacgcaacatatataattgttgcattacagtttcatcacaattgtcttaaaattgacttcttctttcccttctggccgtcaaagttaaatttcttttaggcaaagataccttcaacttcttcttaactagaggatgaccacctgtagccacagggagaagcaaaatcggagtcatcatagtcgatgactggacgtttcccttagccttattagcaactgatttatgatccatttttaaaaccttttttggcaatagagtgttggaaatattttaccaggatctagatttactaacaagtatgtttcattagcatcctaatatgaattctaaaacaatgaaataaacacatataaagtttaggaaaccttacattgggtgcagcggaataaattgactccttctattcagatctctagcccttgattcctttctgtagcagagcatcaccaagatcaaaacctggatctctttctctccttccttgagcctgattctctttcttgttaattggattcttcacaatcttccacacta

SEQ ID NO: 336175 - DNA, 340 bp, Cannabis indica
ggccaacaaaatgatctcgaattgattgagctcagaaagaaagttgagattggtgctacaaaggatttcactgtgactccaagtggactactaagatataagggtagaatttgtgttccggcagatgatcagatcagaagggaaatccttgatgagctccatagtactccgtattccctacacccggggacaataaagatgtatcatgacaccaaggcaatctattggtggccgagaatgaagagtgatattgttgaatacgtttcaaagtgtttaacctatcagcaggttaaggctgaacatcaaaggtcggtaggtttacttcagcccttgagaatac

SEQ ID NO: 336176 - DNA, 700 bp, Cannabis indica
tgaaggttgcgcatcaatgtcctacaaaggaaaagttgggtggccatgcacatgtaggatgcaggctggccggccatacaaggtctgtagattgaggtctggctagccatgctcttgccaggatctagcaggttatgttcctgtcaggatctggcaggtcaagttcctactaggatctggcaggtcatgttcgtgtcaggatctagcaggtggaggctagactttggagatagaggccagcctttggacactttttccttacagaggtcaggctcccttggtctgaaagtctattttggccagccagcttatgctcaaactctggctggccatacaagctcatcctggctggcttataaactccccttggccagccagacatgttggtacaattgcttgatggttctcttatctctttttgtttgttgcttgacggttttgccataccttgtaaggaggctttgttctactttttgtaagattgtattctacatgtactctatcttggcttacatggacatgccacgtcaggtggacaaattttgggataacatttgcctcctaagtccctgtttaaacatctggtcggataaggactttccagcttttgtcttgcttgtagtagtctttgtcgagcaaccttgtaagtgttggctttttacatgtcatgcttttagacccttgatctgttgggttttat

SEQ ID NO: 336177 - DNA, 638 bp, Cannabis indica
cacctcaacgagtagatcacacccatgctaactatttgtcaaaatggtatacgatatcgtcgaaaagtctcgagaaagggacggagctacaaaatcgtcactgaaaaaagtagcgggttgggcaaaatggcttagtgtaggttattctccttaacgagttgggtctagtggacggtgtgatatgcatttgacgcttaattttgtgattatttatggtctctctactttgtttatacatttgataatggcgatgagatattttattttaaaaactaaccatgcaggaattttactaaaccaatgatcctttgatattagttattttcctactgagctttataaactcacctcctattttctcaggggtgttcattggatcacattcaatgtttttaggcctatccagatctaatccaatcatatattggatgttagattttaccatccgatccgatccaattaatttcgtcatccaatcgatccaacatccattggatgttggattggatcggttctatccattggatgtatttcacatttatttatttatttaatttgggtttatctaatattttagacctagtattttttggatcgaatcagatccatccaatattttagatccagtatgtattgga

SEQ ID NO: 336178 - DNA, 479 bp, Cannabis indica
gcataaaacccaacagttaggtcgagttgtccgtcggtcctcacccaacgttagctcgattccttagttttgtcgtgtggttttccgccgggggtcaaagttaggcttcctaaacagcacgagagggcagattcctctcaaaacgagtgggtatgccaacactcatactggtttgagttgaagattaggctgagggtgcccattcctagacttattaaggaatttcttatacattattcgcttgctccttcccagttactccctaatgtgtgggctattcttttgggtctgattgtatttggggataagacgggcgtttagtgggaagtgtccgatgtcatccacttctattttcttatggaaaaagagccggggcgttatcatcttcgtcctaggaaaagtcgctccttgttgactgacttagagacttcccataaagggtggaaggaaaagttctttttcgcccggggtcctattga

SEQ ID NO: 336179 - DNA, 446 bp, Cannabis indica
atgcaatagatttcaaaatgatgaaatgccatgtaactatgcagctggtgtcatgaaggacttgaacatagacacatacaaatactgtgcacactactacacatcaaaagcatggctgcaaacatatgaagaaatagtatacccagttggaaaccttagagaatgggatctaccagaattttttgaacacatcatagtgttgccttccagatttccaaagaaagaatcaaatctggaaggccaatgaaaagaaaaatgacgtcagcttgggaaataaaaaaactagacaagtgtagcaagtgtgaacaaaagggacataacaaaaaaacgtgcagaaaaattacaacatagaagtacaaacaactattcagcaactagaaaacaactacattgaaccatttagataaacatacatactatttttattggttgtttcgttattttta

SEQ ID NO: 336180 - DNA, 723 bp, Cannabis indica
ttcctggggtgatataaaatttcccagtcataatctttgactaattacagccaccgtctctacctcatatttaaatatttctgggtgaaaaagtacttgagactcttatgatcagtgttaatctcgcatgtttgaccataaaggtagtgttgccatatttttagagcaaatactacagcggcaagctctaaatcatgcgttggatagcgcttctcatactttttctgttgacttgaggcataggctatcactttgtcagcttgcatcagaacacatcccagaccctatcttgatgcatcacaataaacaacaaacttttctcgatccgatggcaaagctaacactggtgctgttatcaatcggtgtttcaactcttgaaaacttgcttcacattttgtctaaccatatgaatcgttgattcttcttagttagcccagttagtggcatagaaatattagagaatccttgacaaaacgtcgattataccctgctaaattgaggaaactttgcacttttgtcacaaattttagcctcgaccaatttttcactgattcaatctttcttgggtcaaccataattccgtcttttccaacaatatgccctagaaagacacctctgacaaccacaattcacactttttgaattttgcatacaacttatgatccttgagtcgttgtaataccattcagaaatgatgctcatgctcctcttctgactgagagt

SEQ ID NO: 336181 - DNA, 855 bp, Cannabis indica
aaattttcatctcaaagtcactagtgttagtgacatcagcctgatgtagcaagcgataggcctcccttacagtgtaaacaccatgcagatccaaagaccaataccacgtatcaatcgtagactcctgaacaatgttggtcttcaaaattaactccttatcccgatcattgaagatatcggagatcacttccaaatcccaacatctttctcctggcaccatgagattgttaaccttccactgctccataccattagcgatagtagtgacccacggatgggaagtatcttctaaccacggatcaaactgaacactaatacttgtaccaggaccaacaacccgtcgagcgcctttcttgatcagctcttgtgtttcgaagatgcttttccaaataaaactaggattcggaccaagagaagcagtcaaaaacgacccatgagagtaatatcgagccttatagacccgactaaccaaagaatgctcattcgagactaatctccaagcttgttttcctagcatagctaagttgaaatcccgcaagtgacgaaaaccaagcccaccatgatgtttatgccgacacatattcttccaactagaccaactgaccccacgtttttgattggagcccgaactccaccaatatttactcatcattccttctaacttattacaagtttccacaggcaacaagaagacagacatagcataagtagggagagcttgggcaacagttttgatcagcacctctttacctgctttagaaagcaaccgaccttcccaactcaaatcttttctgcatctatccttcaaaaaccaagtatggcattcttattacggcccataacacaggggaggcc

SEQ ID NO: 336182 - DNA, 754 bp, Cannabis indica
atttacatatatatatatttataatcatagtaccttcacatactcatcaaatacacttttctcacacactaacgtactacgtacttcatcccaattaaaaccacttaataataatagttctgccaaacaagaatatttttccttcaaagtcttaatacgtgattcaatatgaggtgatgtcttcaagttagaacctggtaatttttcctctagcatactcttcatttgttgcaaataaccatttttaaatccacaatcaggtcgccatataggatttcgcctcaactctagaaggcagtcgatcgatgcattatcttgttctagggtccaataatatttatttttagggatttttctattttatgctaaaataacctaaaataaacatttatactattccaatcaaaaataaacatttatactttttactaatttcaaaaatactatttataaagttttttattacaaaaatactgtagagatatgaatcccatgtgcaaaaggggagagtgagatacacatatagacaatataggcgagtgagactcacacgcaagtgggacgcaagtgaaggccaaagtcattggctgactcacgcataactgtagcatcagaaatgcgacagcgactatgtcgctgccacgtgacagttttgatgaagtgaccttgagcgtgttggactgcattttctcaatacaatagttatgcaaaaataactaaatagcaacacaaaaacgacttgacaacaaccaaa

SEQ ID NO: 336183 - DNA, 552 bp, Cannabis indica
caccgcccacccttcactcttgcgcttagggatagagctcaaaggcttgctcagctgtcgggtgctgcccggaatatcactttgttgacctccgaggataactttatggagtacgggctctacccaaaggattttttccctcaaccgatgaaggagaaaaagaggaaatccagtgctggccgggctgaaggagcccatcaagaggatgaactcattcaacttaagcatgaggctaagttgaagggaggtccgggggcaaaacagtatgctcatgagcctctaaatcctaaagatgaggctgaggaagagtcggtgactccgctcaaaaggaggaagaaacttcccgtagagcacatgcccgttgaacatgaaattcgaatcagggagcccagtctacctgctcggccatccactcctatactaggaaagggaaaagccatcctagcggagataagagacttgtggggtgatgatgagccttcaactcttgctcaggcaaatgcttcatgaaatactccgtcttgtttttaatcttcttgattattatgtttt

SEQ ID NO: 336184 - DNA, 978 bp, Cannabis indica
ctacctttcgaggacctcttgctgcgggagccttgagaaggtccggctaggcttgcagcaggagcggagtgagacgggacttgtccgcttattctagaggggttcccatagtgcaaagatgcgggagccaaggcctggctctgattatatcttggagtagcgaagaattttataccgctcatttgtggagtaccgaagttagggttctcaggagttggactccgggcacgtatcctgccactccggtcggatgtagcctccataggccactatttgggcttcttctaagttgatgtacttctggaccgtcttctagaaatcttggaggttcacagctccttcttgttgtaactcgttccagaatggagttcctgtacggatcccaacttgaagaagtgcaagctgttgtccgtcatcaactttcttagtcttcgaggcttcttccttgaacctctttatgaaatttttcaatgtctctgtgggtagttgcttgatgttagttagagcactgacttcgagattaatctttctcgtggcgacaaactgtctccgaaaactaacttgcaacttgttccagcagtccaaagatcctggttccaactttttgaaccattcctccgcgaacccacttaacgttagtggaaagcataagcacttggcgtcatttctgactctcatgaccgtcattactcggttgaaccgagacaaatgatcgcttgggtccgtgtccccggtgtaagttgccatttcgggcatcttaaaatttttatggagtttcgcctccaaaatgcgtctggcgcacggctcccggtcctcacagttagagtctgagtcatcccctttttgtctctgggagactcgagcaatatccttgcgcagtatggctagctcagccatgattccttcgtttgccgttcctgcggagattgccagtgcgtgtttctttttgtccaagtgatcctgcaaatcaccatgctt

SEQ ID NO: 336185 - DNA, 589 bp, Cannabis indica
agttcactgatgtccattattcagtataagtaatctcgatttgaaatttgatgttgcatgacatctaagtgaatgtgttgtatataatagcgattatatatgacaaggactgatatgtaattaagctatcgttatcaaatatgccgtttactataatgatatgattaatatcataatgatgatcaatggtagatcgaccttaatcctgagtaatcatgaactcctattcatattattaatttctttgattcacttgttaaagtttctcatggaagatgattcttaaaacttctgttttgagaatataataacgtggatgactaagaacatgatcaacaattatggaattctaactttcctaactgattgaatgatgattcttttttaaatgttagttttggaacttaaaagttgcacaaaaattttgattagatctaaattatactttcaatagtgaattaacggtactaaaggataaagaaataattagaagggtaaaacgataatttaacaaaaactaattacaaaccgaaacaaggagggctaattactagaattgattatatcaatagacattgcagtaaaacct

SEQ ID NO: 336186 - DNA, 1029 bp, Cannabis indica
tagggattgtgctgatgactcacgatgcgaaagttgaattcggtaagtgtttggccattctgtgcagattattgaatactttgctctgggcatgccagtgaggcatcctgctcggactgtgctccccgagtagatgttccaagtagattccacgtgtcaccattcatgtgatgccacgtccgagtgcaaaaattgggataacatttacccccaagtctgtacgggacttccgaagttgcgtgtagactttatccgagccgcttctacttttggatggggacacgtgtcgagtgcgactgtccgagactcgatgtgaggctgactggcggtcccttcagttttcagctaataaatgctctaacacttaatatttcgaaatccaattttctctctccacgggtgacggctgcacttgattatttttgatttcccatattctcttttaaggagggaaactgaggcgtctgaggttcctttgaggcgattacctgttttcgtgacttgcctataaataccaaacagcattggcacataaactcattttcatcacctttctttgctaagtaagcttcagagtgaaaagagagtaagtctctggtttcctttatgcttatctttgcatgtttatatgtcaaatgcatcctctactttgctgtagaaaaatgtttaggaaaccctaggccaagaaatctctgcgatccttctttatcatgtcttcgtgcgattttacagtcataacacttgtttctgaactgcataacgtgtatctttcatcttgcttattctaagcttcatgaacttttttgccctaactcgagaaaatttttgacttcttgagttttgacttttcttcaaacataatcgttctttaatttgttgagtactcttggtcggcatatttgcttgtttatcgtttgatattccgaccaaacactcatcttgtgcattgtcttttgtagatgaactcaagtgagtcttgggaaaacggacatcggatcgaccaggagctgcttcaacttctgcatgagg

SEQ ID NO: 336187 - DNA, 538 bp, Cannabis indica
ggaaaattgagcaagaggtgaagggtttggggagaactggtgcaaatcgactagccggttttgccagacctctaaaccagcaagatttctgaacacttcattttctcaattttcatccattccggtgctgtggttgggtgtttccctaatttcagagtttgagtaacttttatgcggtataacagaacctagggttatgagtttgggtttccgagaattagagttttgaccatgtaacttacccgatttcataatgtgattagggcatccatctagcgcgagactttccgttaaggtcggccagcacacttgaattctgaaagaaggtaagaactgaatataatgtgtgatatcaataactgaatgtatgtatatgttatgtgtatatgcatgcttaaaatgttagttgcactaccaacacttatacgattaaggtatagagtgtattggtatagtgattgttgtctgagagtatcgtgataccagcataagtacggagaggtactgagtatgtgtggtacatgttggaaattatttt

SEQ ID NO: 336188 - DNA, 1078 bp, Cannabis indica
aaaggaaggctatggtctcatcatccaactaatgtaactaatgcctccaaagctaaacacctatatgggacctcttccttcttctttcttcttcaattctaaacactaagcctttcttcactaaaataatttcagccattagtgattgggtaagtgcccacacacatcaagttggtcctcaatcatagtatgtaaaactatgaagaatccaatcaactagaaggagagaaagagatccaggttcagatcttgataatgctctgctacagaaaggaatcaagggctagagatctgaacggaaggagtcattatattccactgcaatcaatataagattttcttaaaccctgatgtgtttatttacattgttttagaaattcatattaggatgttaattaaacatacttgttagtaaatctaggtcctggtaaaataattccaacagccaggtagctagctttggccgaccactattgggtaggggaactggccttggccggccaaccctactttgggcagttgctcatggccggccatccctatgctgggtaaggcctagctgcatattcttccctgattagttggtgtagcctgtgtgttgacaggaggtagacttacagttgcagtacactacacttgatctggatatcaagacaatggattgattgaaatgcactacttgttttatgttagtggaagtgggagtttattgggattttatgccctaaataaaacccatttcaatataatctgatttgttatcaatagaagattagaagtcatttatgtttacatgtagttttcatgtttatggtttaatgtgtacaaaatctgttaaatccagaacatataattattcacaattatagtgtcgtcaacacagtggaaggtaattgtgattatatgcttcaaaagttaatgtcccttgattcatcagtgcactggatttacactgacatgatagtcagcaataaagtatacttacaccttggataagtattatgttctttctagaatattggccaagtatgctgtatcagatgtatggaatatacattggactgggactaatattgat

SEQ ID NO: 336189 - DNA, 514 bp, Cannabis indica
ctaacgagtaataggttactgttcttactgtcctactctctatatatatccactatttatatctatatatctatattactatatatgaaaatagacaatgccttgtttgatgaagaagatgctatatgttgatcactatttaaataataagttattttggatttgtattttgtaaaagtgtacttattaattaaattttttgttttgttaaatgacaaaataaactttataatttctaaaatggtaaaaatagaatcctgagctcaatttctaacatttatttttaatataaccaactttaagataatttctaacacgaacagataaaaaaaatataatcagttttaacatataacattattattaagttttattttgataaaaaatcagtttagggtcttatttgtataattttaaaaaatacaagattcattttatcatttaataaaataaagggtccaattaataacttttacaaaacaattaacgtctaaaataatatttaccatttttt

SEQ ID NO: 336190 - DNA, 575 bp, Cannabis indica
cccaataagagatgcgagtaccacaatgacattgggcacagcaccaacgaatgcaaaaatctcaaggacgagattgaaaacttgatccgattgggacacctctacgagtggatcaaaaaccggttgccccatctcaacccaggtcaggcggctggaactttgccgcaaggagcactagggggtgcagcaggagtattggctccagttgttccccccggagatgcccagcatattctcggcctgccacctagacccaacgggagagtggctatgatctcaggaggaccccacatcggaggaactacccgtaaggagctcaagcggtacgcagggttcaatggaacaaaacttatccctacgggaaaagtgaggctcccagtcaccttgtgtctgaatacaccccatagcaccttcaagtactgcacgtttgtggtggtggactgcccaacagcttataacgcgatcctcggccgaccggcctaggtggactttggagtagtcacgtcaatacgacacttgtgcctgaaattcccaacccaggaagctgggatagggaccgtgaggggaaaccaaag

SEQ ID NO: 336191 - DNA, 559 bp, Cannabis indica
cacaaattattttaacaataataaccatgcatgctatgctagtgtaagtaactcactaaatccgagctaagagtcaccgggttgactcagtgctataccttacaaggaactcaacgaactcgtttgagtacttattctgcacctccacattgccaaatattgccctcatgtcatgacgtgacttaactctgatggcctctccttcctcctccaccatgactcgccgaatcgactcagccactgattcactactgaaccagccatttttatcatctcggggaatttctaacccgattcccatgccatgaagcaacctcgccattaaccccacatccgagcttccaccgggaaatagaatcaacgacagtccaagcccgaggccttcgattaccgaactccaaccgcaatgagtcaagaacccacccacggaagggtgagccaagattctcagttggggagcccaaccccaccatatcataccccgatccgagacccgggtttcgaatccagatggaattatgtccaaacccaattttccttctaccaatggacgattgtt

SEQ ID NO: 336192 - DNA, 988 bp, Cannabis indica
ctcgggagagacctgacacatcccggagtgccttcaagctatgctcgcttccgggagtaccttgtactccgggtatatcctccgggacccatgcgaataacgcttcttggtgtcataaaaagacttagcagttcttcccaagtaatttgatccacgtgtcccctcttgactggtccacgtatattgggcgattttaggagcaacacttatattttgaaaatcttgatttatcttctcttctattaaaaaatgaataagttttttattgttagagatttatatatatcaagaaaataaatcaagataaattacaactcattttaaaaataatacaagaactaaaataagagattaattacataaatgttacaacacatctatacaatatgtatatattatatataagaaaggcagaagagatgaattacaacacatgttatatacaacatatataatataatattaagaaggagatatatgtatacactcactcacaatcttgagtagtgtagattagtgaggatcacggtcatgacctaaacaaggtattaattacacatttgtccaaaaattatttcccattatctctaagcactaagggactctcataaaaataactttgggaattatcaaatcttttagagtttctagcaaagtgtttttttgattaaaaaaaataacttagtcatccaaatgagcacattagactcctttatgtagtttttaggtgatcacgcttaagattcacacactacctcatttatctcgtataaagtattaatataatttataacaactatatttcattacttttgaatcttatcgtcaattttgtgtaacatctcttttattacaccaaaaaatcataatcaaccaaaagaaagttacaaaataattaatctagtaactcctctccatattacaaagtataggttacaatttaacacttaatatatagggggctaatacaataggtattgtaattttt

SEQ ID NO: 336193 - DNA, 383 bp, Cannabis indica
agcgaatgcagcttaacgcatcataaatcaccagctcaatccctactactcagggatcaacttacgtggatgtggcacacacacgataccactatcagtgtattcagccttaatcccacgatccttgcattcagcattgatcacacgatctttctatttatgtacattgtaacgagagaggaaactcttcctcctcaagtttccagccctataatagtgaggaatgttcactgggacaaagggactaagaaattataagctgtaacgcagtaagctaaggctatctaagaattatatattcagagatactattgtaagagctataagaaaaggaaacttcttccttgttcttaaagtcaataaaataacgaggattaggctat

SEQ ID NO: 336194 - DNA, 584 bp, Cannabis indica
aacaactagaccaaataccgaagccattggctgagtagaatgaattgcttgaactgctaatatactgtcgctctcaatcatgacgcctttccagttgtttgttttgatccaactgagtacttccttgatgcccattgcttctattgtttcaactggaaaataacctccatgatacatggcttgaatgtggagtgaggaagcatgatgatcacaggcaataaaatcaaacccataggaattttcttgctcaaatacagcggcatcaacattaatcttaatggtttgtatctctggttttaacccaaagctcattttgatcacctatattatcaaagaatatagatgaaagtgaagtaatatcttgaacttttctccaatgatcaagagaagtaaatgctgataccataatctcgttcaaagaggaagtttgattttttcgaacttttttgttacgagctttccataacgcctagcaaaccattgctattttgcacatgtcttcggtggcagcagaagaaaaaacctattcgagccatgaagcaaaggtggcaaagggagtttgacagagtacacctagctgatgc

SEQ ID NO: 336195 - DNA, 639 bp, Cannabis indica
atccttaacttgtttcggcatcttgaaaaattttttagtgtaatttttttttatattcatgtacgttatatctatttaagatatcctacaaaattttgagaaatttagaataattcacaatatagaaaataatattcaaacagtctattttacacgcgtataaaataaaataatcacgtgtgcaacacattgtttgaatgtaattttcaccgtgttaaattttttcgaatttcttaaaattttgcaggatgtctaaaataactataacgtatatgagcataagaaaaaatttgattaaaaaattatttcagatgctaaaacagataggggtgcatcaatatatccattttaagggggtgcattatagaattttcttatattttttttattgcagtaaaattcttaatattttcactttatttttactgaactccaaaatttaaattttagcggtaaaacccccaatatttgtattttgttagcagtttactattttcatctaattttaactgttaactgccatgttggattgtccacgtgtatacactatacacgtggcacaatcttattgttccatgtaataacattattttaaaaaataaaaataatattttaaaatgaaaaaaaaataaaaattaa

SEQ ID NO: 336196 - DNA, 1512 bp, Cannabis indica
tttttaatttcgaaaattagatttaacctgaaaattagtttgttaattaattttagatcaacttaaatcaagtaattttcattaatgatttatttaaaataaatagactaaaatatattatattttaattagaaaataagtaattagtttatgaattatctagatagatattttgtaggtagactttttggtatttttttaacatatatttaattaaatagaaaattaatatttaagttgatttgttcaagacacttaaatatttgatatttttaagatatttaattaaatagaaaaattatatttgtgttggaaattaatttatctaattttagaccaacataaattagaataatttttcctgttttattttattttaagatgaatttcgaaaatgtgttattttaatacattagattttgaattctatcatacatatatttgataggaaattaaatttgagttgaaaaattaattatttaattaattttggaccaacttaaattaagtaattttcataatatttattggaaaattaatactaaggatggaaaatagattttatttttcagatcttcctgagatataattttataaatattaaattaaaatgtatatttagagtaatctaaattagtaattttaattaaatgaatatacatatatatattaaaataagtattaaatgaaattataactcttcaaaagaataaggtttagttataaggatattcgatctccattgttggtcctacatggttaattgttttcaatataatctcgagatgctagacttcatcctccttatgcatggttattttttgaagcatttaacaccgtaacgatctcttatgataagtattttattagtttttgtctctattagactctcccttaccatgactacttagagataaatttacaaagtataaaacaatggtggaagctcataaaataagaataaccttgactctcggctaccaagacaacgttgaattcttattttgatagaataaaaggttgctagaatggtgtctattttagatgagttgactactctattcaatgaatgatatctttgactctcgcctaccgggacactgtatcagtttgttagaaactttggaaattatttaagatatgtagtttttgtattttcacatgtctttgttacttgctcaatgaatgataatttttgaatgtgtatgaatttatattaattgtagtataatttcgaatcttcattattggtctaacttagtttgttattttaacagaacaaatcccaaaagattgtcatttgttagacaagataacagtgttagatctcaacatataaatatttgtaaatgcaacatctagttgtacatccaaagatggcaacttagactagtatttacaatatgaaacaatgaagaagtttaataaagtaagaataactttgactctcgcctatcgggacattgttggattcttattttaatcaaaattatcctttaatgtttcctctta

SEQ ID NO: 336197 - DNA, 423 bp, Cannabis indica
gtattctcaggccctgatgtcataggttggctggtatccactacagtgactatgaatccaagacaacctctcctcatcaggtccttagctttcaacaatgttattcgtggtatgtgtgccccctgaaccttacccacgaacactactgggttagcactatcgggctcaaacaccaccatcttctgcttgcagtcgatcgttgccccatacatagacagaaaatccatttccaggattatgtcaaaattagacagttgcaactcaattagattggcggtcaattcacatccgtcaatccagaaggacaaagaccgaatccacctagtggatacaataaggtctcccgagggtaacagggtaccaaaccccaaagcatatatatcacatcgagcctttccatccagacattatgaatactgcatt

SEQ ID NO: 336198 - DNA, 650 bp, Cannabis indica
gagatggagcaattgatgtgtaagttttggtggcgatcgtctaaaaataacaaaggcatccattggaaaaagtgggacagattgacggtgcataagtctaaaggtgatatgagatttcgaaatctaagagactttaacttgagtttgctttgtaaacaaggatggagactttttagtcatccggactctctcctcagtaagctttttaaagctaggtactaccgcattggtatatttttaaatgcggagttaggtaccaatgtaagttttgtctggagtagcaatcatgaaactcaagggattgtttgaaaaggggcaaggtgtagagttaatgatagttctcggattaatgtcttgttggatccgtgtggctcccagatgataataatgcaagggtaacttctattaatcctgctcttgttgatcaaaatattaaagcgcttatggaaactaattcgttggcttgggatattgacttggtgcatgatttgtttaatgaaagcgatgctaatttgattcttagcatttccttgtcttcaagtcgtttatgtcactactaaaaaaccccgaatttccgtcggttttacattgtccgccaaagaattcccgacagttcataaaatcgttgcctatacgagcgtcgcggatac

SEQ ID NO: 336199 - DNA, 819 bp, Cannabis indica
atgttagtagtttggggcggtttattagacattgggaatgtcgggaatggccaggaatttagaatttcccaaaaataccgctttagtattatttatgttattttagtgtggaggggcaaattggtctttttgccccaatgatattttgtcttctagtgactttattaattgaaaaaaaaataaatgttaattgtttattgttggctaaaatagattattgtttaaagtattccttttattcatttttcattctcaacacttagaaaaaattagaaaaaattgcaaaaaaaacactctctcttttcctctctttctctctcggctggaagggtgttccaagggctgggatttctgatttctagctatttttccttcattctaagtgttcttctagcattggtaaagtttctaaccctttcttttttgtaatttttagaaaatgtttgtaaagaggatgatgcatgcatgattaattgaggttgttgctgctgtgatcttgttgttgttttctgtgatttaaacttgctgattagggtttaattaagcttcttgtagtgcttgatagttaagttagttaaagttatgaattttctatgctaaaactatgatttttcaaagaaatgtcttgaatctgttgctgtgatgttgttgatgtttttagttgttttcagaggctatattatgcatgtttaagtagatttatgttggtttgattgcatgttagctaggtttactcaagtttgagtttagaactcaaagcttgagctttaatggtgatttttgattatgtgcaatctgggtggttttgaagctttagaa

SEQ ID NO: 336200 - DNA, 664 bp, Cannabis indica
aaaaatcaaattgctcttcctttattcgagaggaaaaaacaaatgattgtaatataattgagtgtattttctacattgcaatttttctaatgtcattaatagtttttattaagagattattttacaaatacacaaaaataacaaaaaaattataaaaatatgattgcacgaaattttaagtatttttatgattttcatgattttatttacaagaaatatagtattttgacgtatttcgatgttgtactcttgtcaatttgttgttgattttttgttgtttgtatgatattcaagtttagactttgcttgaaaatatcaaagggaaagcatcgcggtgagtaagatagacttcaagcaatattttccttccgagaaagagagttgaagacatatcacaccccgagtgatctttcttgcacaaaaaacaatgtgcatgcgagagccatgaatttttatgaagcaagcttcggcttcggcgaaggaagggtgaagttgcataaaaattcaagcttagacttcacttgaaaagatcaaaaggaaagcatcacgatgagtaagatagacttcaagcaatccttcctttccgagaaagatggttgaagacgtatcatacccccagtgatctttcttgcacgaaaaattatcatgcatgcgagagccatgt

SEQ ID NO: 336201 - DNA, 792 bp, Cannabis indica
agactgggaataacagttccgtacacagccagggcattcataacacaactattccaccaggaatcaacgcctaaacgaccatcgaagatgcaatcgaattgtaatatctctgtgctgcgttcagactcatgcaaggtcatagcaacactctgcatcatgatcaggaggaactgcgtgccgcagtaaatctcgcgtttgatgaacagaggcgtatgttcactgaatggagagacaaagagatggaggcattaagggctcaccatgcagagatcgaagatcgtagtcggtaagctaccgtgctgatacgaagagcctaccagactgtaggccagcaaacgccgaacgtcattcctctgggagaaacagaggatgtcccgacgatgaatgcctctcagacaaccaatggtcatccgtccaattcccggtcatgaggaggagccatacctgacggatccaatctgaataatggagtcattccgcctgtcaaccaagcgaatcaatcgctaaggcaaccgggctcttctgtgttcgataggctgggaacgacccatgacctaagggacgatctaaacagaagaaggggaacagacgagcagaatactttaacgatcgtgcagcccggagcccatactcaaatccccgctcaaaaagacgctgatgtaatccaaaacgccaatcaagtcagcccagccgtacaggccctgcttgacgagttgaagaatatgtttcatggcatggccggacagcgtaacaatgatcttgagttagaccgtgctcgcggaactcccttct

SEQ ID NO: 336202 - DNA, 531 bp, Cannabis indica
tagtgtgtaagactgtgaagaatccaaacaattgaaggagtttcgggctcagatcttggtgatactctgtgacagaaaggatacaagggttagagatttgagtggaaggagtcatttaatttcgctgcaaccaatgtaaggtttctgataccttttatgtgtttattttcatctaggtcttggtgaaagatattccaacaaggtggtccattgaataatatcgccttaggtaaattacaagtttgtgaatcttgcttagaaggaaaaatgacaaaacgttctttctctgcaaatggagagcgtgccaagaaccactaggaatagtgcatttagatcattttggaccactgaatatcaaagccagaggtggttgtaagtactttgtcactttcattgatgattactctagatatagtcatatttaccttaggcataagatttcagaaacttttgagaagttttgagaatttctatcattggctcaaaactaattgggtaaaatcttaaatatcttgtaaactgataggggtg

SEQ ID NO: 336203 - DNA, 977 bp, Cannabis indica
tttatttttcgggatattacatttaggttaggttttgaatagggtttcgagaaattcggggctggggtataagttaggattagaatctgttcttaggcttggtttaaagcttgtataggtttgagtttgctggatataagggctgcttaacttggaatgagttgaatgaagttttgtgagttctatttcacttggatatactattttgattaaatggataaattgttataaattgatggtaggaatatgttgtatttgtgatattgagttggtctggagctgttgggcaggtgtggttgagtttcggttcgagtttggggagaaaactaaagatttgcaaccctgccaaaaccggtcgactggttggttctggtgctgcagaaccagtcgatcgatttaggtagcaggggggaagttttcagttttcttcagggccagttttagggctcagggtgattttcgtgtctggtatagattgtttaaaagttgtaaaacctattttggagctaattgaagatagggtttaccgattgtgagaattagggttattcccggaatgattgatttaagttatttattggatgttgttgtcatgacataggacccgggattgtcaagctttgattccacctaggtcagcatgtaggctaaattttgactgtggtaaaaaaatattacatgccgtatatggtcaacgttaaactgttatagtctcgattatgatcgagggaaaaataatagaaaatgattatcatcgttatgactcggttataatcgagggtaatgatatgaaacgattaatatcgttgtgacttgattatgatcgagtaaaagaaacggtcattactgttatgagtaattactcttgacaccttgaataggtttcttacttatcatttgctgtatcgggcaacgatagtgacatatgtagctcgtggttaacgagtggtaagagtactttatgaagtaacgaaatt

SEQ ID NO: 336204 - DNA, 530 bp, Cannabis indica
atcatgtaaatgtctcgttccatattaatcctcccaatttcttttgacaatagttacgaattgtcttgtcaactccttcaatttttatcttcttaaaatgtttccaaacaaaagaagtcaattttctcttcacctgagtattctcatcatcaataatagtttgagtttctgaatcaatattatttggaggagttgatgagtctacttctttaagtgtatttggtgttgttgctccttctatttgttcatatgttgatggtgtgtctttttcaatctcactcatagttctactacatataataatagacatataaaaggtcaacacacatgataaaatacgaaaataattataaattacaaaaaaaaaacagttatagacttacaaatgtataatgtataaaataaaataacataaaataataaaacataaaaatatttcttatacataatatgatatatatattaaatacaaaatcaaaatatatatatatatataatataccgcaagattcacaagaattacaacttta

SEQ ID NO: 336205 - DNA, 552 bp, Cannabis indica
ttttttctccttatattcaacttgaaattcataatctgccactcgagtaacttcagcaaatctagcatttttaagtagttgattcactttaagatgcactgcaggtgttagtttggttttgcatctttcagctattactttcctcgcatacatcatgttcattaatttagttctgagacattccaataactccatgggaggcttgtaacgtacttcatcaatccaaccattaaaggactccacatggttgtttgtaagatgttcaaccttggcattagggtcaaaacagctcaaattccaatgttttgcatcaatattagatagccatacatatgcatctctgtttaaaagttgaatttgcttcattacatattggaaatgttgaaagttcgccgtctcagccgctgcccaaaaaagattttgtaaattggatgtaccgaaatgtttcgtcatgttgttttcaatatggaaacaacaataacgatggaaagctcttgagatagtttggacaccctctatcagtccctaaatttaattagaatcagttaaaac

SEQ ID NO: 336206 - DNA, 574 bp, Cannabis indica
aagagtattaagccatgctctaggccgatccctcaaggaaaatgggaacaacttcaatcttaaatcctcttcacttactccttgtagtttgaaagagtcactcacctccaaaaatgagcgaatatgcaggtgaggatcttccgttggcgacccaccaaattgaccaaccgtttggagcatttgaaacatgaagggcttgagctcaaagtgaggtgcttggattttagggttgcttaaatatctacctaacatcccaacattgtacgcaatatcaggacacttacatacctgaagatacattagactccctacagttgatgcatagggaatcttttttatttcctcaatttcaaggctgcttttacggcattgatcactaagactgaatttgtctcctttagcaacgggtatggtctacactcttgcatgccaaccttttgagtactttattgatatagctctttggtgataatcaagaataccccgagaacgatctcgacgtatttcatgaattcctaaaacaaaagaggcgtcaccaaggtctttcatttcaaattgcttagataaaaatctc

SEQ ID NO: 336207 - DNA, 540 bp, Cannabis indica
gtaaaataatttccaacagtacacaggccggccaagaggagcttgtatggtcggcaagggtttgagcacaaactggccagccaaaggtgactataagaagaaaaggcgcattcgaccaaggaagcctgacatttgtacggaaagttgtacaaaggctggccaacacgtactaaggctagccaacacatgcaaaggttggccaacactgtccaaagctagtaggcacttgacctacaagaccttggcaggcacatggtcggccagacacagccagaccctgacaggcacatggctagtcaaaccctggcaggcacttgccaagttgacccttgcctgcacttggcaggcaattggtgtacagccttcatccagtataacaagcaaagctacaatttgggcttcaacaactcacgaaaataggggagaaatatcaactattcccctattcttgagggataattaacctatttactatttaatatttcaatatgtaaataatatgttatggttattcctattttttagggataatagtgttgg

SEQ ID NO: 336208 - DNA, 677 bp, Cannabis indica
ttaacgccagtttatttatggcatcttattttacataagtaagggcgttacaacaactctcatttttattattttaaaacttaaatatctcatattttcttttcaaaatataatgtactgcttttttaccaagttaacaactaaccactatgaagtttagttgcactttgtgagtgtaactcattattttagatttcatgatttaacttagtgtatcgccttaagggtcgatgtcacacaaaaatacatcatttcctcttattttagttaagagatcaacattgagcaataatatagacacataccttccttagggggactaaaacaaagtcgtctcgatgccagtctataccccctcagtgttgaccaataatgttggtcatagattatattgacatgtactccttctcccgctcaatattttaggttgttgtgtttgttttattaattctaagaattaatacataaaccacgttaataatcataattaatttatttataataaaagcctcaaattataaataaatttcacgtcataatcattaaatctgaattaactctttaattcataatttaaaactctttaaaattaataggctaaatttaaattaccaagttaattttaaattaatctagccagtttacatgatttaatttcaaaaataataaacacataa

SEQ ID NO: 336209 - DNA, 1400 bp, Cannabis indica
cacatgttgaacataattccttaccacactactagacttattgtgtaacgccctgaccctcagggacgccacgtatgtgcttttacaaacttatttcttcctaatctattagtttaggaaaagtgtggtttaaattaaaacacttaatagtttcaaattagaatacaaacttccaaaagtaccactataatgtgggggatcccctatttataaattttgttataacaaattacaaaaccactaatacacaagtaaggattttcaaacatagaaaaaagggtcgatcctgcttcccgaaagtcaagacaccacgactgatatgtacattgctgggagacctctgattcccgaacatagctttaactttcttacctgcaccacgaagcacccgtgagtcacaatgactcagcaagaaaagatattaaatcaaaagcattgtaaacgcagatattcacatctcaatataacgtatatatatttgtgactcacgcatatccatcatgcatatctatatagttttaacatttatataatcacatgcatattacgcaatataggaaaaccacaacatcttagtcaacatcttcatcattaccctaaatgaatatttaatcaacacataaccatatattctcagtgcttcgcaaagcactccaatttttacgttcctatgaacacttactcttactttccatgagtcactgaggctctgcaaggaaagtgactaatttcataagcaatataacattcattcagtcacattataacaaagcctattcaattacaactcatcacattataacatgtttgatctatttcacatcatcataaccacacaatcccggtacttcataaagtacctttaccactcgttaaccacgagctacatatgtcactatcgttgctcgatacagcaaacgataagtaagaaatctatctgcagtttcaggaataaatactcataacggtaatgactgtttcttttactcaatcataatcgagtcacaatgataataatcgtttcatatcatttccctgagtaaaaaggaaaaaaaatgtaaaaaaaaattattttttaatctgattttttatttttttaaatatttataattatttaaaactaaaattacgtggatcactaaaaatttaccacgtgtacaagtgtgtacacgtggacagtccaccgtggcacttaactgtgatttttggacgaaggggtacagatcaaaacggaaccaggatttaggtagttacgccgtcaaaatttcagtttttgtggttaattgttacaaaccgtaaaattaaagtggtttagccgctaatatccttattttataaactagatagatgttacgtgccaagtcatgtatgttaattttattttagtttttagtttttct

SEQ ID NO: 336210 - DNA, 896 bp, Cannabis indica
ttttttttaatgcaaaataattcaaaccatttattttaccattcacttgcctttagtcaaattttgagccttcgaatccttcgaatccttctctctctctttctctcttcaattttcgaaccctatagtgataaagtacctgcccacacatcacaagttggttctcaatcatagtgtgtaagaatgtgaagaatccaattcaagtgaaggagaatcgggctcaaatcttggtcatactctgctatagaaaggatacaagggttacagatctcagcagaaggagtcatttaattctgctgcaaccaatgtaaggtttcttaaactttatatgtgcatgtttaaattacattgttttacaaatttatatttaggatgttaaacaacatacatggtagtaaatctagatcctagtaaaactataatccaagagtatattgttaaggagtacattacgatgttaccatcacaagtacggaatgtacagggtgtgtgtggtatatcactcagtggtacttagggtacaaacaaaccctaccaacactcgtgtaatgaggtacgtactgtatgtggtttattggttgtaccctagtatggaactgtaacaccctaaataattaggcacgctacccaatatacttatgaaaccctaatcccctactcgggattactaataaaattagcgcagaaattaaactttaattacaaacgaaatgaaaataaacttgtaatacttttttgctttacaaaataaaagatacatgtgtcgggatcccgaaagtactttacaaaatattattacaagttcgtttcctctagccaacctaagcgacaaaacagagtacaaaatacatcattggtagaccccaacccgcttggtcaagtgtggcccgaacatg

SEQ ID NO: 336211 - DNA, 799 bp, Cannabis indica
taaagtatattattagaaattgaattaattagtcaaaggaaaatctagataggtagattttcgagggcgtgcattttctctccagcccccttccatggcgaagaggcgacgagagattcgaaagcccgttattcgtgagttgagtgtggaatctggaacaagaagtgaggaagatagtcgacaggttggggtcgatattgttactgaagaagctggtgttgcagatgcgatttaggaagaaggagaagcgaactgggagaaagcagaggttgacctaggcgatgggcaagggcttaacgaggatcaaacctgggctgataaagtggagaccgaagaccttcagactcaatctcagagtcattggaggaaattatcggccagtaatttccaggaccaggaaggctgactgagatttgaagaaccaatgattaaggaaggcattaaaatttcccaaattgatgaagaggaggtggttatgcaggcggcaaactggagctctgcaataatttgtatggtgctaggtgcgaatccacagtttgcagtatttgaaggttttattcgaaggatgtggggaaacctggggattgctcagattgtgtgaatgaatggtgggttcaccatagttaagtttaacgatgaagctactcgtgatcacgtcctggagcatggtgtaatccaatttgatcgaaaaccggtaattactagaccctggactattgatttagatgctatgaaacttgttaaatcagtaccactttggattcgtttacatgatctgggattgcaatattgggggaag

SEQ ID NO: 336212 - DNA, 990 bp, Cannabis indica
gtagctataataattttttcctcttacaaggatttttgtactattggttgttcgtaggtacctttggttgccaacccaactttgtggttaatggggtctctaaatttgtctctgagggcttatgagacattttgaattacaattgaaatcagatgatacaaaagactaatgtcgttatactatcagtaaaatgcttaggggaccaaaactttttcttaacctcacattttcagaaaaccagtttcactaagattgaaacaagcactattcatttgaaagaaaatgttgggaatttgcctttaaaaatcatatcatgtattcacgtggccaaactatgaatatggaaacaatacgtgaagaactgttcatacttttttcttatctagttacaaatgtatctttttggaattttatttatgttttaaggcacacgtttcttttttgcttttatgaatactggttttggactttatattttgaaaggacaacaatctatgacaatggtgatcttcaactttcagtgacaacaagcgaaatcacttgtgaggacgacgatattgttccccgtgaaatgatagaaagaccattagtgcggccaattgcactaaaaaaattatgtctaatgactcttatccaacaatctatattggaaaaatatcattgtggctaatacagaaacaaatctcataaaaccaaaagaagtgattcttctcttgctccctctataaaacaaacaatactagttagtgggtgatacagaaatgagtaatcaaaaactaaaggaaactttcaccttcttagtttccatctaaagaaagcaaaaaccaaaaagaaaaaaaatgatactttggcaaagatatatagtagaagaatgttgatcataaatattctaattacatccaatccatcttgaaacacgataaagaacaaccatggaagttattccccaacaaacacaaaaacataatagcaataattaagagaaaatta

SEQ ID NO: 336213 - DNA, 577 bp, Cannabis indica
gtgattttataaactagtttaatactaatagaataattaattataaaaaaaaacgtgataatattaacaaatttaattaaaataaaacactaaaaataaacattataacgacataaaaagcatgtttcgagaatgcctgttataaaagttttactaaagaaatatatacaacaactatttaaacacaaaatcaaaatacacaacagatacaaccagcccaaaacaactcttggaaactcggaacacaggccggtgaggtcaatatgtacattgctggagaaggtagtcacctcatggcagctctaacttttccttgcccttacctgcaccacatagcacccttgagtcacaaggactcagcaagaaaagaaataataataatcatataatttattattcgaatattatcatttatacatagtcagaatcaaaccattacgcattgttcataagatgaaatccaaatcactactggtatctaccatgaataagcatcaatatatagaaatctggtaatacaaaactattataccaataataggaatcatattaatttaaaaatataaattatatatgt

SEQ ID NO: 336214 - DNA, 660 bp, Cannabis indica
ttcaatgattgggttagagatttacctgtgctcccaagagttcttccatatctaaaaatattgtttaggaacgagattgctttggaggaatcgaatgatattcacgaattatgattacattctttcgcaatctcattatagttttagctattaactctttttttttattatttcccatatggaagttgagaaagaaactagcagttattttttttctcacacttgtgtaatatggtgtctttataatcaagagttaataatcatgcatcttactttatttaataatgccattgccctcgtcatacgttcagccacaccattttggctttgatgtgttgtgttattgttttatgtttttttatctatttttgcaccaagaatcaaatccctattttaaaaactttgtcagcaacttaccaatttgtttttcaataagatttttctgtttattaaatttagcaaagcaagtattcttatgtttgagtgagatctttctgtagtcgttcactattgacagagagtagccacaaaaatgctaattcaaacatgtacacgagggatggttgcacgtagtgaccttaagttcagaaaacagacaagagctgctattttattttttatcttttttttatttattattttttttgttatttagctttt

SEQ ID NO: 336215 - DNA, 1161 bp, Cannabis indica
gattgttttatttttaccaaatgctttgtaaaggtataggtgccacccaagtgaccaagcagacttatgactcttggtcacttgttttttacaagtatgagttttatatgtttggtgttttgggtttgaccaaaccttttgtacgcactggatggtaaattagaaacatgctgataatttcgaatcaatttgaattttgaaataactatctttattcatttatcgatcgaaaaatgtgtttgttaccgtagtaacttacatcagagctatttgatctaatttgatcttttagcttaacatgaaataaaacaaattggagaaatagaaattgtactttaaatggtggtcacctgacctgagtacttttttctttttgtcgaaacctttgagcgtagtctgcctaggaggccattcacttaatagtaaagtttgctcagtacttagtgtggttgtccgacctggtactttattggtagtattttcttaaatgttccccattccaatatcgtggtactagaacgagtcgcattttttcgtcatacttacctaattcttatgctccggattcgagaacttcgaccacttcatatggtcctttcctgttaggtccaagtacacctaccgtactgtctttggtgtttaagaatacccttcttaagaccatatctcccacgaagaatttttgagccttcacttgtttgttgaaatattgagctactttttgttgatgggctatcaacttcaagtttgcggtgactcatctctcttcaatttcatcaagtgattttgctaggattacgtgattggtatcttgattgtacatcaatcttctgttggatggtggctcgagttctacaggcaacatagcttcatatacgtacgccataacaaatggtgtttgtccggtttccgttttctcagttgtccgatatgaccatagaacttcaggaagcccttctggccaatttcctttggcatatttgagtgtttttttagtgtatccttcaaggtcttgttgactgcttcaacttgaccattcgcttgaggatgtgccactgtggagaaactattgatgattccatggttcgcagaaaagtcagtgaaggattaagttgcatttatctgaaactatcttgtacggcagtgttgggttttatgccc

SEQ ID NO: 336216 - DNA, 632 bp, Cannabis indica
actcgatcttttattggggtccctccgggagctgtctttgtataagggaggcagtctctggtagtgctatgttttttcctggtagcaaaatacacacgctcttgggagtctgttagctctgtgtactaggtatattggggagtatacccccttttctgccgcttatcctccgtccagttgctgccttttgaggacctttggctccgagagccttgagaaggaccggctaaacttgtggccggagcagagtgcgacggggcttgtccattcatcctcgagggatttccaaagtgagaaacttgactatatccgggagtagcggaaaattgtatgtcgctcatcggtggagcggctgctggcaaggtgcctgggagctgagctccgggtacatatcctgctatcccggtgagatagtatcccccataggccactatttgggcctcttccaagttgatatatttttggactctcttctggaaatcttgaaggttggaatctccttcttgttgtaactcgttccagaatggagtccctgtacggatgcccgcttgaagaagtgcgagctgttgtccgtcatcgactttcttggtttttgaggcttcttccttggacctcttatgaaattcttcaat

SEQ ID NO: 336217 - DNA, 1192 bp, Cannabis indica
ttctgcacggctcgttgagtattccatcatggacatgccagcgaggcatcctgctcagcatgttgatccgaccaggtgctctaagtagatgccacgtgtcaccattcttgtgatgccacgtcagagtgccaattctgggataacaggagtcatccatgtgacttctctggcagtatttatctccattacttcagtccgattcactgttgggtgagtccaaacatcgacaggaattacattgagtaattaggcttctcttgttgaggccaaacgggccaaagcgtctgcatgagagttatgagcacgtggtactcgagaaacaatcattttcttgaaattctgtagcaactcacaagttagggcgagatatctagcgagacgtccacctctggccagatattctccgttcactttgcatacaacgatctgggagtcgctgaaggcttgtaactgctcgatcctcatccaagagcgagtttcaatcctgcaatcaaagcctcatacttggcttcattgttagatgcagaaaattcaaatctaagtgcagcatgtaccttaaaattactggggcttctgagtattataccaccgccggagcctccgctattggaggctccatcaacatataaagtccatccttctccgtttggtacatcgggatcgattttttcttctataagtgccacctcggtgctcgggaactcaagtataaagtccgccagggcttgccccttaatcgcagatttaggtttatacctaatgtcgaactagctcaactctaccgaccatttgaacaatcttctcgatgcctctggttttgccaaaacttgcctcaaagggtagtttgttaaaacttcaatgctatgagcttggaaataaggtcgcaattttcttgacgctattaccagagcaaatgccagtttttccatctgggagtagcgagtctcaacgtctaacaggcgcttactaacataatacaccggatactgtcttccctggtcttcgcggtagtactgaactaattgcatattcgaacattacgaggtagatggataagatttctccaggcattggtttcgaaaggattggggtttgccccaaatgtgatttaagtgcttgaaaagcctcttcgcacttctcagtccactgaaacttcttattaccttttaaaattttaaaaaattctttgcac

SEQ ID NO: 336218 - DNA, 534 bp, Cannabis indica
aggagaccatcgagaccttatatgctgaagtaaacagtcatcaggatgagaggacttctctacgagtagttcttcttcggatgaaggaagagaagaacgccaaggtaggggagcttacgaccgaggtggacaggttgaaggagaaggtcaatgccttggagacagccggtctcgagctcttctttgatttttggaaggctaatccccgggccaactttgactacttgggcgaggctaaggatatgtaccttgagtactgcgcggcccaagtagcttatggtgggaacgaggtggctgcttcaacctctggccaagctgcttcaacctctagtcaggctgttgatgcttctcctactcaaacaacagatcctcctgctccagttggcccagaagaaccgaaccaagagcctgggactccagctgtttaaacatttcctttatctctttttatatatatatatcttattcagcctttgggctttttctaagacatctcgaccagccaagcagtctttaaacttggaattatttttc

SEQ ID NO: 336219 - DNA, 596 bp, Cannabis indica
ataagtaatgtgatgtcggctttgtggttaagccgccctgagctccatagttaagctcaccaaatggataagaacgttcttaagggaagtacgaccactgtaccaaatgcactaaagtaccaaccctgtacacgtgttggtagagccttaattgtactcccgaaaactactaagtgttgtacaacatgcacgacgtaccccctggtactcgtgttggtaacactgtagccatactaacatgtcaaactatactaacactcttaaatcacattcatataagcgatagtagtgcaaacatccaaaagaagaatacattcatatatatattcttatgctatcttacctcgttccgtgctcaagtgtgccggtcagcctcagtggaaacgcatctcgacgctttacagggccctaaaccataatgttcagaattcgatgagagacacgctaaaacacttatcgggaatttaaaattgaaactaagattaaccctatcgataattaggatgccaataccctaaattacgtaaaaacgggaaaaactagggctcgggaaaaagccccaactggcagactggttcccaactggaaccccagtt

SEQ ID NO: 336220 - DNA, 575 bp, Cannabis indica
aaacaacatggttagagaaaacagacagcagaaacataaggcataacagtcaagaagctcaaaaacgagacaaagtagtatgcaaggtgactgcccaaacaaggctcgaaagtccatcatcacctgacatcgcccttatttcagacataacagctttcccttttctgaacacgggaggggacggcggagcaggtgaaatgggctcccttatgcaaattgcatgttcaacaagcctgggcagggccggaagtttcttcttcctcttgagtggagtcacctgctcttcctcagcctcatcttcaggatttaagggctcctaagcatatttcttggcccttgcacctcacttcaacttagcttcacgcttaagttgaatgagttcattccctgatgagctcgttcactccgtccagcaccagatttcttcttcttccatgacacggacttaggaatgaagtccttaggatagagcccgtacttcataaagttaccctcggaggttaactggataatattctgatcttcccccggcagtcgagcaagcttttgagctctgtccctaagagcaagagtga

SEQ ID NO: 336221 - DNA, 688 bp, Cannabis indica
agggaatcagccaactagaaacttgaaactgaggcgaaacgacaagctaaattttcgggtttacctactgccaaatccgggtaaccggttttacccagaaaaaccaaaaaattcaaaaccctaaccaaatcgtgtccaaacccaaccaaactttccagacctggataatacactccaataaacattttccaagtgataaaacaactacccatactcagaattcaaaattaccattgatgagccaagcttgagttcaaaaactcaaagcttgctcatccaacaaactagctatcaaaacttgctcaaatcaccatatataaaaataatttaactactgaaaacataacccaacaacaacaacaagaacaacaagcaaatcataaaaaacatgcatgatccatttacttaaaaatcaagaaactaaggggaagttgtctaaaaccttaccttggcttggagattacaaacactagcagaaaatacattgaatcacaaagaaaactcccaaccctagctggccaagagagtttcgaaagagagagggcaagagaaagagaacctttccttcaagaaaatgatacttttgattttttaataaaatgagaaaagaattgatttatctacttaatattcagcataaaacttaactaaaaatcagattaataaactttaattaaagtccacaaaa

SEQ ID NO: 336222 - DNA, 694 bp, Cannabis indica
tttgacaggaatcttggaagtagaattgtttgatgtgtgggggataggttttatgggtccttttccttcatcttttagcaatttgtacattttattggctgtggactatgttttgaaatgggttgaagctgtagcaactccagccaatgatggtaaaacaattcttctcttccttcaaaagaatatatttactcggttcggtactcctcgagcaatcataagcgatgaaggaagtcacttctgcaataaacagtttgaagcactcctctcgagatatggcgtccgccatcgaactgctcgaccgtaccatccacaaagtaatggccaagctgaaatttctaatcgggagataaagatgatattggagaaaacagtgcatagataaagaaaagacaagtcacgaaaattagatgatgcactatgggcttatagaacagtatttaaaacagtgatcgagatgtcaccgtattgattggtttttggaaaagcttgccatctgccagtggaattagaacataaggccttttgggctatgaagaccctcaacatggacttgaaagctgcatgagagaagagactgctgcaattgaatgagtttgaggagttcagaaatgtggcttacgagaatgcaaagatttacaaggaaataacaaataagtggcatgaccaaagcttagtcagaaaggagtttcaa

SEQ ID NO: 336223 - DNA, 1161 bp, Cannabis indica
tatggaaatcgtgattaattaaaattttgctttttaattaaaacttatatattacatacaaaatatttcgggatcccgattacaaaacactttacaaaagtttactagtcctttacaaaatatttgtcgcccagcgactaactacaaaagaactattgtcctgaggatcgtacgctcaaggccttatcgccctgacatgtacaatcttcattggctcgtcctcacggttcctcagctttggccttgcccttacctacacataaacatagcactgtgagtcgacagactcagtaagaaaagcataatataataaaacatactaaatccgaggttataaccaagcgcccatacacctgaccataaccgtatctgaatcagggacgtgcatgacaacgtatgattaattgtaaatccaacctatactcggtactctagtcataccgatgtggtagcagataatccatactaactgatagcctagcatatatctattggcatctcggtgcaactctatgtacacctcactgttgccctgatatgctaatctgacggctatataaaattttcctaccatatatctaatatgttaatctgatggcaactgacatgtacgctaaacatgtataagcatatgcaagacattatactaatcttacctcgattccgaattcaggtgtgccggtcaacctgagtggaacaaactgtttggcgaaatacaggctcctaaaccataataatcacaacactgataagtgacacgctaaataacttcccggggacttaaactagaaactaaaagtttccctatcgataaaaagcatggcaataccctaaacaacacaaaaatgggaagaactagggttctcaaaattgtcccaaccggtagaccggttcctcaacctgaattccggttctggaaaaattcctgaaagccccaaccggtcgaccggttcctaatggcctccctgaaccggaattccagttcagtgcaggaatttttcaaaattccataactcaaccaaatcaaccctaaaccaattcaaactttccagacctgctctaaataccccaaataacagttccaaagcaataaaacaacccagcatgcacagaatcaaaaaccaccattaatgagccaagcttgagttcaaaactccaaag

SEQ ID NO: 336224 - DNA, 822 bp, Cannabis indica
tatcgcctatgaaaggcattaaaactttggtaagaaaggaaaacttagttcgaggttcattggaccttttgagatccttgaaaggatagggcaagtagcgtacaggttggctatgcccccagtgctggcagctgtacatgatatgttccatgtttcgatgctttgaaagtatgtctcagacccatcccatattctaagttatgaaccattggaacctcagccagatctttcatacgaggaacaactagtgcaagtacttgatagaagagaaaaagtcctgagaaacaagacaattgcactcatcgaagtgttatgagaaatagtaaagtagaagaggcaatctgggagctcgagacagatatgcagtagaaatatctagagttgttcaagtaaattttgggacaaaatttctataaggaggggataattgtaataccctaagattaaaaaaacggattggcaaaccctaacagttaatgtgtttttatgtggaattgtattattatatcatttaatatataaaccatattgataaatgacatgttaagacctcgttggtgagccatgggcattttcgtaattttgatccaaaaagggtaaatgtaatatcccacaaaataaataatatttaaatagacatattttattaaatatgtaattattttggaaacaaagtaagattatgatcttacttaggttaattattgagaaattatttaatgaaatacgatattttcgggctcggcaattgtgagaatttagcgatgtggttagtaatgtcatgacattaatgaaaaaattattttgagaatatcctggatt

SEQ ID NO: 336225 - DNA, 311 bp, Cannabis indica
acaaaccgcgatttaagattctcccatggaggcagaatacatagctgcagcagaagctgccaaagaggttgtctggctgagaaagttcttcaccagccttagtgtcgtgcctgaaatggaaaagcctctagtcttactatgtgataacaatggagcaatagccaacactaaggaacctcgaagccataagagaagcaaacatatagaaaggaaatatcatataatcagagaatatgtggcaagagaggatgtactggtggaaaaagtggacacagaagacaacttagctgatccattcaccaaagtgttgg

SEQ ID NO: 336226 - DNA, 586 bp, Cannabis indica
tttcctctcaagatgtggcttattcccatgagacacttgagcctcccctcactggcaccatatttcaaccctcagagtactttgatggagctttttccaagcgtcctaaagttatcgttggagcaaattctgctgctgctgctgcaagttccagttctgctcttgcaaatgtccaggaaatcaagcaggaagttatactagtgaacaatcgtctagctgccatggaggaggttcagcaaaagatgtccaagcgactgtccactttgatcaagctttacagggcataagtgtttctttatttttgactttttgttggacatagtttcatttctacttgtctttggcccttagataaacaaaaagggggattaatagtttttaatttcttgatttcttcctttgtttttctcaactctagaccttttttccagggggagttgagattggtacctgtgttaaactttggtttaaaagttagctttacatttcagttttatgttgtgtttcttagggggagttttgtttggtatgactatcttttttttgcaggtacttttctattaaaaaaaatattttgattatctaa

SEQ ID NO: 336227 - DNA, 718 bp, Cannabis indica
gaatcttttagaaattaactttttcagacttaaattattaaaatatttatataaaaatcccttataattttaaattattacacccataattttaattaataaaaaataataagaataacctctaattaaatgtaattatccagtcaatcttattatcaatactttaagtgacaaataagtgtgccagtccaggattggttcaagtaatttaatttttttttaccaaaaaaaaaaatctaatataaattataaaattaaagataattttttttgccgcactcgacacatctgtactttattccaccctctgtcatgttgttcttatttctcagagagaaagtcactttatccttcatccttcgcagttctaaattaatatattgtatatgtatcaattgattggagtagaatcgttaaaaaagaaaaaattatgaaagtttaaaaattattaatcataattggttgttgatcttgaatatatattattaaaaggtttgaaagttactaaccgttatcggttattgatcttgaatacgtgttattgaaaaaaattgaaagttaataattgttattggttattgatcttgaatatgtattattgaagatttaaaagttattaattattattggttatgaatcttgaacatgtgttcttgataaacttaacaaccgatgttattgattattactaattattgattttgattatgtattgtca

SEQ ID NO: 336228 - DNA, 476 bp, Cannabis indica
ttttattttatttctctttcacttttttaagtactcttacttctaataaaaacactccaataatatagcacatttcacaaatgttataattatgatctctcacattattatttaatatattatttattttaattataaatattatcacactaaatttttagaaaaaaatcatatattaatataactaagcataacatgaaatttaaatttcttgacaaaataaaaatgttacattatatttaaaaattatttttaaaataaaaaaaaattataattaaacaatctaacataaaatttaaaataagttaaatttaaaaataactcataaaataactattgttgtattgtgcaccgtttacgacaaactcaatttggtgagggaaaaaagataggaataattacatttttttgtaaaatatttacatttttacgttcaaagaatgtttttttacatttttacggttttccaaaaaata

SEQ ID NO: 336229 - DNA, 916 bp, Cannabis indica
gatcctaataaacatacacaaaatctcactgagtggttgatggaaatacaacccagtcaatgattgatttgtccttgaaatctggtgtaaatagacttgtaatttaatatatgtaaatatagatcgatcatgagtttattgaactttttcaattatgtgtagtgaacagtggactgtgataatcatctaggctgctactcagtcagtgccattccttgacgcaaagaataggctaattcctaatgaaattagaaaatatgtcacaacgtaagttttataatttttttttctttaatttaccttacgtttctaattctttcactaagtaacttctctatggtgtagtgctttggaaacctacaagattcaaaaaaaattaaaacatggttgaggtaatgatcaggcagtacaagtgtccaggacaaccagacgatgtacagtgtggatattactgttgaaaatattttaccaggacctagatttactaacaaatatgtttcattaacatcctaatataaattctaaaacaatgaagtaaacatataaggttttaggaaaccttacattgggtgcagcggaatataatgattcctttcgttcagatatctagcccttgattcctttctgtagcagagcattatcaatatcggaacctggatctctttcactccttctttgatgctgattctcctttttgttggttggattcttcacaatcttccacacaatgattgagataccacttgatgtgtgtggacacttactctatcactcaaggctgaataaaatttaagaataaaagacagaattggtttcggctatagggaatagaaagagactcagttttcatctgacaaagttaagtttgaatgtgagccatcactatctatttataggtaaccacctaggtttaggt

SEQ ID NO: 336230 - DNA, 702 bp, Cannabis indica
tttacttttctctcaactatttcgaaatcctatagtgtcttcaccattaaaattcgagccttagtgattgagtgcatgcccacccaaacaattataggagtgttggacttagatcttgattataccctgcgacagaaaggaacaagggttaaagatctgagtggaaagagtcatttaattccgttgcaaccaatgtaagatttcttatactttatatgtatttaatttttatcgttttagaaattcatatttaggatgttaaaaacatacttgttagtaaatttaggtcatggtaaaatatattccaacagttagaaatttcaaattcacaacttcatattttcatattttcgacaaggtgatttactcggaaaccaggtagtttcgagtctctcatttctgcataacagcattatttttgagaattagtgaactttgctagaacacaaaaacatgtactgagtgatgtcaaaatatcacttaagtataaaaaaatacatcccaacatgttttcccactcacccagtgtccaagttaacatcacatgtcaacttcggtgctcggatatcaacttgggcgctaggccctgaaaaaccttcagtaaaatgaccataaatcactaaatattgattcgattgcataattaaacttgtgctttgaagctaatttagtgctctatcaagtcatgtctcatacttcaat

SEQ ID NO: 336231 - DNA, 1269 bp, Cannabis indica
atgtgcctctaacataatatataattattaaccatctcattatggttgttgataaatattgggcacataatcaataattttgtttatggtatacgtctataattatattagttcataataatcattctaacactttcaactaatcagatgtgaagactcggtttgactcaaaccgagtatatatataataataaataaatataatataatatatatgtatatacaaaaaaaaattaattatatacaaaacagacccaccccctgtcatcccccctctctctatcaatctcttttctctctcttcaaacacaaaaaaaaacccacaaaccaccatcaacaacacactctggcaacccacatccggccaccgcctagtcccacgcgctggacaaatcgaaagcccaagtgccggtgacttcaccccccaagcggcgccgctcctttcgccaccgttagctcgggatcgcaagtcaaagtttggggtttcaaactttgaacggatttttcggttacctccggtctctgtttgacgagacgtcttcaccactaaactcagctcatcgaggagaacaacctacactaaaccatttttcccagctcgctacttttttcggtgacattttcagagctccgcccctttctggcgactttccggcgatatcgtgtaccgttttgacaaatggttggcatgggtgtgatctactcatcgatgtggtcgttttgatatatactacccctatttttgacgatatttctgttacaccaatttttaccgccaccgattgttaatgtgcaccccttaggtgaggcttcagaaccctaaattttaaatataatcatattatatgtcgttgaactcaattttgaatgtagaatgcgatgatgataattatttaaccatttgatggtataggtaagagtaatatgtaagattggactaaataattggagctcaagacttgagagcttaagattgtcttttggataaattttaacgacttgggagaggtagggactcaacttaattattggacttgatttttatatgtgttgtataacattagacatattctaaatttttatgatttgcaaattatttgaaaaattgaaaacttaatctgcatatttttctagactattctagggcactgagtgccaaatatattttggtacaaatatttatataggttatgatttttgggtttattcaaaatacaactgttatgctgccgaattttttagaaataaaaatgaatatgttcttttgtt

SEQ ID NO: 336232 - DNA, 712 bp, Cannabis indica
caagcttggctcattaatggtgatttttgttttagagcatgctatgttattcaattgcttggaatatgtctattggggtataatatgcaggtctggaaggtttggtaaggattggaatcgaattggttaggttttcgaatttttggggttttttgctgtaaaccggttgaccggttttacaagccgtgtaaaaccggttaactagatttgctgttgggttccctgaaattttcatgttgtcgattcgtgttagtttcagagctttggttggttaattccctgttagtttagggtatttctatgttaacttttagtagatagatttttagtttaaaacctaagtccctggatgtgatttagcgtgtcacttacccgtgttatgaacggtgtgtttaggggcctgtaattcgccgagtagttattccactcaggtttgctgacacaccagaattcagaaacaaggtaagactagtataatgttatgcatatgtttatacacgtttagcgtacatgttagttgccgtcagaataggcgaaactatagccatcaaattagcatatcagggcatcggtgaggtgtacatagagatgcactgagatgccaacagatatatgctaggctatcacatagtatgagttatctgctaccacatcagtacgactagagtactgagtataggctggattcgcggttagtcatactttgtcaaga

SEQ ID NO: 336233 - DNA, 579 bp, Cannabis indica
tagaaccgaacacagacctagcctcagacccaaaccaagactggaactcggacccggacacggtcgtgtacccagaccggaactaccaagaccttgacctaaatcttggacctgatcccaaacacaaacttggaccaaaatagggatccggatacgaaccttgactcatacgaagaccaagaatggaactaggacttggacttggtttaataactgaaattggacctagatccagaatcgtaacctgaccaggacccgaactcaaaataagacctagacccgaattgggagccgacccgaatcccaacccaaaccaagactcgagacccaaactcgaacctaaaattagacccaaacatggaaccagattagggacacagaataagggtcaggaccttgaattgcacccaagtctcgatcccgaacccaaactcagacctgggacctgaacaagagccagactgagatccgtgacagtgatccagaacttgactcgagattcaggtaacaggtcctagaacagaccagtagtcggtgtctagatctaggactcagactaggaccagaacccagacgaag

SEQ ID NO: 336234 - DNA, 1028 bp, Cannabis indica
gatctgaacatgagacaaagaaggtggttggagctggtgaaagactacgactgtgaaatcctgtatcatcctggaaaggcaaatattgtggcggatgccttaagccgaaaaggacctgattagatactcaatatgatcatgatttctcctcagttagcctcagagatgtctagggcaaacattgagttggtgactgagaaattatataatctgacacttcagtcagatttgttggaaagaatcaaaatgactcaattagaagatcttgaattggttaagattcgagaagatatcttagtaggcaaagctaaggacttttcaatctccgatagtggaatgatgttgttcaaagcacgagtatgtgtccctaataacaccaagcttaagggagaaattttggatgaagctcatactaccccttactctttacatccaggaatcaccaaaatgtatcaagatttgaagccgtatttctggtggtatgggatgaaaagtgatgtggtagactatgtcactaagtgcttaacttgtcaacaaattaaagctgaacatcagcgacctgcaggattacttcagccactaacacttccagaatggaagtgggaagacattgcgatggattttgtggttggtttgcctagaaccacaggaatgtatgactcaatttgggtcgtggtcgatcgctttacaaagtcagcacatttcttgcccgttaaggtaacctatacagtggatcagtatgctgacttgtatgtgaaagagattgttcatcttcatggggtaccgaagtctatcgtttcagatagagaccctaaatttaccttaaagttttgggtgagtttgcagaaggccatgggaactagtctaaaattcagcacgacctttcatcctcaaacagatgggcaatttgagcgaactattcagatacttgaagacttgttacgagcttgtgtcatggattttggagggtcttggagcagatatttgcctctgattgagttctcatataataatagctatcaaagtac

SEQ ID NO: 336235 - DNA, 1034 bp, Cannabis indica
atccccatcaccaagagaaaaactttcagagaaaggttttgatgcaaattggaagatcatactaataaagatcatataaaggtcgattctatggactccggtacgcttccgctattccttaatcttattgtttgtttctcttgaattaattagggctatattcagagtttacagtattctaacacaatcattttaacctcttccatgctggtgatactagattttttgaggaattggataggaatcagatttgctttatcatttatgttgctgctcgcaagtcgagctaatgcatcaacaattatgttttcttcccttggaatatgtttgagaacatagcttttgaattgtgcgagcagatcatgtattttgctcagatatgctatcatcttttcccccaagcctcgtactctcgagatacatgatttaccataactgtgagtcactacagatctcaatgtgttcggctttcatctcccgagcaagtcttaggccggcgataagagcttcatatttagcttcattattggatgccttaaatccaaatttgatcgcagtgtgcaggtgttgcccccaggtttgacaagggcgattcctgcgcctaacaactgattcatagttgacccgtccagatgtagcttccaagtcagcttgtcttcactattgttcggctgcggtacttatactggctctgggttactttctgaagtgctctcttcttttcccgtacattcaaccacaaaatctgctaaggcttgtcctttaatcgttgttcagggctgaaaaataatttcatactggcccaactccactgcccagttgaacaaccatccagaggcgtcaagtttttacaatacttggcgtaatggctggtcagtgtacacccgaacaggatgagcttgaaagtagggccttagctttctcgttgttaggattaggcaataagtgagcttttctatcaatgggtaccaaatttcagcttcaatgagtcttttgctgatgtagtagaccgggtgttggatattgttctcttc

SEQ ID NO: 336236 - DNA, 394 bp, Cannabis indica
taaaataatttccaacagctataaaacgagctttggatatttatcatagagcctctggacaacttcttaatgaggacaagtctgttttgtctttttctccaaatactccatcctcaatcagacattctttcagtcaaactttgggaatgccaatcagtgaatgccatgaaaagtatttgggtctcccagcttattcagagcaagataagaagcttttgtttgcagatattaaagagcgaatttggaaattgttacatgcctggaatgataaacttttttccattggaggaaaagaaattcttttgaaagctgtcgtccaatcaatcccaacttatgctatgagttgttttaaactttctaaaagtttttgcaatcaattggactctatgatggc

SEQ ID NO: 336237 - DNA, 809 bp, Cannabis indica
tgttatgcgattattgtgcgattctgtccaattaattagattttttgactgtatttgcagatggctccagaactcattcttcccttggctgagcattttcctgggcgtatcacttacagagggaatgggtactttgcttcaattaaagcaaagtttgaagccttcaacttgaccgagagggtgaaggaaactccttttggagttttttgaatgcgaatgaactgaaattctccaggttgattgtgcatcaactgctgttgaggaaaatgaagttgagtgaggtcaaaaatgatgaagtctggttttacatgagtaaaaccgaggccagatttggaaggtctaagtttggattgatcactggcctgaagatgagcggtggcccctcgactgaagaattgactacactatgtgagtctgatcggatattgcgaaactacctcaataatgccaaacgggtcactttcaaaaccctttggctagcttttgaggcgtgcgatgtggccgacgacgtgtacaagctggggctgtgtgcatttgttgaaggtgtgctactatcaagggctgagggtgtttatatatggtcggatatgttgaagttagtagaaaacgaggagaagttctttgaatatccgtggggccttctttcttatcagaagttgttgtcatccacagccaaaagtatgactgacctgaggaagaactacattgataaatctactaaggataagaagaaagggaaaatgagaaaaaaattactcaacctgaggcgaagtacaatgtctacggatatgcaccggtgctacaatact

SEQ ID NO: 336238 - DNA, 521 bp, Cannabis indica
ttctagtcaccctcattagtgacgcgcattgaagtgttactatacacttttggagttactcaatgtgtgtcattaaaacccaattttttagtacaaaaaacagctacttttagtgacaactttttagtcacaacataaattttttgtgactaaatgtgacttttggtcacaacaaaaaactacttgtgactaaaacatagtatttagacacaaattgtcactaatttacttttagtcagaacaagtattgtgactaaaaaccacatttaattacaacaaattgtaatttttgtgaccaaccacagacattttagtcacaacataggaatgatagttaataattagtcacaacttttttacttttagtcacgttgtgactaaaaataagattttttgtagtgagaagtgactcacattgctaatgtgtaaaaataaaataccatatctaaaataaataagctacacttctcataatcaattaattttaagatgaaaatatatactgttggaatatattttac

SEQ ID NO: 336239 - DNA, 655 bp, Cannabis indica
gtctccatagtacaaaattgtaatatcccgatactaatggtaaataatcaggtttataattatattgtgggttaaatagataataagtgggattatgattctactaatctagttcaacataaattttaaatttgctataagtggataaataagagtaatttataaattacgaagatttatatggtatatgtgaatgtaatatgagttatcgctgtagtaaaaatattttcagttttggcgaccttagagactcaatcgggggccaaaaatatcatagcaggtttaattgatataattgatggaaatatcgtgataagttgataatgtaagtattagagtaattaggagtatatgaaatttggcttagtgtcctagaaataaaaattttttagtggctaaaaaataataggataactattaataattatttttattaatattattatattattattattaatcttattgttattattattaataatattattaatatattattatattatattactattattgatatatcattatatatataaagcgttaacagtatatgtatgttattatattactattattgatatattattatatattagcaaaaatttacgtgtcgagacacgtatactaattttaattgctaagttttttc

SEQ ID NO: 336240 - DNA, 1154 bp, Cannabis indica
tataagcatttagttttttttttttttaagaaaagagataaaaaataaaagaatatataatttttgttatttagaattgaaaatatgtgtgaataatttatggtatttatattataattagtagttattaaatctttaattttataataggattttaataatagaataaatgctatactaagtgttaatttgaaaaattgtaagaatattgaaaatctcatacaaaacgcattttttataaatttttttgtttttatatttttgtaaaagagtaatttgcaccataaatattaagttaaactttcaaatgtaaataaatatttaattttaattttttgcggtaaaaatacttaagttatattttaagatttctatgggtacttgactgttaaatatcaaatcattattcacgtgtcattttcttatttgtatattaaaatttattttttaaaaaataataaaaattcatgacttaaccaattagggattgctacgtggtaatttacttaacatttcacaactagatacctacagagttccagaaatataacttaagtattattgccattaaaaattaaatttaagtatttatttataaccagaaattaaacttaagtatttatgcaataaattgatcgaaattaaaaaatagttaggaatttttacactacatattaaaatttctaactttttacttttttactataaggcagaattttttttcgaaaatactgtgttttttcataaatactgtggaatggcttgtttaaaacgccgtattagatcgtattatattgtattatattgaattgtattttatgtaatatttttatgtaaaattatatgtgatattaacctttatggatacctaaatatataatatttttgtataaattaaagtttaacatagtattatataaaaatatgatatgtaattcaatttaatataatacaatacaatacgaccgaatacgacgttctaaacgaactcctagtgttatactgtgtactatattaagtttttacggttgttctacagttattttttagttgttctactgttattttaattgtactgttttgttattttataaaaagacaggtgtaacagtaaaattataattttgtcaaaaaaatttataattttttaaaaa

SEQ ID NO: 336241 - DNA, 1567 bp, Cannabis indica
acgtggatataatatgagttatttgtgaaataaaaatattttcatgttcggcgaccctggagacctgattggaggctaaaaatatcacaacagttttagtcagaaatgttgatgaaattattaggataagttgatttagaaaaaccggcgtattttagggtacttgaagtggtcaaataccctagaaatatagatttcttagtggctaagaaataataagataactgataacaataaagtttttcttaatattattattaatattattattaatattatattattattatattatatctataaatgaacgtataagtttatatatattatatgtttttaaaaatagaagaagaacgaaccctcgttctcctcccttcgacaaaattctctttttatatgttgacctcgcttttggcaaacgatagtgagtcttgattgtaagcgacaagtagtataatatatatgcaatataatgaaatgaataaagaaacaagagttttatagaggttcggccccgagcagttcggtaatagcctactcccttcgtttgtattgagttaagaacaaagaatataatgattccttttcttagagctcttacaataatatctgtgaatagaattgttagataagttttttcaccctttgcccagtgagaatggatcactatttatagggctttatgctttgagggaagagtttcccttatgattacaatagatataattgacaagattacaaattaaatacagaatacactgataaaaggatttggatagcttgccatatctcggtgatatgatccaaaaattataggaatttctttagtgattcacgatgcgagtgttgaaggggctaagtgttggcgtgcggttcggactactcaccgccgggttaagaaggtttcacccctgcgaatatatgtggtgtttgttcggcatagctcttgtgaacagatatgtgaagttgattccacgtgtcaccatcgtgtgatgtcacgttagagtttaaaaattgggataacatttgccccccaagtctgtacgggacttccgaagttgcgtgtagacttcatccgaacgtcctttccatttgagtgggtgacacgtgttaggcgtgtctgttcgcgatttgatgtgaggctgaccaagcatctcttcagtttttggctaattaatgttctgacttaattagtgcttcaaaaccttgttttttctcatcacgtttgacggttacacttgattacatttgatttcccaatattttcttttgggagggaaccgatgcatctaaaggcatttaaaatgattgcctttttcacttctcagcctataaatagggttgagttttcttcataactttacttttaccaatttcttcactaaacaaaactcacagcaaaaagggtttttacttcaagtctgccgtgagatttctaccaaaagcatccgagcagcccagactcgactgaacttagacgtcgaacagtgagtaagttttcagtcttcttctcttttaactctgcatgtttaattttagggttttatacatgcgtttttgacttgtt

SEQ ID NO: 336242 - DNA, 694 bp, Cannabis indica
ctgaatagaacaaatgttagaagtgaaagagagtgtatgatgagaattagctaaataggcactaacagagagtaaattgtattgaaattgaggcacaaagaggacattgtgtaataaaatgttagcagtaagtctaacagtaccaattttagcaatattgacatttgttccatttgggagagtaacagatttattattaggtgttgctgtaaaagaagaaaaacaagaagtgtgacagcaaacatggtgcgttgcaccactatcaataatccaagtattgggggaaagaggatcgaaagtacctgtaaaattgtttattgcagcaacatccgatgttgatgcatcagttgtaggttgcatggattgagtgagtaaagaaatcaactgttggcattgtgctggtgtgaattgtgcttgctgtgattcattctgagagcaagatgcttgcatggtttgaggaggcattcttgagtgggaaccattgtcagacttgcggttgtttgtatgtgttggttcatttgttcttggttttccataaccagggggaatccatgcaagaagtagcatttatctttgtaatgccctggtttctggcagtgtgtacagtggggtcgaggccttttattttttgatgtatggttagccattgtatcagtagatggtggggtagggtggtagtggctgctgcaattgt

SEQ ID NO: 336243 - DNA, 696 bp, Cannabis indica
aactgaaaaaagcccaaaaaaattacctctttagtttaatttaatatttttaatttttactcatttttttcaaaatttattatgtttacctctttttttaatcattataacaattttactcttattacttcacgataattttcattcttttctaatcaaaatcttacctcaactttttcacaaatctacacatccatttacaaataatataaatatattatgtttgaaattatgtcttaattatgtaagtgtgtgaggataatttgaatacaatacttataaaaaaagatatatttaaattaatttttatttagaagtaaatttgattaatatataaaaaaaagtgagtatttttcaacttttcccacgttattttatggtggtgttgggcaccgtagtacctatacaaatgaaaataatagcaatatttatacaaaggattatttactaaaatatgaaagaaaaaagacaaaatttaatatatctttatatattaaaagtgtctatttaacgatatttcttggtttaatttcttggtttaacagaatataccttaaaaataaaagaatattctgttaaatttaacgatgttaatacgtttgatcgttaacaaataaatccaataattaaacccaaaaaattaaacaatctttttttaaattaaaaaaaatcatcttagccacatatctctaacaa

SEQ ID NO: 336244 - DNA, 1448 bp, Cannabis indica
tttaaagacccgaaatataggttaattataacctaacaaaccacaccatgtaatcctcaccaagatccaatcccatgcccttgagcttttggtaacaacccatgagcttgccaatgtgggctctaaaatcacccgtatcagcataattagtgcaatggaacaaagttaagcactcatgtttctcattctttgagaaagcactcatttttctcattctttgagaacttcttgtacttttccttaatggcagcaagaaaatcctttacattttcaatctgaggaatactatcacaaatggattcatccatgtgatacctcataagcatcaaacaacaacgattggaatgctcccaatcctcacaggatttcttatcctttttagtggcatcatcagcaagtttaggcgttgtatccattcttaaggccaaatccactatcataagagtcaaattcaacatgagagattctacccactgtttgtggttggttccattcagcgtcaacatagcagaggttcttggaatacttaaagctgaatgagaaacaagagcaataaccattaaatgcatgttataatagaatcatgtcatttgtgctctttttcttataaataaatgatcgcaaaatagcaaatgatcatcatgtatgctagagttcttagacaaattaataaagtaaaactcatacacaggtaagaataatctattaaatattataatcaaatacattaatttactatcgagaggaaatataaattgtaattcataatatttaataaattttcttcaccatattaagcatccttagcaagtaattattatcgataggataattaattacttataagaatcttaatgtaatttagaggaagatacaaaatttaaataaattaatatttaaatgttcctcattaccaaacagttcatatgcttactcttgcaatgggcaagaaaataaacaataattgttgttaaccaaaaatttatgcacaaaagattaaatataaatacaatttttttattaaaaaaaattcatatgttgatcttgtgcatgatttatccatccacccctcatgcgcccttgttgtttttttggttcagaaaacgacatgtcatttttgccaaatgacatgtcgtttcagcaaaaaacgacaaatgtgaattacacgtcgtttggcgcgggtcatccctgaccttggaaccggtgcgcgggtcgacgaaccgggtcgacaggacctgaaatcagacccgcctgaaaccgacacatccaaccaccgtttttgttggattttgtgggggttttcttccatttctaaccctctatcaatttccaacatccatttcatccatttttcacaaaaaaaaaaacattacccataaaacacaaattcgaaaatgggtttccaccattgataaactcaatgaaaaacttgcaatctcacaataaaa

SEQ ID NO: 336245 - DNA, 1300 bp, Cannabis indica
agatatatgtgaggactataaagatcttcctgcgaggttgtaaagatcgattctttactctgcgagttggtccggatgacccaacagcctcgacaacctgataagaactcgcatgtcttaagttgtcaacttatcgcaggatatccttatatgcgactcagacagtacgcagacatctcagactcgactggtcttgcacgcatcttaagcctgcgagaatatgaacagacaactcgtactatagaagtcgcatacgttgttgtatttagtgaattaggccgaaactgttcttcatttactgtatttacgttttttattgatttaaatgctatattcaatgtacaaacagattgataatgacttcaatctctgtgtaatcaaaggacacttgctttgtatataaaggagtaatccaacatgaaatggacaagacagaaaaacccttgcaacagtggactaagcagaccatgatctgactgaaccactatacttcttttgtgctctttatatttctagtacgtctgtgtatccatagtttgaatactcgccattctaggttgagtactcactcatctctgcttgtattcttaatttattatttattttggtgctgtctaaattcctccaccaacaattatataacaatataattattcaatcatagttaattcattctaattagggttgctaatccattttactaatctcgggatttacaattatcccctccttagggttgcctcatgtcagactctaattcccaggtcacctattcgaccttactgttcttccgtaacacttttactaacgccagtgttttgttcctcagaattttctctcttctatcgagtatctacactggttgttcttcatatgacaaattgggctgaagttccaaagcttcataactcaaaatatgagatgagtctgacgcatattttcgaagcattgaaacatggaacacattgtatacagctgctagcgcttggagtatagccaatatgtacgccacttgccctatcctttaaaatatttcaaaaggtccaatgaacctcaggctaagttttcctcacttgcaaagcattttactcctttcataggtgaaatacagagaataccatatctccaacctaaaagtcaatatccagtcgctttggatcagcataactctttttcctactctgagcaataagcattaagccctaatcttattaattgcctcacttgtcttctgaacagcttcgggacccagaaactttgtctcacctaactcatctcagtgaataggtgatctacactt

SEQ ID NO: 336246 - DNA, 1365 bp, Cannabis indica
caaaattatgttcttgacaacaaaattgagaacttttttacaagttatggaaactagaggtttagcctctgtccattttgtgaagaagtcgactacttctaccgcatactttacgcctcctcgccctttgggtaatgccccaattagatcaatttctcatattgcgaatgggtatggcgaggtcatcatcctcaattctgttggtggtacacgaggtatatgtgaaaattgctagcacttgtcgcatctcttgacaaattcatgcgtatcttttttgattgttggctaatagtatccttgacggataatcttctttgagaaactatgccaacctgcgtgatctccacaaaagccctcatgaatttctttgattatttcattggcttctgttggtaacacacatcgtaagagaggcatagagtaacctcccctatacaattttccctcgatcccttgactacagtatagcgaggtattgaacacaagagtttgcatgctttggtttaatctgtaggaagttctccgttgagtaaatatttgaatatgggtgttatccatgttggcgagacatatatcatctcaacttcttccttttcacatatacttgggtcgttcaaaacttcgatcgatactagatttaacttatcaatttcattttgtgagaccaattttgccagtgcatcgacatttgagttatgttctcttggaagttgttcaatcttaaaataatcaaacttctccaagttcttctgaaccttctctaagtatttagccatctttaatccttcgcctaacactcacctaaaacttgattcacaatcaattgcgagtcgctataacatataagattcttaacttttaatgcttcaactatcctcaagccagccaacaaagcttcatattctgctttgttgtttgaagtatcaaattggaatcttaacacatagttgaatttaaagttatcgggcgacatcattattactcctgcccctgagccattctcattcaatgctccatccacatataatttctaagtttttgtatcgtgcttgacgagtggtcttcttctgtgattatcccttcaattagaaaatcgaccaaagcttggcttttgattactgttcctgggtggtaggttacgtcaaattgtcccaattcgattgaccattttatcaatcttcctaaagcattaggtttttgataaaacttgtcttagtggttgatcagttaagacttttaagggatgtgcttggacataaggccgtagtttgcgagatgaatgaatcaggcatgaggcaagtttttcaagagggggatatcttgactctgcccctagtaactttttactaacatagtaaacatgtt

SEQ ID NO: 336247 - DNA, 617 bp, Cannabis indica
attcttttaataaatccctcaaatgaaaggggggttagcccctaacactaaacaaacaatcgaatttttccacagagcagcctcactttcaacctcatccacatctaatttagcaatcaattgatcccctactttcataggttcagtaaattccagtcgggtagaaggggtgcaaacctgatttgatttgaatttactccagatatctttcgatttggcattgaaatctgctttctcaacttcctcagcccagctcactgacttcggcgagacaaacggaccgtcgtcaactggatctccttccaagttctcgctcgagtcgagaaaaatctcaggggtaggctgttcgtcattctcgactggggcaggctgttcgtctatcgtgattggggacggagtagcttcagagacattatcttcggtttggatcgaagggagatcggaggtattctcgacatcagtaacgattttggcaagcttcgaagtcgcccgtttcttcttcgccatgagaggaagcggaggacttcacacgcttctttagttttcttatagggtttcattcttatcaacttatttatttattattttatgttttttttattatattatttatataa

SEQ ID NO: 336248 - DNA, 850 bp, Cannabis indica
ggtcaatatgtacattgttggagaaggcagtcacctcatggcagctctaactttgccttgcccttacctgcataacgtggcacccgtgagtcacaaggactcagcaagaaaagcaataataatgattatatagtttattatttgaatattatcatttatacacaatcagaatcaaaccattacgcattgttcataagatgaaagccaaatcactactggcatctgccacgaataagcctcagtatacagatatctggttatacaaaactattacaccaataataggaatcatattcatataaaaataaaatttatatatatgttacctcataaaaaaaccatcttcattgcattacattgcctaataaggcaagtcgatgctttactgtgaaaatcctatattgcattgcctaataaggcaagcctgtgcaattgcctggaacccatatatcgcataactgcaccacctaatcaagtgagcctatgccaaaaacctgcacccaaatatcatataattgcatcacctaatcaggtgagcttgtgctacaatctggcaccaatatatcgcatcgtctaatcagacgagcccgtacctatgcccgatacatattgtatgtcactaacgcccgtacttacacccgataatttactaggaaaattacatcacctaattaggtgagctcgtacctatgctcggtactcatcatatatcactgtcgcctgtacttacacctagtacgtcgccaagaaaattacatcacctaaccaggtgagctcgtacctacgcttggtactgacactcgtacatacgcccagtatgtcgccaggaaaattgcatcacctaacaggt

SEQ ID NO: 336249 - DNA, 690 bp, Cannabis indica
gccacaatttttcaaaacgaaatcggctgcgtctttttcttgctgaactgaagtgccgattggtgtaaccatgactgaaatggctcggtggtctgagctaaaatagtccaagtgatgcaccgtcggggtgctgaaagtattgtcccaaagattgttaacaaaacaccaatctaacctttctttaatagtattcgaagccaaacgattcttgatccaagtgtaaggttctccctcaaaagaagtttcatgaagtgagcaatgatcaagagctttacggaaggtctccatttgtttttcattacgaaggctgccaccagatttattagaattggagataatttcattgaaatctccaattgcgagccaagggagagtcggtgcaacatcagccagtcgtttgagcaaagtccaagaagcctctttgttgtgagcatgtggagaaccatagaatgcagtaaagtggaggcaagggtcactgccacttttgaggtagcagtcaaagtaagtatttccaaaatgaaggagattgacatctatatcatcttgccacagaagaagtagacccccactcattccaacacgaggagactcaaggccattattgaattttaaagactgtctaaaacgagtaatagaattggtaggtagtttagtttccatgagaaaaagaacatggggcgattgttgttg

SEQ ID NO: 336250 - DNA, 575 bp, Cannabis indica
tttttttttttttttgtcattaagggctcatttgctattctattatctatatataataagccttccatataggattaaattggtacactatcatgtttgaggcatgaggtgtaatattgcatgtatattgtattaagaataatgatcaagacacactcaaattagttaatgtaattagatttgtatgtaattaagggttattaaattaagcatttttatctaccacatgtaattgcactaaattgtataattggaaataattatagggttccacctcatattcaaatatactattttaaaatataaagcaattattaagttgtaccaccctaaaaattacaatacttaattacacaattacttctaaatacaatcagggtgcgtttagaaagccacaatgtaattggatttgtgtgtaattggaggtaattacacaatttggcatgtttgtctgactatataattacactgtaactgtgtaattggaagtaattgaggggttccaattacactctccaattctcatggccccccatgagaattgaatgtaattacactgtgtaattactaaaaac

SEQ ID NO: 336251 - DNA, 1199 bp, Cannabis indica
tctttaatcctaatgtcaagctagcaccaagaagaccataataataactttatttcatcgtcaaattctcattctctccctattaatttatataccaaacattaattaattgatctcacactcacactatatcctttttcacatcgttcttgcactaagcatatatttgatagagaagagaagtgggaggaaaaagagtatatgatagaaaagtggaaataaaggaaaaaaatagtgtttggcaagaaagaaaaataaagagaaaagaaaagtggatagaaaaaatttaactggggcaccaaaaattttctcctccaatttggagagaaaacttttataaaagaacaaaatacaaaatttataaataatttataaaataatttcttttataaataatttaaagataatatagtaattttagaataaataaaatttctttattttcactgcaaaaaatagttacattttttaggtacaatttattaattttttatgactaaatgtaattttttgtcacaacaaaaagttacttataacttaacatagtatttagatacaagttgtcactaatttagttttagtcacaacaagtattgtgactaaaaatacatttagtcacaacaaattataatttttgtgactaatacttttacccacgaaaatttttatcataacagaataataataatttataattaatcacaattttttaacttttttatagtgcttatactaacaaataacctaaacagaataaacttcctatatttctattaattttccatctctcctatattatacttcctctctattttctttctttcttacccaatacaaagtaaaatatatatatatttaattattatacatttccatttaaaaaaaaaaaaaaaaaaatcattatacatttaactattttatattttttttagtagcaaaatctcattaactttacttatgtttgtaacggggagtgccactgtgtatgtgtacacgtggcatatatttgcattagcccaaattatttgataatttaaatattataaaataatttttaaaaataaataaatataatagaatactacattattaaaaaatatatttcaaaagatattatttaaatgcggtatactatataaatataatttaatagtgtaaaaaatttaaaaataaaaatactaattattcataattataat

SEQ ID NO: 336252 - DNA, 932 bp, Cannabis indica
atgttagtttgtaatctctttggtatatcgaacctcatgacagttttggaatgtataatgtgtgaatttttgatagattttggccttgttgtgattcttgacactttgatccgtaaagaatatgaggtagacattcgagttttgaaagaaaaacacacatttggattcaaaactaacctttgctggcctgagagatcttgcttgagacctagctggccttaggatttaatcatgggaatgggccagctctagtgtttcaccctataaagctagtcgtgtcatgcctaggtttagtgaccctggccacttcttggctgagtcataggaccctggccaccccattcaaggcttgggaaccctggccggcctgggccttggttctaagcaagtggctagctttctgtcctcttttgactttggcaacaatcttgttatggccctgcaggcatatacaaccttaatctcatacatggttcccttagaaactttgtatgaaacttaatggtgagtctattatagtcgaatgttcaacttaagactcaacatttgttcaagttgttacacttaagacttgtactttgctgatatccagcttgtacgctaacatggtctagcaagtacccttaggtacgattgcccaaagtttaatctatggcttagaacctgtaaggaaatctgccttagtcgtagcccagtacatggtccctataggaactctatctggttctttttggttatatggatcttgtaaggccttggccttatgtatgtgaatcaattcatattcgtatttagcctcaaggctttcatgttcttgcttttggcctatagaccctttgttttttaacactactagcatttggccttaaatccttttatcatggacatatgatcatcctagctatctttttatggccttgacatgtaagtat

SEQ ID NO: 336253 - DNA, 701 bp, Cannabis indica
atagtgaaatagaactgaattttgatataggacgaaagtacctgtatgatttagatagcttataggatttctgtgtttaatgcatgttgcatgtttaatttatcacgcgagtagaaattaacttgcatgtaattgagatttatatatttgagaagaatataaattaccttagtaaacctgctattgcatagaaattggtaataggaagacaatcatattaggccataatcaatagatacaattgaaatcgaagccctaactttaatcatcgttaatttcttttttgatttatttacttcttaatttcactgtttctttagtgttttaaatttaattttctcttaattttgacataaccaaatagaaataaatgtttaattttaaagtactgaactacaattcttgtggcatcgacctcactctttgtgagtctattacttgtttacgatacgtatacttgcgtgcaaaataccacaacccaaactaaacatttactcgtcctcgagtaaaacactgaaacaaaaaataaaagttaaacaagtcaatctttagaacatgagtaatttttaagtagacttaataacaagattatgaaaaattttaatcatttatctctatcaagccaagctcaaaggaaattatcgtttcacttctaaatacttgtagaagctatagattttatatctatgatcaacgctccc

SEQ ID NO: 336254 - DNA, 611 bp, Cannabis indica
tgattaaaaaattaaaaaagaaattaaaattttaaaactaattaagcaatttaaaaaattatttattttcttatcaaaaaatctattttgatataaaaaaataaattaaaaatttaatctttgtgaaaactaaatttaacgggaacaagtttgaatctatttttttctccaaaaatctagatttgtttaagtaaaacataatattcttttagtttaatttttaactttttttccgaataagaaattttatatttttattgaatttttaattatttatttattaagatatgagtttataacgataaataagtttgggtttttcatcaaaaaatattagtttgtttaaattatttattagattctcaataattttggtgtgatttgtagaatacatgtttataaataaaataaaatttaaaaatattttttaagaataataagttttttaagtaaacttaataaatttttaaattaatttagtatttttatcaactttttaaataattttaattaattttttcagaattaatagaacattatagtttttaaaattatttttttaataaaaggggtaaaaaaattaatttttaacggtaaaagaaataaaacct

SEQ ID NO: 336255 - DNA, 1033 bp, Cannabis indica
tatgactcttggtcacttataattctttgcaagtatgctcttttgtctgttcggggttttgggttcgacgaaaccttttgtatgcactggatggtaaattaacaacatgctagtaaattcgattaatttgaattttgaaataaacatgtttattcatttattgatcgaaaaatatgtttgttaccgtagtaacttacatctaagctattaacttgatataatttgatctttagcgtaacatgaaataaaacaaattgcagaaattataaattgtactttagatggtggtcacccaacctaagtactttgtaattttgtctgaacctttgggtgtggttcgcccagaaggccattcacttaaaagtaaatgttctttttgtttagtacttgatatggtcatccgacctggtacttctattgatagtattttcttaaatgttccccattccaataccttggtcccagaaagagttgcattttttcatcacacttacccaatttgtatgctcctgatttgagaacttcgaccacctgatatgatcctgccctgttaggtccgagtacactgtctttggtgtttagaaatactcttcttaggaccatatctcccacaaagaatttccgagccttcacttgtttgttgaaatacaaagctacttttgctaatgggccatcaacttgaagtttgttgtggttttcttctctttgctttcctcaagtgatttgtcaaggagtacgtgatttgcttcttggctatacgtcaatgttctgtgggatggtggcttgagttctacgggcaacattgcttcatatccatctgccatggaaaattgagtatgtcaggttgttgttttctcggttgttcagtacaaccatagaacttcatgaagttcctccagctagtttcctttagcatcctcaagtcttctctttagtgtatccttcaatttctgttgactgcttcaatttaaccatttgcttggggatgcgccagtgcggagaaacttttgatgataccatggttcgcacaaaa

SEQ ID NO: 336256 - DNA, 676 bp, Cannabis indica
taaaataatttccaacataataaccctaggctattagactgttcttattagggtgataacgctaatcccggttactaaacaatcacacatatcattttcaatataagtgccactgcgcatactctgcgtgctaatcactgtcttacctgttgttctgcaataataaagattttgaatccccgggtgctcctgatcaggtgccggtaatcctagtcacacaaatagggttaacccctaatttcatattcaaaaaatattcacatggcatttaaaattcagatattaagatagagctcgaaaagatctttccaacggtatattgaactcccaaattggagtccggatcacaaagttatggctatttgaagtttgcaaaaggatctgcccagaaagaaatgagcgcgccgcggcatgctaaataccatgccgcggcacctgggttcaaaacccagaaaaacagcagcaagaacacgaaaatcagctccaaaacacaatcaaatcaccccaattcacaaccaaaactctcaaacaataaaataggtttttaatcatcataaagggagtttaaaacacatacttcatgcataaaattcacaatttcagattgtataaaacacataattcatgcctcaaactaacaatacccaatcaagaacttgagataaaaatccatcaa

SEQ ID NO: 336257 - DNA, 688 bp, Cannabis indica
ccctttcctgcacagtagagcacccgtgagccaagcacagcaagacagtaaaatatatcgttaatcatatataactcatcacataaataataatgccatttcatatttgtctgtatgacacagacctgcgtgttacactcacacgcctatttatgtctatgtggcatagacctacgtgttacgctcacacgtctaattacaataaggccttagaacggtttatctcggttctaattaccgagtccaacccgattatgccttgaacacataacctttaatttcaatatacatctatatacatcatggcataacaattgcatattaataatttactagggtaataaccctaagccaataaccgttcactttagagtaataactctaatcccggttgctagcttctcatatatatcatattccatataagcgccattgtccatatctctacgtggtaattactatcttacctgatgtcccaaaaatatggagaatctgaatccccgggtgctcctaactaagtgtcggtaatcccagtcacaatcccgacatacacaagtatatggttaatccctaaatccatttccacaaattataaaattgtcatttaaactatagatattcgcatagagcttggaacgagctttccaacgatataaaaaacatctcaaacggagttccgagtcaaaag

SEQ ID NO: 336258 - DNA, 795 bp, Cannabis indica
caaacggagttccgagtcaaaagatatgaccaagacaaaaacccgaaaaaaatacaataagctgccaaaaatagccgcggctactaggtttaaaaatccaggaaacccagtttccagccacgaaaatgcatccaaaaacaccaatttatatgctaaaccagcccacaattatagcaaactttcacctagcataaatcaaatatattgagatgaattacacctaattctctctccaacaacaccaaaaactagcaacaaatttcagccccaaaatttaaccaattcaacacaaacccaaacacaactcaagctaatcattcacccaatggaaagtacctaaataggcattaacatacataattttcatgcttaaacaccagctaaacacatcaaaatttcaaattaaacaatataaaattcaaagcaccaacttgagcaaaatcactaagaactcatattcaagcacataaacttcaagctagcttcaacttctttttttttttcagcaacgaaatatcaagcaagacttgaatctaaacatgaaaattaccgtaaaaactcacctagagctcaacaaacaaaatcaattacaaagccatacaatctaagccaaaacccataaaaattaacatgaattcaagtcacatgcatttcaagaaaataccacaaaatttcttgctttactacataaaatttttagcaataaactcaactaaaaatcagcaacaggaactacctcaagttccaaccaagatcaagatttaacaccctccaatttcaagcttgaacaccaag

SEQ ID NO: 336259 - DNA, 777 bp, Cannabis indica
atcgactggctcccaagcctcgttgtactccttgtaatttgggggttcaacctctacctcttccttcgccgcggagggactgccacgatgtacatcatcctgctcctcaatctcctggacctcagcatccccttcatgatccccctccacctggacggctagatcttgttcggcgttgggtaaagtggcgtgccgagccacttgaggatcagatgcgtcaaccagacacgtcattttctttgtacgagccatcattctatggctaggtacagggtttgaagaatgtctttcactagaggaagatcagctagaacgaagaagaggatgatcctcgtgcaaaagttgaagtaggtcctggtccattcaatgtttgttctcccaaaactcacccgagttcatctacaaaagacaacacacaagatgagtgtttggtcgaaatatcgaacactaaataagcaagtatgccgaccaggagtactcgatagaatcaagaacaagaatattcaaagagatgtcaaaacttaagaagtttaaaattttctcgagttagggaaaaaaagttcatgaggctaagaataagcaagatgaaagacagacgttacacaattcaaaaaacatacattatggacagtaaaggtgcatgaagccatgacaaagaagaatcacagaagtttctggacctaggatttcttggatattttctacagcaaagtctaaggtatattcgaaatgtaaatatgcaaaaataagcataaagggaatcataaacttactcaa

SEQ ID NO: 336260 - DNA, 514 bp, Cannabis indica
aataatttatagtgtcacaaatagcttacaattaatgaaattttttaaaagcttataaaatcaactcagcaccaccatgtgtgtatttgataaagcaaatttttttttttaaaaaaagaaaaacaaaagaaatgagctctaaaggagtatcaagtgtacaatatcttatatataaatatggccatggattcaatttctcacctacttttttttttctcagactggtcacttacttaatataactcatttattttgtaatttttttttttttaatctgatttatttagtaaatttaaactttcaggaactaacttatatatgtagagtaatatattcacacagagagtaataatttatatccaaagtaaatattatatactcacgtactaatattttatagttaagttagagatcgtcttattatatactatcactacaataaaatttatcaatagccgcaatattattagcgatgggcaaaatttgcccctaatagtggtagcattagcggcgg

SEQ ID NO: 336261 - DNA, 892 bp, Cannabis indica
ttataaaacaaattaagctaataaatgatcattgctttattgaacatggtcaaccttgcagattaactatagaatcatcacacaaagtagttgcaaaaggatacattatcagtacggaatctgtagatacaattcattgtcaaaaagttgtcaaatctctacgagttcgaatatctgaagttattgatgccgatgcgaagttaccaaatccaatatcagatgagattatcaaagtaggagatacatttggcacttttctctcatgaccagaacatttagtcttaaaaggatttgaggtaatatatatatcttaattttactacatgttagtcaattgtgtcactttctaatataattggtcatttgtagacactatcacgactaaggattaaaataacaagccgaaagaagagccaagtttcaccaatagcacctacaacccaaccgcaaggtcaagagacattaccatcatcatcatctagtgtaaaaacatcaagtatgaggcccaatgatatcaacattccaagtcactttcccaaaagtttgcttacttgggcaaaaatgacattgaagcaaaaaggttctttgacgtgcacaattacagtgcctgaggatgtctttggaaaattaccgtcacccatttatcttgatagggatgatattacacagcttatacatcttcaagaaatcagtccatgtgtcatctcactatatatgaggtaaatatatagggttctatttaatttgttcgttacttataataactataattaatatgttcaaaagattatgtagaggcctatatgacgaacttgtcaagttaaaaatttctcaacacactttgttcatggacccttcaaagtttgctacaaaaatatataataccgagaat

SEQ ID NO: 336262 - DNA, 528 bp, Cannabis indica
tatactaatcttacctcaattccgaattcaggtgtgccggtcaacctgagtggaatgaaacgctcggcggattacaggctcctaaaccgtaacaatcacaactccgataagtgacacgctaaatcacaaccgggacaaaggttttaaaaccaaacttaatctactgtaacttaatacataaaataccccaaactagcaagaaacaaactgcctgaaaacctgaaactagcacgaaacgacaagttgagaaaaaccggtttccacaccctgctccaaaatttgggtaaccagtgttacaggcaaactttcctgacatactaattagaacccacgaaacatttttaaagcaacaaaacaaagcttcatgcataaaatcaaaatccaccattaaagctccaagctttgagttcaaaacttaaacttggttaaaaatcaaacaaacatgcatcaaaccttgcttgaatctactcaaacaagcataatataacctctgaaacaacaacagtcaactacaacacgcacagcaac

SEQ ID NO: 336263 - DNA, 793 bp, Cannabis indica
ggtagttcatgtgagggggtgctgggttcagtatgtcgtacccacttctatggctcccaactctcacacaaggcccaaaagagaggaatttaaccttaaaataaataactgttattaattgaataggtccaaaaactaaatggacctaaataaaatctatcatggtgtgacattttatttagcaacaacctatatgcatctatataataaaataaacatataggctcacacaggcacacatttggatggatcctatcatgttgctaggtcatacacagatgaaagaagattgtaaaatttacctgttacaaattatttacttgaccaagggagccatgagttaaaatcagatcattggatctgtcaacaagttaaccatggctatttgcaatcaagcaataataggttttgaaaacttacaaacaagctaaaaccacatactcctgcaacaaggttagctggatagttggatgtaggatttatttaattttaaataaataaatttcgaaaataaaataattaaataaataaaaaaataaaatttaaatttttgaaaaaaattaaaaaaaataatttatttaattttattttattaattttaattttttataatttttaaataataacattatgtgtattaatataaatgtgtcacgtgtataaaagtgtacacataagtcatctacgttgaccattaactatggtgaatatatgacaccttaaatttgctaacaatttaatagtttagagagttccaccaccaaaaattgaatttggaggtttaagtgcaagt

SEQ ID NO: 336264 - DNA, 525 bp, Cannabis indica
agtggtcctactgatgctccagggaccaatgtgactggatttagcgaactataagcctaatattgcaaatctacaacatatccataggccgagtactttgactccttctgagtcgttcccttttcaatcttcttatccatatgcttcttcttttctacgaagtccttactccaagtctctttcaacaagttgaaagaaatttttccccacgggtactcgtagaaaaaagggaggtcgtcagccattctaatgataaatgggggaactagggtcttcttttctttcccagtcagaacacccatcacaaacaacaccaaacccaacttgtaaacatcatccttctcagtgcaactctcaaagacgttgcgcagtcaaccaatgttgatggatggatccctattaaagtattctactatcaaacggtctgatgttgccttctcctcaacctcagcctcagtagttccacgtaacatattaagcccaatcaccagggcaaactcaactcgagcgaatcgacatctcttc

SEQ ID NO: 336265 - DNA, 584 bp, Cannabis indica
tccaacagggacgccacgtgtttgtttttttttacaaaattcttattttatatactatataatttaacaaaaagtgtgggtaattaaattttgataattaaatacagacatataaaactgctttatggtaaaagataagtaatattaagtatggggttcccatgttttcaaagtattttacaaactagtttaatagtatttttacaacataaactttgcattcccaaaatacattcaaaatagagatcctgttcactgggccgtgccactgcggctgatatgtacattgctactacgatgctgctcaacctttgctttcccttacctgcaccataaagcacccgtgagtcacagagactcagaaagaaaagtgaataaaataatgaccagtaatattcagcaattaaatctcaaattaacttgcatacacatttacataatattgcaaatacaactcttgtactttataaagtacccctttaccactcgtcaaccacgagctatatgtcactaccgttgcccgatgaagcaaacgataagtaagaaacctatctgtagtttcaagagtaattactcgtaacggt

SEQ ID NO: 336266 - DNA, 1479 bp, Cannabis indica
ggttttatgtgtgttgcaggttttgaaggggtacaagtttttggccattgaagctactgctgtagcttgaagaaggaaggaagaagaaaggaagaaggctgctgcattttcaaagcttgaaggagaaaagaagcctgctgcgtttttttctagcaagagagaaggaaggaagaagaagaggttcggctgggtttgttgatctgtagcaagagagaaggaaggagaagaagctgctgggttggtctactgttcaaagaaaatagaagaaggagaggagaagaaggaggccggctgtgtgatttgaagagagtgtttgtgctagggttttggaaaagaaaagaatggttttatatgggaataaaaggcattaggttttgaaaatagatctgatattcaaaaagggggcatattcggttttgggaaagaatattccctttggatccgcatcaaaggaaaaagacagtcttgcccttggtttataactgttaggtgttggtgtaggggggcagttttgggactgccataatttcctacagtggtatcagagctcggggaagcaagaagattcaacaacacctggaaacaacgtcaagaaacaagaaagatcatcaaaacattgaagaagccaaatctgaaattatcaagaaattgataaaaaggaaaactctaacctaaactttgtcttgttacattcttacttttattatcttgttataacaattaaacatgagtaatattagagtggatgttgacaagttgatggatcgggggactataggatttggaggaagaagattagagctcttcttgctcataacaaattacttagggttcttagtgaacctatagaatggccagaaaatactacacaagaagaacttcttgaaactgctactggtttaatcatttttaatttgtctgatgctattatcaggttagttgataaagaagatacaccagcaaaaatatggaaaaagcttgaagatcagtttcaaaagaaatctttaatcaacaagatctttcttaaagaaaggatctttggtttcaagatgagcactagcaagactcttgatgaaaacctagatgaatttctaaggttacatattgaattggctaattctggtgaaaatgaggctttaagtgatgagaaccaagccatcatcatcttaaactcattacccgaatcctacaaagaagtgaagaatgccattaaatatggtaggacagaaattactttagaagaagtaatttcagccttgaagtcaaaagacttggagatcaagaatgagaagcatggaggttctaatggagaagtaaacttcagtagagggagacccaatcaaagaaaacatggacactacaaaagtaaaagtcacagcagagatcaccacaaaggaaagagtcacaacaagggaagatcaaactcaaaagaaccaactgatcctacgggatgctacaactgtggcaagccagggcatt

SEQ ID NO: 336267 - DNA, 571 bp, Cannabis indica
acactaaaattagagctgataacagattaaaaacacttataaaatccctaaaatcatcccaaaaacattactcaagcatcctacatcaatttctaacgcaatcaagcataagatgtaaagattacaccaatatcatcatacatgcataccaagaacatcataacctatttttcatgattttgaacagtaaatttcagcaagagtttcaacaaataaaggggttaagaactacctcaagctccaaactaagctaagcacaaaacccacaaagaatccaagctttcaagatgatttttccaacacttagccaattgaaaatatggagaaaaagtaggagagggggttcggctagggcagaggaaaaagaccagaatttttctttctaaaatccaaaataattcttttttgttgcaattaaaccaaaaggccaatttaccttcccctagggccaaataacacataaaagcattccaaggatgacatagtcatttccaacataaatattcccaattaaatttcaaattaatgacacttaattaaaatgccaataaataatcccaaaattatattt

SEQ ID NO: 336268 - DNA, 728 bp, Cannabis indica
acatgaaacactaatcaagtttctactaaaattttgaataaacaaaacattgtctaaaactaaatatttattctaaaacttgaggcgagcttttcccttagcttggactgatactaatttgccatttccaactttgggcttgaactcccctggatttagataatcccaagtttcaagcagttgcgatgaagaacaaacatagttagtagatccagaatcaacaatccaaatagatttgtcattctctaaaacacatgattgaaaaataaaagtgttaccttcgttccgattgtctagaactctgggacatctttcttcatgatgtcccttctcatcacaatacaaacatagaagagtacgactgtctattgtttcagtatttgaacttgaagaagtagcattgttagaatcattgttctcaattaccctcttcctatttagcatgtttgtaaaactaaggggtggcctccttgcagccaaactctgtttgtaagcacgcaattctgcgtccagcttgtctacgttggataagttaaaattgttgatcatgtatgatacaacaaatccattatactcaggtggaagactattgagaacaaattgaacccattgttttcttgataaagcaattcctagcaattttgctttctggaacttcagaatcatcacaatcaactgtgacttaatgctcttaccaggagacattttcatgttggaaattattttac

SEQ ID NO: 336269 - DNA, 681 bp, Cannabis indica
ctgaactaatagagtttaggtgcgagccattggagattacgtaggtataccctaggacttgtggtattgaatataagcaggactgccgagttagatcggtggttgttggcgagttcagttgttatccaccagtacgacttactcgcgaagcatctgaggagccagtggcaaggccagtacgagtggctcaattgggataggcgcttagagcctcgaacacatcagggctggagccattatccccctgcaagactatttcaaggacttcctaaaccatctcgggcttgccccattccaattgaatctcatttcatacagaatcctcacaagtttgaaggttttgtataaaattttgaatttggagtgccccactccccacgaaatagagtatccttactctgtcaaggctgttcctgcgaggaagaatgcagcatggggtttttactaccttgggactcacacaagcgatcgtaagatcattgtggattttccaaataaaactccctttaaagatgaattcttctagacgactagtctttctccaattggcacaaccacctttcacataatacatatgtgatttctacttaagacttgtttaaattattctgtgtcttttttctcttggtttgctaactttaatttttcttttgtattcgatagttgtctcgaaaagaccag

SEQ ID NO: 336270 - DNA, 719 bp, Cannabis indica
tttattttttggtaactacttctgtgttagtccggaagtaacgctagtagttaattcattattggtacaatgctaaaactatatagaactttccatacactgaataactatctttcctacaactttaacattcagtagcactggtagagttagagatttcagatcggtttttacatttctccaaaatcactgctccacccctagagtaatcaccatctcatcagttgactttctagcatcaaggcaagcctagaaacctgatttggtgtagtctaagagtattaaaacatcacccttatcgactaacattgtaatgccctaatacttaggcgcgctacaatgatttttcaattacagttccacctttgctaatcaaaggatttttcttaatattgtgtcaaattaaaactttcaatttaattgctaaactttataatcttttaaacatttatttacaaaagccaggatcccataactaaacttttacaacattacaaaaatttatttagttttgttggacagggactaaaaaataaaatccctagatgtcccaagaccgaacactccaggtcgcaccgccatgacatgtacaaacaccatcctagctcgaagctcactcctgttcagccttagcatttcccttacctacacatggaaatagcaactgtgagtcgacagactcgataaaaaaagaaaataacaaatcatataatatcgac

SEQ ID NO: 336271 - DNA, 757 bp, Cannabis indica
tcaggaaagtttctaggatttatcgtcagccaaagggggatagaggcaaacccggagaaaattcaagccttcctgaacatgccttctcctaagaagcacaaagatgtgcaaagcctaaccgaaaaagttgctgccctgaaccggtttatttctcgatccttggacaagtgcattcccttcttcaacattttgaagaaatgctaaatatttgaatggacaaaataatgcaaggaggcattcataaaattaaaagaacacatggccaaacctccaatactgtcgaagccagttcttggagaggacttgttactatacttgcctatctccgagaatgcggtcagcgcagccttagtccgggaagaggaaaaaacacaacaccccgtgtactatgtcaacaagcatatgataggggcggaggtacggtacccagtgattgaaaagctagttttttgcctcctgatggcttcaagaaagttaagaccctacttctaggctcaccctatcaaggtgttgacaaaccatccgctccggcaagtcctgcagaagccggaggcgtccggaagactcctcaagtgggctatggaattaagccagtttgacatacactacatactgcgcacttctacaaaaggacaagcactagccgacttcttaatagagtggaatgaagcagaagctagcgcaaatgtactagtgccacaaaccccagcatggaaagtattcgtggatggagcgtctgttaggttttatgccctaa

SEQ ID NO: 336272 - DNA, 1029 bp, Cannabis indica
acactattgacttaggtggatgaggaggaggtacttccgtgaggaagcagagaaggcaagaagagcaatgggctcttcctgaggaagttgaagaaggtgaagagagcaagaggtttctctggtgcgcaaacgcaaaggcaagatggtagctgaggagacacctaaacggccgcggagggtggacactccggccccgagccatgattccgggatccctcccgaggtggaggaatttacagtgcctcctaacattgtgttgactccggttcccggagatgaggcgaggcaggagcttcggatagccaagtacaattatgcccttgacgagtactcccgggggcatgctgaggtggaggccttgaggaggattttgcgagaggagatgcaaaattcccttaacgatcagaactaccagaacccgtgggatctaaacctggaccccctgacggactggttcaatcgtttcctcgggcctaccttggctccttttgccgcggagatgaccgacgagtacgtctcccagctaacccggtgcgcgcctaagcggttcgctgcttgtgcatccttgaactccgtctttcaagttcaggatctcagccactccttgaccgtggtaagtattccgtgatttacttcttttctcattatttttcttaaggcctttactcactcttgcttccttttccagcttgctgcagaggccggccgcctttccaaaaacatagttaatcacggcttcgtcttgtccgaatttgggggcatagacgaagtcgtgaagatcctgcaggacctgtctgctgaaaggcgggcgttccaagaggaggctgcgcggcgggaggcccttgctaaggccaagttcgaggaagaggctaagcaaagggaagcccaagcggaggcgatgatccgagaggaggtccttcggagggataggctggaggcaaagcaccgggaagcactgagggcggagggcgaggttgttgccaaggccaaacgcgagctccgggaggctagggaggccttagacgaaat

SEQ ID NO: 336273 - DNA, 814 bp, Cannabis indica
taatcttataagagtgtataagaaaattaagattatacgatatgaagaaaataagtcggtagtgtattaaagtattgggaatctttaatatagaactgctaagtacggttcactatgtactatacttctagtgtgtgtaattttgatttggatcacatatgtggatagacatgaagtaaaggtgttgtgtataatttgattatgcatgactgggccgataagtaataaacatctttcaataacatgttgtttgccatgaaagagttattcatatcacaataatgatcattagtagatcatcatgagtcctgagtatacatgaactcctgtttgtgttcattgagctctttgattcactcgttaaattttctcagaaaagatgattcttacaacttctgttttgggaacttaataacatgagtgattgggaacatgttatacaatagtagaatctaagctttcctaacatatcagatattagttctcttatagtgttaattctaagagtgctaacacttagatccaaatctataataagttataaattaactgttcacattgaattaatggtacataaagaatcgagagataattagaagggtaaaatggtaattttgaccaactctaattatgaactcataattgaagggcgaattgcttatattgattatataaatggactacaagtaagaattctgtaaatagaattttgtaaatataattttatattgtcaaagagtgcaattccatatttatagtggagtaataatggaattaataaactaaattattctattgacgagatcgataataa

SEQ ID NO: 336274 - DNA, 714 bp, Cannabis indica
aactttaaatttaacacaaaaaagattaactttaaatttaacacgaaaaagaacgaaaaaaatctcaatttatattctatttgttttacatgaagtagaggatgatgctcatgaatatgtatatgttgttatataaaaaaaaaaaaaaatgtatatgtattatgttatgggggtataatatgatatatttgtataaattggaaaatatatataataaaacttatcgcatccgtgattaaactaaaagaatttcttagttttatctatggagattggattgattataaattagggttttatttttaggaatattaagggagtagatgaccgatttaaggagaagagatggagataagtttatgaaaaaaaatctaaagaagaaatagtaagatgaagagaagaaaaaataatggttgcgcttattattgaggttggttgaggtggagaaatgaagagatgaagaaataaagaagagaagaagaaaaatgatattggtggggattggggctggatgtttatgttgtatttaggtgaatatattagtcatttactttagagttatttgcggcataacctcctaaaggggtcaggtttttgcaactaacgccctaatctaaaattttggtggtaaaatctcctaaacccaagttctgttagcacttagccccttccatccatttttggttgttaactgccatggtggaatgtccacgt

SEQ ID NO: 336275 - DNA, 914 bp, Cannabis indica
ctatgatgacatcactataattggaaataactatatgttaataatttaattgaacatatatattaaacatattatagtgaaaaaaaaacgtgtgaaccaaaaatatgataatgtcaaaatgtgatttctgaactttattgataataaatatgattacattaaaatattttgaattagggcataaaactcaacaaactctcacttgcactaatataaaactaaaagtataatttaattaatctcttgttttttatgtgtttatctaatgttgtatatggtggtatatttgtaaaaagatctgacaagctatattaagtatcaaccttctccactgtaatattttccttattcatgccttttatctcttcgggattagtaggacattgttggtacgctagatgtatgccatggctagaagggatacgagctcttttgtagttagtcatggagaaggattctagcactttatcaatgtatgttgcctgtgagagagcaagtgatctattcttccagtctctaataatttggatcccatgaacataactagcttcacccaagtttttcatttgaacttagtgctaagccattcctttacgtcaaacattttcttaaaattttttcaatgactaagatgttgtaaagaccgcttagtttaatttggaaattagcagttaattatgtttaattatgaaaaattatttatatctatttaaataattatttatactgttattgttgaattctgaaatgcattttatgtcatttagtgattttcataattttacattttcggtgcccgataacatggaactcggtgttttgctcagtaaaatcacaacttagtatgttagtatattgggacggttatttagacattgggaatgtcgggattggccgcgaatttagaatttccc

SEQ ID NO: 336276 - DNA, 1410 bp, Cannabis indica
caagaacaaacttgcatttctcattccacaatggaagcagagtttatagctctagctgccactgggaaagaggccgaatgtttgagagatctcttaattgagattccaattattaaagaggatgtatctacaatatcaatacattgtgatagccaagcaacattggctagagcatatagtggagtatataatgggaagtctagacatattagtctaagacatggatatgtaagtgattaatggtgaaagatgcacatttcttgatcttaaagtttgaaataaattaaatttaaattaatattttcattaaattaatgagatattttgatattaaaaatattttatttggatataatttattgttattttgtaggaagtaaagtgtatttttgttgaggaagagaaataaaagtagtaaaattgaaagaagcaagtctacaagaaaaatgagaaagcaaaggaaaaaaagataagaatgagcaaatttgaaaaaagaaagatgaaaaagggcagcccagaaagaatgaagagaaagaaaaagagaagcccagcccaataggcctagttctcttttgggccccgcaatcctcgtcatcaacagttggcgtatccctattccttcaactgtccaacgcagcgcctagttggcgcaaatctctctccacacgcaagacaaatggcagctcaggattggtccatttcttcctcttccttccctatggaatcgaccgcccgatctatactacaaccaccgctagtggaagtcacattttgggagataaacagtaagtgagtttattcaaagaggagtcatctcaatatcctatgtgagatcaagtgaaaacttggcgggtccgtttacgaagccactaactagagatttaggggaaaagacttctaaagggatgggactaaaactccctaaatcggttcacaattgagtgtaacctatcttaatactagtaagtttactagtgttaggttcaataggtaagaacaaatcaatgtgtgaacaaatgtgataactactatatgtcccatccgacaaagttgcgaagtactttgtgagttactaatttgagggttaggcttttaaaagtctttaatagaattcagtttggaaaacaagtattttggtaacaaatactgtaagaattctacctatattgacctaagggtggtgccgccctaaatgagaaatagggagtatattttctcaacaaggtcaatggatggaatgtgcacaaggccattaacggtgcaaagcgagacatgaggtcttaggtgaacctagcaaaggtgtgtgtgtcatcaccgttttattataaagaaaacttagttcaatgctttgtcaaccaaattttaataaaatttgtgatgattacactatggttaagttcaagttgaaaa

SEQ ID NO: 336277 - DNA, 507 bp, Cannabis indica
agtctctatataatttggttgtctcaattttaaatctacatattgaattattttttataattttaaattttctatttatatctttctcaattactttttagaatattttatatattttattgttatgttttagttcgattttgttatcgaaggattttggacaacactaaatagaaaataaataataaatatttaataaaaaagcaacgaatactcaacttaaaacaacgagtattagaacgagactgcccagacaataaaagaacagtaaaaaacaataaacacaaagatgtatagtggttcagttagattacggtctgcttagtacactgtaacaaaagatttttgtcctagtttattcatgttggatcactcctttatatacaaagcaagtttccttttagttacatagaaatcaatcggttatagaactgttttacattaaatattaacattgaattataataaaacgtaaaagaataaatgaagaacagtttaaatctgttt

SEQ ID NO: 336278 - DNA, 581 bp, Cannabis indica
ctagttcagagtagttttttttagttaaggattatttcaaaactcgagacatgaattcttagtttcattattgaatgttaatttctagtttccattatatatcaaattatttcttttcttctatgttcaatatcatgactattgctttaatcttgtttagacgaccactaaattaagttttactttaatctaccgtcatcttgtttagacggtcgctaaattaggttttactttaataaggatattgagataattgactgtttcagctttatctacgggattaatagtttgattggaaactgaaattacattcactaataggaattaggaatgattgttgagggtgacgaataacctttaactagtttctcatatcgtagcctctctttaaacttgttttctttttatcttattattgttattcatcaaaactcattttataattctagttactaatttgtgaataattgaacaaacatggccctcgtgggatcgacctttacttacaattatactaaaataattagaggtattagaataaaaaaaaaatagtaaatttgatacggcatacgacacgcatc

SEQ ID NO: 336279 - DNA, 613 bp, Cannabis indica
tttcaaataatctcaacaccttgatatccaaatcaagtgtagtatgtagtatactctccgtaataggatctgacaggttgtattcaatacaacctttcctccaccattacatttccttaatcacaaaatacttgatattgtgaaattcctctctatatgtctactcttctagggatactggattctttactttttggcaactacttttgtgttagtcaggaagtaacactagtagttaataaatgttggaacaatgccaaaaatgtatagaactttccttagactgaataagtacctttcctgcaactttaacattcagtctctctctctggtagacttagagacttcagataagtttttacacttctccaaaatcaccagtccaccccctagagtaatcgccatctcattagcagactttctagcactaaggcaagtctagagatctgatttgatgtaatctaagcgtattaaactcacccaatcttgaaatctgatttggtgtagtctaagagaattaaatacacccttatcgactaacatgtagttcctcttcttaatcttaagattcacttgattgtcttccaatgttcctttcctggattaatctgat

SEQ ID NO: 336280 - DNA, 791 bp, Cannabis indica
acaggctggtcaagctaaagactttacagtgtcagatagtggaatgttgttgtttaagaccagagtctatgttcctaatagtgtggaacttagaaatgaaattctcaaagaggctcatacaactccatattccttgcatcccggcaccaccaagatgtatcaagatcttaaaccttacttctggtggagtggaatgaagaagaatgtgatagaattcgtatcgagatgcctaacgtgtcagcagattaaggctgaacatcagagactagtagggttgttgcagcctttaaccctacttgagtggaagtgggaagatatcacaatggacttggtggttggattacctaaaaccacgagattatttgattcaatttgggtagtggtggaccaatttacgaagtctactcactttttacaagttacaacaaccttttcagtggatcaatacgcaaatttgtacgtcaaggaaatagtaaggttgcatggtgtgccaaaatccatagtcgaagtttacttcaaagttttggcaaagtttacaacgggctattggtaccaaactgaagtttagtacagctttccatcctcaaacagatggacagtccgaaaggacgattcaaatactagaagatatgtgacgagcctatgttatggattttgaaggcccttagagtaagtacctaccgtgatagagttctcgtacaataatagctatcaaagtacgatagggatggctccctatgaactattatatggcagaaagtgtaggtctcccattcactgggatgagacag

SEQ ID NO: 336281 - DNA, 627 bp, Cannabis indica
aacaattacaactgattaattattgattcgagctagatcggaattggagcgcaaacaccatgttgaggactgtaacgataggccgatgagatgatacatattcgaaaaagatcgaaacagaagacgacgacatctccaacacgaagcccacgacgatgcacataatgcaaccaatgattgtatgcaataaaaacttccattgtatcaattctcaaacccaaagttgcgtctaatatcaaagatggattgtgttggtctaagaaatcaaccataaaattacaacgttgcaaattagcaatatccattactcctcctgatgctataaacacttctaatatctctttaggcataacaatttgatgaccaacaacattagtcacatcttcaagactcaatctttttacacacaaaattggttctggcccttcttgtcgttgtggttggtgatcacgccattgtcgttgttcttcttggggtaacaaaggaacgaaagtctgattattttggtggtttaatcggattaatttggcattgattatgacgattggagaagtaacttgatgaacaagtctcaagagaagaacgtctccaactctgatcccgcgatctcttacgaaggagttccat

SEQ ID NO: 336282 - DNA, 529 bp, Cannabis indica
ttttatttttttatatttatatggttttttcatgccatatttttataaaaaagtacaaattttatatttgtaaaacaaacaataagttttgccgaaaaagtcgttggaacggaaaaattgctggaaaagttagtgtcgccggaaaatcactgtcgacggaaaagtcatcgtcatcaggaaagtaactagaaaagtcaccagaagtagatgtctctgatataactaaaaatataactgattctatgaataaaaattaataactcaaaccagttataattgaaatataatcggttctgtaacataataaataaaaataaataatataaaataacttaaaccaggtaaaaataaaaaaagaatcggttctataacagtgttataatgaataaaaactaataacacgaaataaactcaaaactggttatataacataatgaatacaaacaagtaacacgcaataattcaaaccgattacaattaaaaataaagggaaatcaagttactaaataactgaaacataaattaaaaa

SEQ ID NO: 336283 - DNA, 552 bp, Cannabis indica
tttgggtcccccatctatgtccatgtcctaggtgtcgatccgggtccaagtttgtgtttcgattcgcgttcgggtcttgagtcctggtctgagtccaggtcttggtttgcgtttgggtcccactcccagtgtgggtctgagtttcagatccctggtccgagtctggttcttaggtcctggctccagccccagttttggggtctgggtttggctcttgctctgggtcccggtctgggtccaggtcccggtctaggtccaggtctcggtctttgtttaggtcccaagtcacaggtctcgatccgtgtccaagtctcggtatggattctagtcttagttttggtttaggtttgggtcctgctacttcccaggtctgcgttctagtccctgacctggtccgattcctattttgtttctgagatccggtttggatccctgtctgggtctaggtccgggtctggatacggatccgggtcaggatcctggattcaaacacttactacgggttagctcgaagcctcaagtctagattcggatctcgatcttattccagtt

SEQ ID NO: 336284 - DNA, 828 bp, Cannabis indica
ttccccccaaaagtaaatattgggaaattaaaagcaatcaagtaccttaggagaataaccgtcaaaggcatgcaaaggaaaatgtgtcttaaggtactaattaattagagcattaattagcctaaaactgaagggacgcctggtcagactcacatcgaatcacgaacagatgcactcgacaagtgtcacccattcaaatgtaaaatcaactcggatgaagtctacacgcaacttcggaagtcccgtaaagacttggggggcaaatgttatcccaatttttgcactctgacgtggcatcacatgctggtgacacgtagacttgattctccatacctgcccaaaagagatgttccgagcagaagacaacctatacctgcacggacgaggtcctcccagccgagcagcgaacaatccaagcagcacaccaccacttagcaatttaagaattttcattgtgaagcacaagatcaatccctataaatctaggatcgtatcacagagatatggctagctgtccaaatcccacaatttgtgtattgtaaatatgtaatatgtattcttaccaattatagatattgtaagtaaaagggaaaccttccctcaagcatgtagccctataaatagtgatccattctcactgaaaaaggggtcgaaagaattacttgacagagatctaagagagcatactcagagatttcatggtaagagcatacgagaggaaacactgtattatttgttcgtaagtcaatacaaatcaaggggagtaggctattaccgaactgctcggggccgaacctctttaaaaaccttgtgttctttatttatctt

SEQ ID NO: 336285 - DNA, 756 bp, Cannabis indica
agcttaatgaaactcaagaaaacatctatcttgcacatgagcatagggccgcttttcgtaaacttgaggccgtgaggcatgcgagacataagagggatgcgaccaaattttacaagtatcacaaggacattgggcacacaacagacgagtgtcgtcagctgaaagatcagatagagagtctcatcacgagaggtcatttccgacaatatgtgaaaagacaaggtaatgtacaaaaccaggaaaatccgcctaataacccaggtaaccaaggattacattctccccatcttaaaggagtggatatcctagttatctcaggagggccacatattaccggggaaagcaacaatgcctagagggaaatgctacaacagatgggttgtttagtgcgaagacttgcatgattgctgcaagctgtagatagacaatatgcaggggcgtagactgagatcaagactgagctagtttgttgcatgtacgggcatgctttgtgtttatgggaacactggtgttgtatgggacactgtaagctgaatgattcagagagcatatgtcgatcgaagatagcgaattgggatgacatcaagtcttaagagtaagactttgtgttatcaagtttgtcaaaagttagtgagtcatcagaggatgcagggttgattttgggagattgacttgtgacacagtttagagagccgacacgaggaggagcgagatgacaaatttgtggttttgggtgattgatagatcattgaccac

SEQ ID NO: 336286 - DNA, 994 bp, Cannabis indica
atgatgacaaaatatgttagtttagccaagtttaggctttgcctagatttgctaaacatcctcaattgctaagtgaggattcaagcccagttcagtccctgttcatcatcatgctctctattaatgaccaaggtggataattgtggagtttggtcactaatagaggtctattttgtttggccaagaagttagcaactaactctaactaacttacctaactgtcagttatgacagttaggatcaagactaaaggccaaaggctataaaaagccatgagttacaatcttttgggacaaggaagagagatagacttttgagagctagtttagactgtaaaatcagtgagagagttctggtgagatcagttgtaattgaagccttgcttctcgagtgtatgtgtgtcatgaacactttgtaaaacaacttgtaattctctctcaatctagcattaataaagactcaaagccattggggctgttctggccgaggagtaggcaaatgatcaacagatcacttgttcgaacctcgtaaatctattgtgtttgatctctcttctctaattctcttactgttaaaattgattgtccattattgccatattcaagttcttgttactggttttctgcaactggttttactgttcttgttcactgttgcattgattaattttagttacttaattctggtcataatcaagttctttgcattgtgttgtttgcgaggtgtttgatcatgcattgatcacatcaaatggtatcagagctcagtcgaaagggatcatcaaagaactgaaacaaggacatcaagaaattcaagaacagaaccaagaactgatctgctatggcttctaccaggtttgaagttgacaattcaatgggacaaaagactttggtctatggagaattaaaatgaaggcatttctggtacatcaaggaatctcagaggcaattgatagagatgagcttgctgctctaggagatgacaagaagaaact

SEQ ID NO: 336287 - DNA, 1492 bp, Cannabis indica
cttcactatttaatatatatatctaatttttttcttaactacacacacgacacaaacaacaaacaacaaacaacaataaataataaattaaataaataaataataaataataaataataataataataaataataaataaataataaataataaataataataataataatatttaattgtatcacacttaatataccaaataccaatatatgtatataaactggatattacaaaatcctcaaatacacactaaaaaaaatatcttgaagaggcaaatggcaactagtccgaacaacttctagaagtactttggtcacataggttcacctagacgatggccaccgagcagacaccctttgcattagcctatggctatgataggggtggcaaaatgggttttgccacagccacgaacacaacacgagttttatgggttagggtcaggaaaattagatgcatgtaaaaaatgggtctatataacttgacacgatatgcttaacacgaacttggcacgtttgacacgattttttaaataaaataaaataaaaaattattaataataatataatcgtgcaaaatatatatatatttagtaatttattgttaagttaaataattttaaatttaattgtctttaccatgaaattgaaaatgttttaaattttttaatttttattctaaatagaacctaaatgtatcatttttttctacaacttcaatgatagtaaatgggtcaaagtgggtcaacacgaacacaacatgattttttacgtgtcgggttagggttgagaaaattagacacgagtaaaaaaattgatcaacacgcctgacatgaaatatacacaatgaactattttgtcaaccctagttatgaaacaatgttgcccgtcgaattagaactaccatctcataggagggtatcctacaaccaaaaagtaaatcactctcctaacaaaatcacttgacgaaatcaaagaaataagagatcataccaacttaaagctacaagcttatcaataaaaaagtggccaaatattttaacaagcacgtcaagaacagaaaattctttgtaggagatatgatacttcaaagagtatttcttaacacaaaaagatcctacaactagagtacttggcccaaactgagaagggtcataccaagtcacggacattgatgtcgcccaattagttacactgcggtcgcggtagtaaacgggctatgtcgtatccacagggaggcaaattactactaaaaattagtataaatagaaaaagatagaaattggaatgaattaaaaataatgaaatgatgaggtgagaaagttgatcagataaagagtttggtaaggtagaaatgtagttatgcaaatcttattctaataccgatattaattcagaacacagttgcaattctacaccattaattacaactggaagatatatatatattatgagcacaaattaaataatcttaaataaattgaatctcacc

SEQ ID NO: 336288 - DNA, 1345 bp, Cannabis indica
tgagctggtgactcatgatgcgaaaggtgaattcgctaagtgttgagtgctctgcacggatcgttgaatatcttattccggatgtgccagcgaggcatcctgctcggtctattcttcccgagcagatgctccaagtggactccacgtgtcaccattctcgtgatgccacgtcagagtgcaaaatttgggataacatttgccccccaagtctgtacgggacctctgaggttgcgtgtagacttctttcgagctggctctgcctttggatggggacacgtgtcgagcatgaccgttcgagacccgatgtgaagctgactgggcatcccttcggtttttggctaataaatgttctgacaattaatatttcgaaatccgattttctctctccacggctgacggttgcactcgattacttttgatttcccatatttgtttttgaggcgggaagttgaggcgtctaaggttcctttaatgtagttacctcttttcgtgacttgcctataaatacccatagcattggcacaaaactcattttaccacccttcgctactaagtaaactccaaagcgaaaagagagttttctggcttcaaagttgccgaagggccttgagaagattgctgtttagattgacgttgcttgagcccagacactcgaatctttgagtaagtttctgatttcctttatacttttctttgcatgtttacactttgaatgcaactatgctgtagaaaacggcttaggaaacgctattgttagaaacttctgcgactcttctttgtcatgtcttcatgtgggcttacagccatagagcttggctttgaaccgcattgcgtctgcctttcatcttgcttattctaagcttcaagaacttttttgtcctaactcaagaaaacttttgtgacttcttgagctctaacttttctttagacattgtcgttctttaatctgttgagtactcctggtcggcatatttgcttgtttatcgtttgatattccatccaactctcatcttgtgtgttttcttttgtagatgaactaaggtgagtcttgggaactcgggcatcaaatcgatcaggatttgtttcaacttctgcacgaagatcatcctcgtcttcgttctagtccttcttctggcgaaggacattcttctgatcttgtacccaaccataggatgatggcttgtacaaagaaaaccacgcgtctggttggctcttctgatcctcaagtggctcggcttgccactctgcccgacgctgaacaggattcggccgtcccgattgaggaggattacgagggggacgctgaggtccaagaggttgaagagctggacgaggtgcgtccggg

SEQ ID NO: 336289 - DNA, 708 bp, Cannabis indica
cctacctagtatatatatatatatatatatatatatatatatatactttgtaaaagaaaaaaaaaattgtgtacgacatcttatctaccacttcaaaaatatataaaaataaataaaaatgaaaaatcttatctagcactagtaatatctacctataattttctttttatttggaatatataatggaccatatatgtccacatacaataaatatagaaaatataaggggaggtggcaagctctcgatccatataatattatagggtaagtttatataaggggtattttagtaaaatcttatttatttcggtatttaaaaaaaaaatagtctaatttctttttataatcgtgtctattatagttatttaagatcacatgtaaatttttaaaaaattcttaatagtttataatactgaaaataaaatttacttgtacgtatgactatcttttttttactgaaaataagatttatatatttataatgctaaaaaattttatgatcgtagtaaataatgttaatctcatttttgacatatttaattaacaaaaatattttattgtttattgtatatttcggctagtatgtgtttaatatggtttcttattttgtgtattcaaacttggaaggaaaattgtctagcttttctatttttagaaataaggtaaaaatagtaagtttggttatccatttcttttttatctaaccag

SEQ ID NO: 336290 - DNA, 2026 bp, Cannabis indica
tcttgatcaacttcagagggaagagacgatcttttcaaagattgatcttcgatcgggctatcattagtagagaatccgagaggaggacatcacaaagacgccttttcgcactaggtatggacattatgaatttctggttatatcttttggactgaccaatgctcccgcagctttcatggatctgatgaatagggtattcaaggatttcctcgatatttgtgttattgtatttatcgattacatccttgtgtattctcaatcagaagaggagaatgagcaacatctcagaatggttctgcaacgacttcgagaacacaagttatatgccaaattcaagaagtgcgaatttcggctatctcaggtgtccttccttgggcacattgttagcaaagacgggatcaaggtggatccaggaaagatagaatccgttagggattggctgagaccgaaaacaatgatagaagttagaagcttcttgggtctggctggttattatcgtcggttcgtggaagggttttctaaaatttgaacacccttaaccgagcttaccgaaaagaatcagcgttttgtacagcagtacctgactcatggcatagaacttgctgtagtagtgtttgctttaaagatatggcgacattatctctatggagagagatgtgaaatttatactgaccataaaagtctcaaatatttctttactcggatggatttgaatatgagatagaggcgttggttagagttggttaaggattacgactgtgagattctttaccatcctgggaaagccaatgtagtggtcgatgccctgaacaggaagggtcccgagtaggtaactagtatggttcagatttcacctcagttagtagaagacatggttagatcaagcatcgagttttttgtaggcaaacttcataacttgacgctgcaatctgatctattagaatgaatgctcaattaactgatccagagttagtgacaaatagagaagaggtttcagctggtcaagccagagattttacaatgtcagatagtgggatgctgttattcaagaccactgtttgtgtccctaatagtgcagaacttagaaatgaaattcttgaagaggctcatacaactccatattccctgcatcccggcaccaccaagatgtatcaagatcttaaaccctacttttggtagagcggaatgaagaagaacgtggtagaattcgtatcgtgatgcctatcctgtcagcagatcaaggctgaacatcagaaaccgacagggttattgcagcttttaaccctacctgagtggaactgggaagatatcacaatggatttcgtggttgggttacctagaaccacgagtttgtttgattcaatttgggttgtggtagaccgattcacgaagtctgcacattttctaccagttaaaacaactttttcaatggatcagtatgcggatttgtacgttaaagagatagtaaggctgcatggtgtgctaaagtccatagtttcagatagagatccaaactttacttcaaaattttggcagagtttgcaacgggctatgggtaccaaactgaagttcagtactgctttccatcctcagattgatagacattctgaaaggacgattcagatactggaagatatgttacgagcctgtgttatggattttaagggctccaggagtaagtacctaccgttggtagagttctcttataataacagttatcaaagtacaatagggatggctccctctgaactgttatatggcaaaaagtgtagatctcccattcattgggatgaaacatgggagaagaaatacttaggtccagaatctgttcaacagactaatgaagcaattaaaaagattaaagacataatgcttgcctctcagagcaggcaaaagagttatgcagatccgaaatgcatgaatgtagagtttcaagtaggggatcatgtattcctatgggtgtctccgatgaaagggatcaatcgtttcgggaaaagaggaaagttatgccctagatttacaggac

SEQ ID NO: 336291 - DNA, 994 bp, Cannabis indica
ttttttgcacattttttgtaattaattaaaataatgtatacatttatgtaaaatgccctattttaaagctccaataaacacttgattattatcaatctcatcaacagaataagccggtttattaattttattattactccactatatatatgaaattgcactctttgacaatatagaattatatttacataattcttacttgtagtttattgatataatcaataagcagttctccctccaattattaattcataattagagttggtcaagttatcgttttatccttctaattatctcttgtctccttatgtaccattaattcaatgttaacagttaatttataacttattattaatttagatccaactgttagcactcctagagataacactataagagaactaatattcgatccgttagaaaagcttagattccactattgtataacatgttcctagccaatcatgttattaagctcccaaaataaaacttgtaagaatcatctactctaagaaactttaacgaatgaatcaaagaacttaatgaacacaaacaagaattcatgtattatcaggattcaagctgatctactaatgatcatcattgtgatatgaataattctttcatggtaaatgacacattaatgaaacatgtttattatatatcagcccagccatgcataatcgaattatacacaacacgtttactatatgtctatctacatatgtgattcaaattaaaatcatacacactagaagtatagtgtatagtttactgtacttagtagtttcatattaaagattttcaatactttaatatatattaccgacttgtttcatatcgtataatcttaattctcttgtacatccttacaagactgtaccttgtcgatatgaataaggaattttaaaatatttaataattatactattataattattgtatcatttatcttataattttatttcatatattctctaatatattattcatt

SEQ ID NO: 336292 - DNA, 897 bp, Cannabis indica
catgtattcaagtggttggtgaatgttggaccacaaagtaggttgtttactagacaatgaactatttaattgagtgtaaaataagttttagaaaggttaaccaagtatgaagatgtgatgattgcaagggagcaatagtggcgtatgaactagggagaaaaaccttagtggtaataatgagaaaagtgtacgagagtcttagatgttgataaattagtatcatcaacgggggactcactataagttggcatggtagttcatgccaagggattgtcaataaaacagagtttatacttgaggtatgaatatctctgaatgtgtttgaaaggatttttaagacttctaccaaatacagaaacgaaactttgagatcaaggaatgatctctgattaattcttatcagttgagaatttagaaaatgggtatttccgctttagttatgggtgcccgatatgagtaatgttgcctctaccatatatgttacattaattcactttataatggtggttaattgtaagtgattgggaaatttaaaagttgtgtcagttcaaaggaaattgatgcaagttaaaataagtggagatgaacaagattgaagttgataataaagtggaatttcctcatagttatgtgaacaaaatcgatgaggaattgtaagaggctaatgaagggagtgatggaaattgaatttttactaacgaaagaatgaaattaagaaatacaattaggaatggcaaagaagcatctactttctgataacccaccatgagcttaccttggagttaagcatacttaacttgaggtatctcaagatgggaaatctttcggggagtcatctcgaaaagcgcacgagtaaggataaagtacgctagaaagattcatattaggatgcagaat

SEQ ID NO: 336293 - DNA, 726 bp, Cannabis indica
tttcttttagacgatgaagaagcgaaggcttttatcatcatgattttgtgagagatagagctgtgaatgttggacaaaagatcacttaaaatatatataaatatatatttattcgatatgaagtgaaactatatagagaggcggagccaggttcaaataacagggggccaggccagctattaaattttagattaaaactaaagtttcaaaatgcacatggacgtgaaacacgtgtaaatatgtaatcaaacttacataataaaacttacagtatatataatgaaaaatgctaaaaaatattattagtgcctagtatcatcctcggtgttatatattaagtatcatgtactatatagtttaaatttttttttaaataaattgttataatttcagcggaaataaccttgaagattcaatcataaaatctgcaatgaactcacaactttgacagtaaaatgaacataaaccaattaatctccacaatgaatcaaatctgaaatcaaacaaagaacaacacacgattttatcctggttccggtcctagagatcaatatgatccctggccatactccagctgagaaacatcaccaatcttcattaatatctgaataagagatcaacagtacaattacaataaccagagcaatcacagctcagatggtactcgactcacaccagagaaaacagtcacagttttctctctaacacccgacgtacacccccttg

SEQ ID NO: 336294 - DNA, 1124 bp, Cannabis indica
aggtgatagccatgcattggctagtacgatgccaagttttttcccccacttcaggccatagtacaaagcatgcatgccattgtacctgcccaaatgatccaacaaccatttataagagccattaaaaaaggggaggcccttaagcgacacgtatgagatgtccagacagtacgagctaacacctctatacaccatgtgatggagcggccacctactaaattaacggtcggatctcttctagctagaccagctcagaaggcacgtgaatgaagatatcacctataagggcccctgcatttcacgagataaagaacaactctggagagtctgaaagactattgtttactttctaaaactctgctaaaactcttattgagcttcttgttcttcaataggaacgagaggaatacatggttaaagtccataatgtaaacatctgtaatattcgttacttgtcgataaggccaataaaattgactagtggactaaggataaaggatagttaacgcctgaatcaagtgaaaagccttatgtttattgttcataaaaataaaaaaaaataaaaaaaaacacacaaaggattaaaaaaaattactattattgagtagtacatcgatatgtcattaaacaccttatgttgccaataacaagtacaagaaattttttactaaaaaaatagtatatatataaaataaaagtgaatatatataaattttttacaagataataaagaatttttttattgtaacatctatttatatataaatgttatagatatatgcatattatatcaatatttttagtataaatatgaatatataataacagtatagttattttttttttaaaattttaaattttaaatttaaatttattatacatatttctcttatcatttattttatattaaatatatctataaaacataattttttttatattgcaatttaaatttaaaattaattatacatatgtaaaaatatctttatattatctttttttactaaaaaatatagttctattgttactttttgaaaaaattaaaaaaaaaaacggtagatatttttaaaataataaaaagtagatataaaattaatagtattacaataataaattaacattat

SEQ ID NO: 336295 - DNA, 635 bp, Cannabis indica
aattacgctctaaatagtctggtccatttattattcgtactgtttttcctcacggagctgttgaaattgaaaattctaaaacttgtaatatattaaaagtcaatggacaacagttgaagccacttttagaattaacaccatctgaagtggaggaaacgctccttcacgacccgatttaccaaggttagtgaattctttcactactggtcctatctttaattgctttctttaatttcagtattttagtttatttttcgtcatttgtttttagataatcaacatccatcactgtgcatattctctatttttcttattctcatctcatgctcttatcagctacatatttaaacattgaggacactgtctcgttttagttgggggtaccgagtttattcttgcgttaagtttgataaatttcttaactttttgaaaattttgagtcaaattctgctgctaattacgttaataaataaatattgtgttagactagtttatactatatttagttaatttgatagtaattcaagtaaaaattacacaaacaaaacatattgtaaagaccgcttagtttaatttggagattagcagttaattatgtttaattatgaaaattatttatagctatttaaataaat

SEQ ID NO: 336296 - DNA, 939 bp, Cannabis indica
aatctgattccattcattcttgagcaaacacaagaatatgctcgagttgaacctattgtggaagaagatgtgtctgacgatctaagcattcacattactctcaggaaagggattcgctcttgcactcaacatcccattcacaattatttgagttactcaattatctcctacctatagagcttttatcaccagtctggatcaagtttatattccaaatttggtttaggaagctctacagaatcccaattggaatgctgccacaatggaggaaataaaagttgtaaagaccgcttaatttaaatttggaaattagcaaataattaaggtttattatgaaaattatttattaatattaaattaattatttatgatgatttatttgaattcagaatgcattttatatgtcatatatagaaattttatatttttgcatgttcagtgcccagcaacattggaacgcggtgtatggctcagtagaatgacatcctggtattttagtgtagcggggcagtataattagacattgggaatgtcgtgagtagtcgggaatttagagtttttccaaaataccctaagtgatttgtatgactcttttagtataggcaagggcattatggtctttttgcctattcagttttgtcttttagtgagggtttaatattaagttttaaatctgattttattgcttagtttggctgaagaaatttaataaaataagaaaatccattcttttactcattttatacaaaattagaaaagctagaaaatcacattttctctctcaagctcagtctctctttcggccacccttagagcagctagggttcatgattttgcttcctcaattctctgctttccagcagctcaagtgtaatccaagccaaggtataaattctagcaacctcctttttgttttcttgagttgtaaggaaagatgat

SEQ ID NO: 336297 - DNA, 1105 bp, Cannabis indica
taaatattgaatttaaattctaactgtttatgtggtatatcttttttgcagagaataatataccatagattttgcatcaataagaaaacacaaacacatacaaaacatgataaatatataaatataattggtattggcacataagttaaagtaaatatgaagctcaattcataaatacaatacataatgaaaacctcttaaagagaaagttttattaatactctctaaaatgtcataatgaattgtctacaataatatgaaatagagaataaaatctcaaactaataattgaaactaaattgttcataaactgaaattaattcaaaaaaaaaattaaagaagatttcgagcttcatcttcaatcttggacaatctccacccttcagtctaaccatccgactcaactcgctaggatagcaatccaagtttaagcaattggagctgaaataagaggaaaataaacatgattagtacatccagaatttataaccaaagaggatagtaattctttaaaacacatgagtttatagcaaagatagaaataccttatttctttgccaaaaacttaggacactggggtttccagtgccccttttcgttgcaatagaaacactttcctttttgctgtgcctttgaatcggcatactttttattcttattagctgtgttaacaactttctgtggtccttcaatcaaaatctcaaatgtctgagggttgttgattaactcgtggaagtcaaaagtcaacttgttcatgacatagtttgaggtgaagggcagaaaagttggagtcaaactattcaagatcaaactcagttgagtttcctgatctataatagctccatgattctcagcttcctggaagtaacttgccatatggagcaggttatcacgcttgttctgatgaggtttcatccgtgcattgataaaattgttggttgcctcaaactgagcttgatatggcgccatcccaaatagttcagtcaagtggttcatgatatctgcagtcgtgagagtattaacaaaccttgtcttcaaggtgtcgaccatgctagacagcataaagtatcgagctttgttgttagcattctgccaacactcgaac

SEQ ID NO: 336298 - DNA, 642 bp, Cannabis indica
cttgggtctgggttcgggtctaggtccgagttctaggtccgggtttgggtcccgggtcccagtcccagtacgggtctgggtccagggttcagtcttggtcttgggtttcgggtcccggtccgtgtcttgggtcccagtctgggtccggggcccgggttagggtccgggtcccgggtcaggatccgggtcccaagtcagggtccaggtctaggtctagggtcctagtcccggtcctagtcttgggtttcgggtcccgatccgtgtctcgagtctcagtccaggttcgagtcccgagttaaggtccgggtccgggtcccgggtcagggtcccgagtcagggtccgggtctaggtcctggtcctgggtcccgggtccaggtttcaagtttgggtcccaggtgttgggcattatgccctaaataaaactctatttcaatgtaatcttttctatttaattatcaataaataaatagatttaatttcattacttgtttaaagtattatttggttcatgtgatcatttatttacttatttgatttatatattcatccaaatccttatcacattgatattcttgtttattgtgtcatcaacacagtggaaaataatcaagattatgtgattaaatgtattcctatgattt

SEQ ID NO: 336299 - DNA, 939 bp, Cannabis indica
gtggactattttataattacaagaataataaagtatttgtttttaaaaatatcacattccttgagaataactatattaaagactttaagccgcaaagcaaagtagtattggagaagatattttcgaaattaactccaactaatgttccatcgtcttctactcaaatagaggatgatcccactccttgggttgaacaaatgcaaactgacacaactgaggaaactatcactaatattcatgttcaaaagatcacggtttctcgtcgtagtgggagggtttctacaaaaccatctcattatgacttacatggtgaaatcaatatggttgttggtaacaatattaatgatgacccattgacctataaataggaaatggcaactccttaacaaaaacaatggtcagatggcatggatttagaaatagattacatgaagaaaaataaagtctaagaatatgtagatggacctgataattaccatccaatcagatgcaaatgggtctacaagaagaaaagatgtgctgatggaaaagttgaaacttttaaagctagacttgtagtaaagggttatatcaaaagaaaatgtgttgattatgaagatacttttagtctagttgccatgctcaaatccaccagaatacttctatccatagtagatgcttttgattatgagatttggcaaatggatgtcaagacagctttccttaatggaattcttgaagagacaatctatatggagcaaccagaaggttacaaacttccaggataagaagagaaagtttaaaagctaaataggtccatttatagacttaagcaggcttgtcactcttagaacaaaaggtttgatcaaataatcaaaacctacgactctcaccaatatgaagatgaaccttgtgtttaccaactcaaggataatcaagtggtagtattcctggtccttt

SEQ ID NO: 336300 - DNA, 500 bp, Cannabis indica
cagaatattaacagtccatgacatccaccaattgtgcaattcaacccagaataatttgcaaattaaatcaccaaatcaatattcaaggttatggcatccaccaatctgtccaacactacaacaaagttcacacttgcactatatctaacacgaccactgccaatgccaccccagttcactatcactactgttctcagaattaccaatctttctcagcccaatattcaaaaatcccaccaaatttcaattcaaatcgtccaaaccaacattatcacaccactgctaccacatttaaatcatactgacaatctcaagcaccattgaatatacactagcagttcaaccacagccactaattaagcactgtaatccaaaataaatttcaaatgaaatcaccaaatcagaacttagcttagattggctgagaaactcggcttgacagaggattctcggttgctgtgttttgaatgaaggttgaatgagacaactcgggcgtatgg

SEQ ID NO: 336301 - DNA, 676 bp, Cannabis indica
tcagacaaatatgccaaattgtgtaattacctccaattacacacaaatccaattacattgtggctttccaaacgcaccttaactaaattattaggattttatatcctaaataaaactcattttaatataatcaaatttactaattaataaaagatcataaatcattttatgttgcattgttcacatgattttttttttcatgattatatgtataaattctatcgaatccaaaacatatagttattcatgattatagtcttgtcgacacattagaatataatcatgattatatgttttaaagtttttgtctcatgatttgtcagtacactggatttacactgacatgataatcagcgataaaatttacttacacattggataagtgttatgtcctttccagggcattaacaaagtatgctagtatcggatgtatgtagtatacatcaaactggattgatattgaacttggtaaaatatcataaacttaccgttgtatctttctaagtcaatatcacttagttgatcttagattaatagatcttataatcctcatatggttaggctcgatctcaactatgtcatttgtgttcttagagttatttgttaaagctgaccaattagatcggctcaatacttacatattgagaacatggaagtacaattgagtgagagcgct

SEQ ID NO: 336302 - DNA, 937 bp, Cannabis indica
ggtcttaaaacataaagcccttgttccatgtgagcaacacataattgaaatccattacgagaaataatgcaaatagaacttgaaaagttcaattgataaaattatgtttgtaagcatgaaacactaatcaagtttcctctaaaatttggaataaataaaacattgtctaaaagcaaaaatttattctaaaacttgaggcgagcttttcccttagcttgggccaatactaattcgccattcccaactttgagcttcaactcccctagatttaagcaatcccaagtttcaagcaactgtaatgaagaacaaacatggttagtagatttagaatcaataatccaaatggatttgtcattctctaaaacacatgattcaaaaaaaaaaagcgttaccttcgttccaatggtttagaagtctaggatatcttctttcgaatatcccttctctccacagtgtaaacatagaagaatacgtctgctcatttgttctctaattgtttcaattgttggttcaatttcgattccagctctcaaaattgaactcgaagaagcagcattgtcagaagcatcatcctcaatttcttcagctatcttcttgcccttgtctgcaaaactggagggaaccctccttgcaagtggcaaagtttgctcataagcacgcaattctgtgtccaacttgtctatgtcaaatgagttaaaattattgatcttgtatgatccaacaaatccattatactcaggtggcagactgttgagaatgaattgaactcattgctcttttgataaataaattcccaacagatttgctttctggaacttcaggttcatcatgagtaagtgtgaattgatgctcttactaggagacattttcacactatagagttcatttgcaaaggcatgtacaagatgaggattggggtatgggttgttcattttga

SEQ ID NO: 336303 - DNA, 451 bp, Cannabis indica
agtttcatgtccttcttactaatctaaactatacatatgtattaggaaaaatatgtaggtataccttttcagaaaatttgttttggtatagtctctatatgtttcagcgtctaagaaactttttaaactaataactttttttatgattgtatatattgtaatattttaggacctcttgtaaatttttaaaaaattccgaataatttatagtattaaaataaaagtttaagtaataggagtaggtaacatctaacccaaaccgatttaatctaatccaattacaaaaaattagatatctaattacaataaaataattaaactggatattcaattgtaaaacttacaaaaatactaaaattttgtttcttttacaaaaatactaaaattttatttcttttacaaaaatactgtcacacggattttttcaaaaataccgtgtttttataaaaca

SEQ ID NO: 336304 - DNA, 549 bp, Cannabis indica
catgatttccacaaaatccgtcgggcacctcagataagagtcgcgtagcttcttcttgagtaaaacattttagcaatggcattgagaatcctcttctgtacataattccctctactatgatataccgtacaaccttccttctcatctttcgagcttcattccgattatcggggagttccccagtgttgaggtaggcggctatcggtgtcatacagtttggggaagtataaatcatttagacttcttccgtgccggtgatgctaggatcttcaaggaactggataggaaccaagttcgccttatcacttacattactgcttgccaattgagctaacgtgtctacagttgtgttttcttcccttggaatttgcctgagaccgtagctcttgaattgtgcgagcaggtcatgtattttgctcagatatgcaatcatcttttctccccgagcctcgcattctccggatacatgatttaccacaagctgtgaatcactgccagattttccatgtgttcggcttttcatctctcgggctagtttcaagccagtaa

SEQ ID NO: 336305 - DNA, 492 bp, Cannabis indica
aattaatttagtgatgtggacatctatatataatattttataacactcccccttggttgtcattaaaatttgtctcatttaaaaccttgttgaaaaaacttggtcaaaagaaaaagagtgcagtgtaaattaagtctccatcaattaggcattcgtggagatcttttaatcaacaaattctaatatcgtgaaccatcttctcaaatatagatgttggtaatgactttgtgaataagtctgcaagattgacactttattgaatttgttgaacaccaatatgcattctcttgaaatgtattaaatatactttggtgaaatgtattttaattctatctccttcggtgtatcctctgaaaaaccgagtttttgcaaatgtcaatatatatattaaaaatataaaaattgtatacgtctacagaagcaataatgtaaatctgttactgtaagagaccaaaatttgcagcgacaaaacagaacagatagaatataaaa

SEQ ID NO: 336306 - DNA, 595 bp, Cannabis indica
actactccccctttttgtctatcaaggacccaaagataacaaaaaaaaaaaatagaacaaagtcatagtagttcaaacacatataaataaaaagcaagagataaaaagtggaccacatcattggatcggaggaatttcatgatactgtcaatcctcctgagaagtaaggcttgatttgtctccactgttcccaaacacaagttgaattcagccatttctgtagaaccagaagtggaagcagatgcagcagcaggttcatcggtagcaccaggggaagcagaccaagccttgttcttagcaaattttccttgaggaggattctctggaactttgaaagtggttccaacagtaggttcttcaatggattcattctcaagaatcaactcctcttggtcagacaaaatattatagattaaatgaggaaagataagattgagtctaggtttcttgccctttctaagagaaacaattcgctcacaaatcatgtcagccaaattaattttagcaccaatagaagctttataaagaaagaaggcaagttcatttgaaacatttaccggattggaggaaggaaaccaattggatagggcaaacc

SEQ ID NO: 336307 - DNA, 1087 bp, Cannabis indica
tatacattaaacataatcatgaaataaatcatgtgaaccatgcaacataaaagtgatttctgatcttaattaattagtaaatctgattatattgaaatgggttttatttagtgcacaaaatccagcaggtttgtctactgaagcttgtcaagacatgtacaatcttcataagagaaagctcggttcaaggttcagtaagcctgtacttgcttaatataatatgtgattatgaaagcatgttaggaagcatattagattatggttattttttttagatgtgttgccttaaaatccataagagtgctattacgtttttatgatcgctgtctaacctgcctggcttacgagttcgcaggctaagtcctattaaatgtacgcccaacaaaacacaagaagtcagggtaatagggttgagatcggaggcgttcagggaaatcaaattccccaaaatccccgtggtcgcggtcgaggccatggcagaattcaaggtggtcagcctgtcacaagctcctccggattgggagcacaggttcgcagagatgcaagatcatatctgccaacaagacggagaaattttgagactaaggcagcaagctcctcctccagtgcctccaccacaagcttaggcgattgcagttccaacggtgctagcagaacaacctattgctgacaaccgtatggtgccgctatatgagaggttccgtaagcaagcacctccagtgttcttggaaggtctagatatgatgaaggctgaggagtggctcactgtaatagagcgaattttgaatttcataggggttgttggaaatgatcgggtgacctgtgccacattcaagttctaagaagacgctctcgtgtggtaggagttaaagtccctcacccaggatgtcactgaaatgacctgggaagagtttcgagatctatttaaccccaagtattacaatgaagaagtctgtagtgctaagcgaaaagaattcactgagttggtgcagactgagggtatgtcagttacttagtatataataaactttgaccatctggccaagctagcctcgggtattgtgcctacagaattcaagaaagaaaa

SEQ ID NO: 336308 - DNA, 816 bp, Cannabis indica
gggttcgcgtcctgggtcttggtctaggttgggtcccagtcccatgttccaatcccgatctgagtctcgattcagttctgggtctaattcctttgttgtgatcctggtctgcgttcgaatttggctccgggtccgagtgtagctttgggtctgattctaggtgtgggtgtttgagttcgggtccgagtctgtgtttgggtttgtgtcaaggtctagaccacgatctgggtctaggttcgggtccaggtccaagttcgggtcccaagtgcgggtccaagtttgggtctgggtcaggatctcgatctagatctaggtccagcatttcgatctcagtctggttctgggtccgagtctaggttcgtatccggatccctatctaggtcaaaaactatgtttgggatcgggtcccaaatttaggtccaggtctgggtctgagttctggtttgggtacacgacagtgtccgggcccgagatcaagtctcagtttgggtctgaggctaggtctgtgttccgttctaggtttgggtccgggtctgggtcccggacctagtcttgttctagcgccatggttcgacgattctcgtttcaggttctaatttttttcccaggtctaggtctgggttcgggtttcgttcttcgtctgggttctggtcctagtctgattcccagatctagacaccgactacttgtctgttccaggccccattacccgaatcccgagtcaagatctggatcactgtcacgggtctcggtctagttctggttaagatcccaaatcccatttctgattttgggttcgggatcgagattggggtg

SEQ ID NO: 336309 - DNA, 676 bp, Cannabis indica
gaatgatcaaaaccagctagaggttgattgtcaacctaggcgatgggctcagtttctagacccttgggattgtggttttctacccaagttttcttgtatattcgttatttctgatgacggaaaagatgcccaaaacaatttcttggaaaactaattggaaacactccaagttaataatatgtcaacctgggcgcttggcctagtgtgccaggtgtcaacttggacgttggatccagtttcaggtcacctggaagtttcgtttggtccctagaaatagttgaatcttaatcttaacaatatgcctagaagacttttttgaataactcctccaaattggcctaggttgataaaatgtcaacttgggcgttgggcctttgttctggcacttaggatgtgttatttctcccctaaaggactcgtttacccattttttatgaagacgaagaagatgcatgtcttagatttttgatctaatgctttgaagtcgcctaggttgatagattgtcaacctgggcactaggtgtctgtgtgctaaaaaattaaagttcttcaaattaatatgattattaattaaatcaacataaaatcagcattaagcaataatctattcgtcactgaggctatgtaaatactttcatttcacatcaaaacctagactatccaaattttagcattc

SEQ ID NO: 336310 - DNA, 515 bp, Cannabis indica
ttggaaagtaatgggaatttctctaccaaatcggcttacgtggcccaggccatggagagagctcctcagggtaatgtcgcccctgctctttggaataaactttggaatagtaacttaatggagcgacataaggttctctggtggtgtattctttcccaagctctcccggttcgcgcagtgattaaaagaagatttcagattgaagactccagatgtccgttgtgtggtttgggtgatgaaactatggaacatttgtttcttacctgcgatgtagcgatgcatttatggcattcctccccttgggggattttccctgtgggcgacactggtattagagtttgggattgggtgaagtttatttggagtcttaataaaaggggtctccgagttgaagacgtgttcctttatgcctcgatagttgtggacaatatatggagaatgcgcaatgacgtagtacataacaactgtccccctaatattcataattgtattgaccttatttgctcttcttatgc

SEQ ID NO: 336311 - DNA, 1176 bp, Cannabis indica
aaaatttgctcgacaacatttggagccgtctgtggggaacggaagaagtacattcttgctaatacagaaagaaaatcataatggttggaaaccaagtaaacggaggttttaacaatgaatccatcaacatcagaatgatgaacgttccgttgtcaggaggtagagaaccaccagtggatgtcatcaatggcggagtaggtcgaggtaatgccagacctctcaacctattccctgaaactactggccttcaagctggggaaacgtctacaccaacagcaacaatggggaactttccacccttcactccggtggcagtgtctgaaggtatcgtccaactaaccaccgatcagtataccgcaatctaggaccagctgcgcgccctgcaagctgaggtggatggacagaacagggcccgacgtcctcctcgagcacccactgctcgcacaaaaaaccctcaggtaactaactctagacgtcgtagtaaccgtacttgcagggaatggaggaccaacctagaaggactcgacttgaatcaaccaacctcgagggaccaatctgcgaggtatcccaaccaggaggcacaaaccaaggaagaccccgaacgatgcaatcctcgtagcagacctttgcgagacaatgacttagaatccgcctcctcatcctcgcatggctgcacacccagtaggtacactaggtccggttctgtggagacaccgcagggaggaagatattaggttcacaggggtgatctatatgatcaccttaacgttgtttttagggcacgctcccacgcacctcgtgacgtggaaaagccccgtgatccccaaatggacgatcggggtgtaaatactcgcaccaaccagcctaacgcaccagctgcgaccactggggttaatatcccagcaaaccacgctgcaatagcaacaacacctgcagcagcaccaatcactgctcccttagctggagtattgatcaaagcatgcttttgcaggctttgaaaatgatcgaacagcagagaaagcccatatacaagcttcatgggacctctccttttactgcagaagtacgacaagctcgactccccaagggattctgattacctgaatccctaaaatacaaaggtacctctatcccattgattatttagagaaactcaatactattatggaagtggat

SEQ ID NO: 336312 - DNA, 813 bp, Cannabis indica
  modified_base (77)..(77): a, c, t, g, unknown or other
aattaaataaagagaaattacatagtattaaaattagcacacttacaaataaacaaataaatgaacttttttttttntttactcgaactcaggacctccaacacttacacacccacctatggccacttgagctagcctcaagtggttcaaataaatgtaacatctttcattacaaataataacttatttcattataaacatataaatttggaaaacatagttaaccaattattttttggctaattaggaatttgacactctaaattttgacatatatcaaatcatgtttcttgaactttttagaccgttaaaatttccttcgaactattgagattgttagattcaaggatttctgttcaatttcatttatttttactaaaatgattattgtcttataccaaatcgtacctctgaactttgatatgtatcaaatcatgctccccgaactttaatatgtatcaaatcatgtccttgaaactttgacatatatcaaatcatgccacttgaacttccatgtcagacttccatcaataaaattggacggaagtccttgaattcaacatcctcaatagttggagggaaatttttaacggtctcaaaagtttgggggcatgatttggtatatgccatagttagggagcaaaaatactaattagcctttttttttttaacgtaattagcctttttttttatatactaggtgattgttacgtgccaagccacgtagtgttaattttatttaatattttaattttttatttgaattaataattaaaatagcataattatttgaacgatttgttttataaaaat

SEQ ID NO: 336313 - DNA, 698 bp, Cannabis indica
aattcatattaggatattaatgaaacatacttgttagtaaatctagatcatggtaaaataatatccaataatcccgaggggttatcttgcattttaaatcatttttaagctcaataatcttcctccaataccagctactgtgcataggagcgttatactcccaccaatcttcgttgttaacgtatacattgtgcacccactttacccataaattgtctttctttgttgcaagagcccaaatatttttaataaccgttcccttgttctactcctgtatattcatgaagcctatcccacctgccttttttggtttacaaatattgctccaagctatacatccaaaaccaatcatgagactttgccctttccacaagaagctcctacaaatgccttcaatttcagagatgactcttttaggtagtagcatcacttgactccaatatgcatgtatggttagaagtacaaagtttattagaacagccctaccagcatatgagagatgtctggtactccaaactttgactcgggcagtcattttctccaccagtagcctacaatcttctttagatattctcctagcacaaataggaaggccaagatatttaaaaggaagctcagccagctgaaaccagacatgtcaatgttggatacattttaccaggatctagatttactaacaagtatgtttcattaacatc

SEQ ID NO: 336314 - DNA, 527 bp, Cannabis indica
tttatgaacttcttcacgggaatattcaatagcccagatgttggccagggactaaactgtagccaactcttccaagaaaggattcaggaagtggaaaaggacgaactagttaaatgcccctctcaggatgagattaagcgcaccctgtttgatatgggtaatcataaagcccctggtccggacgggatgtctgttcttttcttcaaacattattgggagacggtcggggaagacttttgtaatgccgtctctgacttttttgtcacgggtaatatgcataggggtatcaacaccacgaatattgttctcatccctaaagtccctaacccaacccgtactaatcatttccggcctatatccctttgcaatgtgatttataaggtcatctctaagatcattgcgaacagaattaaacctattcttccgactatcatttgccctactcaagctgcgtttgtgcctggaaggaatattcaggacaacaatgtaattgtgcaggaaataatccactcgtttaatagaaagaa

SEQ ID NO: 336315 - DNA, 603 bp, Cannabis indica
gaatgaatgtacctctatgatgatttttttgttgtatatgcaaagttgctaactcaataccacagtaaatttaacagaagattttagaatataaaagatatagtataacttatattagtgtattgtgtttaaaattgtaaaagagaacatatatatataggcttttttatataactgaaaaaaaaaaagattaatagtgcaccaacggttgaatcttttcatatgccaacaatttatttatcttttactaggaaccaactaattaactggttttatcaaacaaataatcttttcatataccacataattaggccttagtgtgcactaaaataggctttttgtgtggtgcattaatgtagataggtgggcagttggcacacttggaattttctaacaaaatgggttatttatcacaaataattaaaagtataaaaagtgggtgaggggaggattgaaccttaaacctcaaatgcaataaaaactccacttaccatttgtgctacacatttttcatataacttgttgagataagtatttatatattatacatttttatatgtatatatattaattttaatttttcggggcctccaaaattgtggg

SEQ ID NO: 336316 - DNA, 1236 bp, Cannabis indica
accttgcacatgagcaaaaggttgccttcggcaagcctgaggccatgaggaatgcgaggagcaaaagagatcctaacaggtattgtaaattccataaagatattaggcatacaaccgacaaatgtcaccaattgaaagatgagatagaaagtcatcgctcgaggccactttaaaaagtacatgaaaagacagggccacggatacaaccagcctagtctgcccaataacccaaacaaccaggggttacaacctcttcctgttataggggaggacatcctggttattttgggagggccacatatcacaggggaaagcaataatgcctagaaaagatatgtgaaagagataaagaacgagaagttggcatttgcgccaaacccttccaagaaggtgaaaatcaaggaacctcccattatattcacggagaaagatgagaaaaacgtgagatatcctcacgtcgatccattggttattaccatccaacttgccaataaaggatcaaaagagtgttaatagacaaatatcctttataaggaaactctaaggaagatagggctcgaaaaggccaaattgaggccttgtatggtgaatctttgtggattcacctgagacagcattaccagtcttggcatattcgagctcgcattaactttgggcaaggtacctctatctgccactgttaagcaagacttctgccatcagcttacaacatattgctgggtcgtccagcactgatcgaactagggcagtcagttcgatcaaacacctatctttgaagttccaaacaccagaaggcgtgggagtggtgcgtggtgaccagatgctagctcacgattgctatcgcatagagttgcagcataggaaggctggtcataagttgatggcgatcatggcaaaagatatcgaaacgaaagatgaagatcttgacccccgagttcaagatgagagaaacctattaaaaccaattaaggaattggaagaggttatcctcaatccaggaaatcccacaaagtgtgtatacattgggaagaacctggacgagcgactcaaataatagctaataagttttttgaaggtgaacaaggatcaattcgcctggagccatggagatatgatagggatcgacccttctattatccgtgatcatttaaatattgatccaaactacccagcgaagaggcagaaaaggagacccttggatttcgagagacaaggggcactaaaacaggaagtgaa

SEQ ID NO: 336317 - DNA, 867 bp, Cannabis indica
aattgacacgtggcatttatttgggcttaatagatcaattagaaagatggaccaacagacttacagaaaacgtgaccttggtagttcttggattaattgtccagataatattattatgtttaaaccaattgttaaaaagattatttctcttttagctgttgttggtggtagttcttattgtgccatttcgcgtgatgcaaatggtgtggcccatgcactagcaaagtctgttactagttctataggggttcatgtgtggactgatgtttgtcctagatttattagtgttcctgtaacagctgatttgatttgagttaataacatgctttccttcaaaaaaaaaaaaagaagagaaaagaaaagaaaacgtgaccttggggactattaatgctagtttttgagattagggactaatctgcatcaactctaaatttttagagacttttgctgcaattattccttttaattttaatgttttactactttttagtttttactaccaaaaaaaatggtaaaagcacctgtattttaacatctaatttgtttgttgataaaaaaaacatctaaatttttgtaattgtttcacaaatatacaaaaatacggttgtgcagagttttaaatatttttatgatttttataattttatttacaaaaaatacagtatttttatgttatacttttgttaattttttattctctgtatgttattctttgttgctgtttagatgttattttctgttacttatatgtaattttcttgttatttttgtattattattataaaaaatcgtaaaaatatgaagaaaaaaaaagctttaaacataaaaatataattttttttattttttatttttatatttccttac

SEQ ID NO: 336318 - DNA, 1146 bp, Cannabis indica
aaagttcttggcctttttccatttggggaattgacctgatcggacaattacccaagggtaaaggtggcgtgtattatgctgtggtcgtggttgattacttcaccaagtggactgaagccgaaccattagcaaccatcacgtccaaaaaagtgcaagacttcattgtgaagaacataatttttcggttcgaatttccatgcaaaatagtcttggacaatggcaagcagtttgatagccaatcattttagatttttgtacaaaccatgctatcatcaaaagtttctccacagtagtacatccccaagcaaatggtcaagttgaagcagtcaacaagacattgaaggataccctaaagaaaagacttgaggatgctaaaggaaactggctggaggaacttcctgaagttctatggtcatactgaacaactgagaaaacaacaaccggacaggctccattcgccatggcttatggatatgaagctatgcttcctgtaaaactcaaaccaccatcccacagaagattgacatatagcatagaggccaatcatgtactccttgctgaatcacttgatgaaattgaagagaagcgaaccacagcaaacgtaaaactgatagcccatcagcaaaaagtagctcggtatttaaacaaacaagttaaagctccataccacttgcactaacataaaactagaagtgcatttcaatcaatccattgtcttgatatccatatcaagtgtagggtgtttgactaaaaccaaataacaagaactgtaacgcttgtggtaagcaacttctatctccaccattacttcctttgtgttcataaaacattatgcaacatcattttctaatgtattactcatctagggatactgaattctttactgtatgataagtgcatcaaaagacacatctctaattctatccaaaatggaatagagataaaaacagttaaaaaatttctattgcttttcgaaacaactaatttatttagcttcagtggtggaactaaattattatagacgtgtttttacatccttctagaataattcctccacccccagagtaaccaccatctctaataagttttgagttggtgtagatataaggattctaaaatatacacccatattatctaacatatagg

SEQ ID NO: 336319 - DNA, 954 bp, Cannabis indica
tctaagtctggctaacttgagatcttctcccaagtccaaatggggctcaccaattgtaggctggccaactcctagtcctgtctctccagcatagtaccggagacgagatccagttattgttcctaagggttgtcgcccatgtgtccttccttcagtgggaggcaccaatggagggtcctctcttggaggcaagggcctactattcaaatctaccgggatgtttgtgtcgctttggcaagctgtagtggccagacttgtggtgcctattatggcaacatgattgaccacattagtagtgttcataggaattctagttgtggctggaacatgaacattaggatctgcagtcggtgggtctttagggagacctacatatgtagaaggtgcaatcgaagttcttcttgtgttaacataaaccatggaatttgatcagatacaatatccactcgctctcaatgaaagcaccaaactgttgacctcgaaaagtgatcaatcgatagtggggtcgtatgaatctgatatttacaacgtgttacacaattagaattagaaagtaaagagcgtacaaaattttatagaggttcgacccccttagttaacgggtaatgaacaactcctcttttagttgtattgataccgagggataatactattcaaatcactataggtgagatctgatatagatcccttaagggtacaaagtatgaatcaaagatggcaaatctcaagcgttgagaatgtttgtatgggcgtgtgagagagtgaagaagagagttatcagacttagagacttaggggctgtttggtttcataaaactaatagggattgtttggcaaaattttttaaaaacagtttgttaaagcttaagttttaaaaaaactaaaaaacagaaacatcaaaatgttgttttcaattttcaaaaacaatttttttttttgtctaagatattatat

SEQ ID NO: 336320 - DNA, 525 bp, Cannabis indica
agttgtttaaacatactttttctattataaattattataaacttctcaaaatcttacaatatatattaaataacaacatgacttaaagaatatcaagtgtaatatcttatagaaatacttttatttttatttttattcttataacattttatatgtttaattttggttgtcttaatatttctaaaatatctatttaggataattacataaaacactatcttttgtaaaaattttatatttttacgtttatttctttttatatttttacagtattatataaaaaaaaaaatacaaatacaataaaaaaatttataaaaataacagaaaaataatattcaaataacaaaaaataatatacaaataacaaaaaatacaataacaaattcataagagtacaatataaacatacatcaaatgactgcattttctataaataaaatcataaaaattgtaaaaaaaaatatttaaaattttgtacaaccatatttttgtaatttttttttgttatttttgtgtatttatgaa

SEQ ID NO: 336321 - DNA, 1172 bp, Cannabis indica
gtaatgggttttatttagggcacaaaacccaacattgggtgcatggctctcggtcctcgcagtcggaatctgagtcatcccctttttgcctccgggagacccgagcaatgtctttacgcagtattgccaactctgctaaaattccttcattcagtgtccccccagagaccgctggtatatgtttcttcttgtccaggtgatcccgtagatcgtcgtgcttttcgtttattttctgtcttaagtcaacgggaggatatctccggtttccccttcctctttccccgggtttttgttgcacggacacgctcttttggtcctctcgatcctgagggccaagactccctgttaggagcttgccgctctgcggacctttccctttcgggaaatcagagcgaacctttcgcggatcctgcacctttttctttctccctgggatggaagtggggtttttcctctagttttctttagagggataccgtataggacttggtcccgtggtcttgggtttctgagtgctcggtgaggactcttccggcgttttctcgagtcctgcttggatggccttagggtgtatatgaatcactgatggctccatggctttttgcatggcgaccatcacctcttgcatctttctattttgttctttttgggctgcgatctcaacttcatgatcagcagccttttaccttaagagcagcaactctgtgtaactgccttcgtcgtaggcatcatactcgtcaaaatttccctcgtactcgtcatcgttggcctcctctcgttcctcagagtcctcgttgattcttgaggccacttcctcgccctctggattttgagcatcttgaggaggacggggctgacgcgtattgttgcgagtttccaccattattgcttcaacttctaagatttttgtctgtttaaagacgcttccttcaactctcaatgaaataaccaaaatgttgatcgaggttttcggcaaccacttaaataatatgtaagaagagctgtagaaagtttaatgcatgtgatttttacgtggttgggccattaatgagccttagtccacgagtcttttttattaatgagagtatttattatagagaatgttcttggcgaatttctctcttattttctctctttgattcctttaaacccagaatgttcccacccttttt

SEQ ID NO: 336322 - DNA, 773 bp, Cannabis indica
gagactaagagagaggatgagagaggctgatttcaaatgagagaaatgagagggtttaggaaaattgtttaaatgggcatatattaccaattttaataacttcgccatttaggggaaatttttttgggcaatataagcatattaattcaaatttccccacaacaacaacaacaataataataataataataaaatctaatagtttttgaagttaacattgatttctattattattattactactattattattattattattattattattattattattattattattattattattattattattattattattatttcttttgtaacccaaaactattaatattttgcaatttagtccattttaagactctataaataggagttcatttctattgtttaggggtgtagtttttagggtgtaattttggagtagaaaaactatagcaaaattctctcaacttttcttctcatattttctctttagaaattttatgagaatgattagcataatggcctaatcttctttggaaggttaccgtatgcaaagtgaggttattttgtatctttgattcacttgttgtaatatttatttgagtaatgcaagtttatattccacttttatttttatgttcttcttccatctatactatctatgctattatataccaaatatatatatagacttagtcatgctctttctatatatttttatttagtgattatagtaatggtagtattgctcatttctatcttttatgttcatttttatt

SEQ ID NO: 336323 - DNA, 1299 bp, Cannabis indica
gtaaaataaattccaacatttccatgccagaattatagcacctgcagtaccagaagtgggaaaagtaatattaaaataaaagtgaagttttttaaacagatgtcccaccggtgaagcatcaacttttagctcagaattaaaaataaagtgaggactgcacgaccaaactagggactttagctcgcaagctgtatgttgggcttcgtgccctaaaaaaaactctcttttaatgtaattttttctattcaattatcaataaagaaataaatttaatttctttacttgtttaatgtgttatttggttattgtgatcacttatttatttatttgatttataaattcatccaaatccttatcacactaatattcttgtttattgtgttgtcaacacagtagaaagtaatcaagattgtgtgattaaatataatcctatgatttatcagtctgataggataatctacaatgtagtttactttcaccttgaataagtgctatgtcctttccagggcattggttaaagtaagcttgggttggatgtatggtgtatgcattggaagggacctatattgaacttggattagatataataaacttacaataatatctattcatttccatatcacctagttgatcttagatcaaattatctcaatccagagaaagttaggttctagttcaattgtattatttgtgttcttcaatttattcgttaaatttgatcgaatggatcttcttgtaacatatagaataaggacatggtagttcaattgcatgggagcgctaatcatagatacagaatctatagcttctatccggacatagaagtaaaacgatgatttcttccgagcttgggttaatagagataaatgatagaacgctcattttagtgataatatagttcactgaattataatttataggtagctaagtgttttaaggataaaatacattgaagggtgtaacggtaaatttgtccctactcaatgtaaatcatctatagaggatcatttgttattaggattaaaacaaatggataactcatagcgtatctatatcgtggagcatatagagcattctatataattgagagtgcaattccaaatctatagtggtgcaaggagaaattaataagttagggaatttactcgttaaattctagatctgcctattcgaagctcggttatataggcccatggtcccccatactagttgagacaaactgcttgtaagactcagttattgattttaataatcaatttaaatctaaaattgaacatgtctagtttatgattttttcac

SEQ ID NO: 336324 - DNA, 737 bp, Cannabis indica
tttttttaattacgaagttatcatttatatattttttatttattctaaaccaaaacaatacactatattttacaaatactatattttaataatactattttaaaacatatttaggtgattgttattatttttttttattttgatattaaaaggggaattaggagtgcaattttttaaaaattatctttataatttattcttagtttaataaattgtacaacaaattaaaaaaattataatgtatatttttacaagttaatctataaattggtaaaattaaataaaattgttaagtatagtcaatataaaatattttacaaataaattacaggtccaaaatgtacaaatatattcaataatttctagatttatacccaaacccaacaaaaacacaaatctgccaaatgtacaaatatattcaataatttctagatttatacccataaccaacaaaaacacaaatatggaataacacaaatctgaaaactaattgagcaaatgaaaaacaactaatcaaagaagagaaaataaaatcaaccagcagaacattaaccaaagtatcaaaaccaaactcaagcccaatacatcccgatctccccgcccaccgcctctgcaacccagacgccggccaactttgcaaaccccaaaacaagcttctctgtcgatgatctacagagaagagcgacaaagagagagagaagatcaatacagtgagagagagagagagaaaagccata

SEQ ID NO: 336325 - DNA, 865 bp, Cannabis indica
tcacactgtctgtttatgtgaatgttgatgtagtctttgtcgtctcttaggttgtagccttgaagttccttaacattccctcggctgtgtttcaatagaggcagtcttgttcatctccttattttgatagcggaggaggccttcatcaactccttagctttatggcatcggaggccttcatcatctcctcagctttgcagcagaagaggtcttcatcatctcctcaactttatagcagaggaggtcttcatcatctcttcaactttacaacaagggaggtcttcttggcgactgtcaacaatgtgttgtagcagttgctggctgctctttggtcaattaagcatgtgaccaactctcgaattgatatactcaagatgggggtgatgccttctccgtcttgggttcaccttagagtgattctaggtgcaatctctattttatccttggtctttaacgttagaggtcttcattggaagaggccttttttgtccccttggctatcttgacagcaaaggaggtcttcaactttccctcaactgttattacagcgaagaaggtcttcctcatccctcggatgttaacacagtcaaggaggtctttttagtgtatgtcaacgatgtgttgtaacattcacattctactatttggtttcttaggagacgatcgatatcagctgctgttgataacttgacagaaaggtggtagataatcgagatggcttggaggtcgctaggcgctgaccttccaaggagacttggtatcgatgttgggattaattttaccaggatcttagatctactcacaagtatgttgatttaacaacctaaatatgaacttctaaaacgataaatgaaaacacataaaa

SEQ ID NO: 336326 - DNA, 669 bp, Cannabis indica
tttgggaactccaattcaactttttgagacatgcctttcatagatccaaaaattaaagtcaggacattagtttagtagtttttctacactttttttatggattcgaaacagcccttgttttgattgattctggtcgtcttctcaggtgaattcgccagaattaatggtggttctctttctggttgaattttcgttgcggttgcgttgggttgatgcgtagttgcacaatagttgcgcgatggttgcgtgatagttgcccaggatgcatggatcctgggttaaaggtgtgtgtaagtaatatttgtgtaaatttttttatttgagttgtatatttgtttatttggtcagttggaagtatttttgtaatattgttacttttttttgttaaaactgaaaaaagccccccttttttttgacattaggggagagggatttgaacttgtgaccttctctttgtgagaagaagcgtggaataggctatacctataaccacaattgtttgcggtaagaccctcaaaagtttaatcttgctagtaattaactgccaaatctcattttctgatgataaaatcccttaattgatattttgttagcaattagccatttctggacatttttagttgttaactacccatgttggactattcacgtgaacacagtgtacacgtg

SEQ ID NO: 336327 - DNA, 587 bp, Cannabis indica
agctctaatggagctgcaggaaagcaatgctattattgcaagaaggagagccactttaaagatgattgtttggctttaaaggctaaactgaagagagaaaatcatcacaactccaaaaggcatggagttgttgatgttgctgatggctatgagtcatctgatgcactcgtagtgtcatttgatgcacttgtgatgtctagatcagatttaggtggagattgaattttagattcagtgtgttcatttcatatgacactaaacaaagaactgtttaggactctttcagagagtcatgggagcacagttcttcttgggaacaacaaagcttgtgagatcaaaagtgtaggaacaatcttgttaaagaatcatggagtcgtgaagaccttgcagcaggttaggtatgttccaaatctaaaaaaaaaaatcttctctctattggtatgtttgataaactgagttaagttttcaaagttaaggaaggtgtaatgaaaattgcacaaggcaccgaagctgtgatgagaggaaagttgagtaatggattgtatttcttggatggaaagacaatgacaggtagtgcagcacctgtt

SEQ ID NO: 336328 - DNA, 636 bp, Cannabis indica
tgaggctgaaatttggttaacgaaaatctgtgttaatagttttgtgctttcattgagagcctctgtgaaaaaactcagaaaaagccttcccctctttcaaagaaaaaaaccttctcgtttatggccgaaaacccaaagaatattaacaccccacatgaggaaactaactgttgttctggaaaagagcctatgggctctagaagatcaactaatctgccgtccagaaggactacccgttccaagagggcccaaccagaggatggtcccaatgctcggaccacacgtcctcagagaactcaacccgacgttggtcctagtacaaggacaacatgctcaaggagaactcagcgtgggaatggtcagaatcccaaggcgggggatgaggagctcaattgtaggggtgcacaatctatgggagaaagaacttatgaaaaggaaagccgccgcctgagatgtcgtctggaagaggcgcaacgtcaaaacgctgagttagagcgagaggcagcctcgagcagggcagcacaggggaggaattctcaaaatcaacctgaacttggagtgagaagactgcgagggagcctcgagcagggcagcacaggggaggaatgctcaaaatcaacctgaacttggagtgag

SEQ ID NO: 336329 - DNA, 1663 bp, Cannabis indica
atcggccagaatctatggttgagtgctacatatctaaagaggctgtaaaatttggttcaaagtacatggccgaagttgaggcaattggaattagcaaaccaagaactgacccaaatgaggttgatagaggattaagggggaaaggaacaatggtgaaagtgtccaaacttgatctagatcaagctcaattagttgtgatgaacgataatgtagaggtttagccatatataacgtaagttgtaggtagcttttcctttgattaacatttaattagtcacgatgaacaattacttgattaatctttcatgttttgtagtgaccatatggagatattacaatcaacggttacaagaaattataaaaataaacaaaaatggggtgcggacaagcatcatcaaactttcattgggtggttaaggaatatcattcaagtaaagttgaatgaaacgaatcatggagtatcctatgagctgagtcgtattgccctatgactaaattttgcggtagcaaaggatgaagcgtacattgtgaggggtaaaggtttttatacaaatcaagagatgatgctcgagaggtttaaaatagtggcatacgtattgtcgcagaaactatgcattttataagtgcaaaagatagaaaccctcttttaggtaccatgacatattatggggttcttgaaaaaatatgggagcttaattattttgcgttcagaattctactttttaaatgttcttgggtttacaacagtgttggagtaaaactgacgagcttgatttactttggttgatttaagtaagagaggaagcaagaatgatctaggctagccaagcagtacaagttttttacatttttgatccatggccaaaataacattctgacgcaggtgctcgggagaccagagcatgtggacgtgtcagggctgctaggtgtactagtacttgaaaaatattttttcattagttatacaaaataaattatagctaactttatttattgatttgcaagttcattgccaaggcatctaaactgtttgacaggaagaaaatagaagtttttgatgttgtggctcagaaccagagggagattgacaaattgaaagccgaaatcaaatcccttaaacagaagaaagatgttgccgaacaagagcagaatgaggatgaggatgagaaagaatcacaggtggctcatcaagcatatgttccacaacaatatgatcaggaggatgagggtccacaaaattatgctcaggagtttgtttctctaaatgagccacctctcatgtacaatttttgctgaacagagggcatctaagcagcctatattttctctatcagacaatatcgacaacatagtggccccagataatctgtacgaacatgagagtaaaatcatagtttacactaagccctatgatgattcacatgcttgggttctcatttcaaaaatggtgcaagagaatgccgaaatcccaatctcaattgacgggtgcagatgcgttaagaaagtagcgaacatgttccttccttggactaaatacctaattgtaacactcgaggtaatggtttgttataaattaattattaatgattagtggagtttgaatatcttaaatattcaaccataatgaagtaagttctgcgaatacatatgctgcagtcggatg

SEQ ID NO: 336330 - DNA, 616 bp, Cannabis indica
ccctttgagcagcaagaaaaagtggatttttctcttgtgattcaagtggtttccatcaagtttagagtgattctagtagaggtaattttgtctagcttctctacttttgttttcttgaatttttgatgaaaaatggtgtaatgcatgcttagtttaggttgttgttgctgtgattttgttgttgtttgcagaggtttaagcatgattaattgaggttaattaagctgcttgtgatgcatgatagttaggttgtttagagttgtggaaattttagctcaaaagtttagttttcaaagagaattttcgaaattggtggctgtagttgttgcatgagtttgtgtatgttttctgcagtttctaaatgcatgaatatgtgattttaatcaaggtttgatgcatgatagggttgtttaaccaagtttgagttttgaactcaaagcttggagctttaatggtgatttttaattctgtgtgttctggactgttttgttgctttagaaatgttctatgggatgtttagaacaggtctggaaggtttgggttaaattgggtttgaattgaatgagttatgaatttttgaaagtggtctgcgaggaaccggaattccggttgtaca

SEQ ID NO: 336331 - DNA, 1068 bp, Cannabis indica
ggtttatgtaatccttgaagtagtcacagaggggatttatggcacatgcactgatgtgttcaagactccagacacctatgccagtggagccgctggtactagtttcaccactggctcccttaggggtctcacctgtaaggtgcgcagggggtaacaactaaactcaccagcttgcacttacctaacttggcatacttgcccaagttcgattccacaggtcctcagtatatcacctgtgtagcctgagatagttcgcaccttcgattctattaactcgccctcaaaggtgacgttaggatcctggggagtctttggtgtacgtggcttgggagacattatttcaaaatctaagtcacctggttcaaaagcaatcatgactttgggtaaaattaaaggcttatccaaatgaataaatgacacactgggaggttctggtcaagccgcatctcacaagaaacggcatttgccttcaatgatttcttgcaagaagcgcctgtggcgactagcattgtcttcctgataggccctcactaaatgttccctaaccctagaatcgtttaactctaatttggatgtgggttttgaagggttaggtttataagggacgactgattctgtaggaacttcaaattctaaatcttctggacgataaatttatgatcgagattgggacattgctgcaagaagaaagcaatcccaatccctggaaagaattttatcaaacctaaaggtggcgagttgaaggttctgagaaaacctacgtattgcctgaaccctaatgttgacccaaatacatttcaaccctaaaaattgctaaaaccaaatgagatggtgacgatacaaacaaatgatgcagcaattaaacccaaaaatgcaacgtaacaagcttgtaagatatagagaagaaaaactacttactgtttgaagttaggatttaaggcgatagatagctcttcggcctgcgaatctttgaatgcagtgaggatctctttgagaatgtgaagtcagaggaaactcgcagaaaaaatgtcaaggacagggatgccatgcaaattctcaggcaaactc

SEQ ID NO: 336332 - DNA, 1655 bp, Cannabis indica
acttaaaaagcaatcaagctagtcctacctcgactctctaattcggccctagcaaagttctgaatcttaacactggatgcatcatccccgagatagctgtccgagggacggaaccagctagaagaaagataggccgaaggatccaagggaacgggcaccggaggtccagaacccatccgggaccgacctaaataatctcctaagttggagaaataataatcctttgcatgatccccccaccgggtcgagggcatcctaaacctaaggagacgttcatcgaaccctacaggcctaaggctagcatattcgcgaacagaagggacgtaatgtattgttaaaggggacttaccagagccggaagtgctggcatcaggagcccccgtattcggcacctggacggtaggccttggcctgggagccctcttctcaaccgggctcccaatgcgaaggggtctcccggcagccgcctgggtcctcctctcaactgggctcccaacgcgaagaggcctcccagcagctgcctgggccttactgtacgccttctcctgggcattccggtagaggtaccttcggtacttctcttctgctgtggcaatgatctcgtcccgaaaggtcttctccgtggccggaaccctcacgttcgggcagataacctttgagaggttggagtcctccaccgactgatgccttaggatcagcttggccttccagcaattctacgtcgtgaccaatcccccgacgtcaagatccttcttgtcataagtggcgaaggtcttggcccgctggaggaagagctgagtaggcgcggtccgctcgtacggagggatcctaacccattccgtgagaagctccgggtgttccacagctcggaacccggagaagaagaagaagcgatggcgatactccttgatgtgtttttgttggttgaaagggaccgagccctcattcaaaggatgggcccggaagccgtaaaagccgtccttaaatttgtcccccttcttggggacagaaacgagttcataaaagtttaagatctctgccggactgggagagccccatccatgggtagagtaaaaaataaataagcctgaaagcaggcggtaagcttgtggaataagttggtatggcggaaggccgacaaatacaaggaaatcaatgcaataatcctgaataggaagcatagccccagtcatcaaatgcgtctggctccaagctccaaagcctccgtaattgtgattgggcgtctccgggtcacggggcggccggtggtacgtcccggaagtcgcaggcttgatgccgaccatcaccacaatgttctccagttggtgagggcaagtcaaggtggagtgaagctcggccgcttcccaccccgtagcacgaggtttatacccctcctgggcgacgggacccaccatcacctcttctagggtggccaggcactttcctcccttctgggaagatttggaaccggatgtagacattttggttctgaaaaaagagttaaaattccagcagtcaggccccataccaaaccctaaaccaaaaaagggaatgggagtcccctaaccgctgggaaaaggccccctccggacagttgtcaacaagaaagccttagaaggatttcctggacaaaagtcagtgttgggttttatgcc

SEQ ID NO: 336333 - DNA, 608 bp, Cannabis indica
gttgtattatttaatacataacaaatggtctgtattagcttgtattataatatttacaaaggattcagggtcaatcctattctccgacccagacccacacctgggacacaaacccgaacccaaacctgggtctggtttaaggtctatatcccagacccagacccaaaattggacccggactcgggacctagaaccggacctgagtcttaaacccaagacgcgagactcggacctgagacccagacccaaacctagacccaaacttagacccggacctaaacttagacctaaacgtggaacctagacctgggacccgagcccggacgcgaactcaaactgggaccaagactcgagactcagacccagacttgagaccatgaccaagatcgagattggaaccaggacttagacctaggacctagccacgagaccaaaacccaaacccagacctaggacccagactcgagactcgggacccaagacctagacctagatccacacctagactcgaacccgaacttggaccccgtacccggactcgaactcggacccaaccccgagacccagacctggacctggacccagccctggacccagacctggacctg

SEQ ID NO: 336334 - DNA, 1106 bp, Cannabis indica
aaggcctgcagtccaggttccgaatacgggggctcccgatgccagcacttctggttctggtaagtcccctttaatgatacattacgtccctcctgtccgtgagtacgctagccttaggcctatagggttcgatgaacgtctccataggtttaggatgccctccactcggtggggggatcatgcaaaggagtattacttctctcacttaggcgattatttaggccggtcccggatgggttctggacctccagtgcccgttcccttggattcttcagcctatctgtcttctagctggttccgtccctcggacagctatctcggggatgatgcagccagtgttaagattcgggactttgctagggccgaattagagagtcagggtagggctagcttgattgctttttaagtgtacactgctttcacagatattctaacacttgactcttttctcttgttgcagcagccgatcccatggatgcgatcttggccacccttgctggagcccacagtcctgatgtttcccctcctcctacttcttcccagttggtcacccccgggaaagcttcttccagcgcccctccgaacactattgacttagtggacgaggaggaggtacttcttgaggaagctgaagaaggtgaagaagagcaaggggtacttcctgaggaagttgaagaaggtgaagaagagcaagaggttgctctcgtgcgcaagcgtaaaggcaagatggtagctgaggagtcttctaaacgcccgcggagggtggacactccggccccgagtcatgactccgggatcccctccgaggcagaggagtatacagtgcctcatggcattgtgttgactccgatccccggagatgaggagaggcagaatcttcggatagccaaatataattacgcccttgacgagtacacccgggggcacgctgaggtggaggccttgaggagggtcttacgagaggagttgcaaaactctcttaacgaggagaactttcggaatctgtgggatctgaacatggaccctctgaccgactggttcaaccgtttcctcgggcccaccttggccccttttgcctccgagatgaccagcgagtacgtctccca

SEQ ID NO: 336335 - DNA, 489 bp, Cannabis indica
gtaaaataatttccaacatgctgggcacgagtgcgagttgaaggaccagttggagtagaagcaggaactgatgcagcaggaggagaaactgcagcaggtggaggagattcctttgaagatgaagacgatgaagtccaggttttgtatgggcgcacagattttcgagccacttgcttaggaaatcgttttggcttctcgggctgagattcacgctgaggaagtgatgagtctcctttttttgcagcagcaggaggcacggttgaggcagcaggaggaggattcgagggggttgcatcggtttcaaccacctttttgcgatgccctaggttctttgttctaaccatagtgatttgagagacacaatgaacagcaaacaaacaagaaaaacaaagagatagaatcaggtaggtggtgagaatgattgacaaaaattggtttaaataaacatgggtgagttgagcaagaaggaaaccaatttcaaaattttga

SEQ ID NO: 336336 - DNA, 711 bp, Cannabis indica
tgtaactataatgaataccgctgaaaaaaattaaaaaaaaatattttgacatgtcatttcagacgtaaaggttgattaagagattgtaataggagattagcactcttcaaatttaatatgttatttaatgttcacttaatactttattaaaaaatgtaaaataataataataatacaaaattaaatgtaaaatttaataataatgtaagtcatttaatgcaaaggagtatgttagttaaaatttaataataaaatattaaaaatagcacaatgataaatataaaatcatattatttattgtgatacaaattttgcattatgctatattgtgattcaaattaaatttttttattatgtgagatttttacgaattaaatttacatttttgttgcagctgttactataaattttgctgtgttgatttggttaactaaaatgttgcatgccaatatattagcatctcaactcataatcataaaataaatgacaatagaagttaaaatattgagaaaaagaataataaaatatgttttgtttgtttcttcactctattcaagcttccattggcagggtctctcttatagcgtgcagtcttcgtcttcgtcaacctggactggaataggtactgactggtttctgttgttgttataggatctgcttctttcttatggaatcatctccaagaacaagtctctaagctaagcattcctt

SEQ ID NO: 336337 - DNA, 645 bp, Cannabis indica
ttggtgggattggttcaagtttttgaaatttcaagaaatgggggttttgattttgaatttggtgtgtagaaatttaggtcagatggagtgaagaaatcagtgaaggaggaagcacttgaaagcttaaaggcaatgagaaccaccttcacctgctcgagagagtgatagagagagagtggtagagcgagataaacagaaaaagaaaggaaagaaaaaaaaaaagaaagaaaaagaaagaaaggaaaaaaagaaagaaaaaaaattattttttatttatattttttttaatttcaaattacttttttttttatttttttaaataatttttttacgtggaccaataaaattgtgccatgagtacactgttttagtccaacatggcacttaacacctaaaatggacggaaatattaaattgctaacagaatacaagtactgggggttttaccgcacaaatttgggttttgggggttaagtgaaaccaagataaaagttttgggggttttgccgccatttacccttaataaaatattaaaatttatctttcattctaaatgagttggttgaaacaagatgtcgccaaagcaacctcttttgtgtagattgctcataagaaatgttagatgtttgtgtgtgtgtgtgtgtg

SEQ ID NO: 336338 - DNA, 802 bp, Cannabis indica
cttagcaaatttgtttcaaaatcaacagacaagtgtgtcccattcttcatatcttgcgaggaacaccaatcgagtggacagaggaatgtgaaaaagctttccaagagctaaaagcagaactcgcaaaacctcccgtactcttacaacctctggacggagaaaaacttggaatatacttagctctcacggagcatgctgtcagtgccgtgttaatcacagaagagaacaacatacaacacccggtctattacatcagtaaaagactcattgagggtgaaggtcgatacccattgatagagaaactcgcttattgccttattcttgcaacaagaaacttaaggccctatttccaagctcatcctgttcgggtgtacactgacaaaccattacgccaaatattgcaaaagtcagacacctctggacggctactcaagtgggcaatggagttgggtcagtacgaaattactttccaaccccaaaaaacaatcaaaggccaggccttagcagactttatggtagaatgcacgggcaaagaagaaagcgtaccaaaaagcaacctcgagccggcacaaacacctcggccaagtaacactgaagataagccgacatagatactacacgtagaagggtctactacagatcagctatctggtgcaggaattgcccttgtcacacctagggggcaacacctgcacgctgcagtgaagtttggatccaaagcatctaataataaagccgagtatgaagctctaatcgctggcctaaagttagcccgagagatgagagccgagcacattgaaat

SEQ ID NO: 336339 - DNA, 776 bp, Cannabis indica
gaacatcaatcaaaggccaagctttggccaactttctaattgaaggaataatctcagaagaagacccatttgtcaagcacgatattgaaacttggaaattatatgtagatggggcttcgaacgagaatggctcgggggcaggagtcataataatgttgcctgacaacttcaaattccactatgcattaagattcctatttgaaacttcaaacagcaaagcagaatatgaagctttgttggctggctttagaatagccgaagcaataaaagttaagaatctcatatgctatagtgactcacaactgattgtgaatcaagttctaagtgaataccaggtaaaatgattaaagatggcaaaatatttagagaaggttcggaagaacttagaaaagtttgattattttaagattgaacaaattctaagagaacataactctaatagcgatgcactggcaaaattggcctcacaaaatgaactcgataagttgaatttggtactggtcaaagttttgagcgacccaagtatatgtgaaaaggaataagttgagatgatagattcttcaccaacatgcatgacactcattcaaatatctactcaatgggaaacttcctacagacaaaattgagacacgtaaactcttgtattcagtacctcgctatactatagtcgagagaaagttgtgcaagagaggatattcaattcctctcttacgatgtgtgttaccagcataaaatactgaaataatcaaagaaattcatgaaggcttttgtggaga

SEQ ID NO: 336340 - DNA, 694 bp, Cannabis indica
gactagaagtgtgataattcattcttcgtcatgaaactcgtttttggggagaaacacttaagaatgcaacataaattctgaactgtgtatcaagtaaagtataagttaaaactctttataaactaaggttgtggttagactcatagtctaacatatagatatattctatttgtggatgttcaattaagatgaggtcttataagcctcataaaaggaatacggactccaaaatagtaaggaactatactttactgtatactctagtaattaaaaaagctacaatttttgtgatcccacattatggttcaattttgagacgagaaactttaataattttgaggatgttgagtttgggggagaaataagattattatagatattgttcttgagaaggaattgacgttaaactcaattccaactatcacttttgacaatgtttaggttttcatgactttcattgatcaataagtgaatccagaaccttgataagacaatatcaaacaacttctcattcaagatatggtaaatgtttcagataatcaaactcaacaacctcaaaggtcagtgtcattaaagaaatccatgagagaaaggacataaggaaataatggaatgatagacgatgatccaatcaacttttatcatgccatgaaggttccaactctcgaaactggactgatatcataaataaaga

SEQ ID NO: 336341 - DNA, 729 bp, Cannabis indica
gggtgagtttgaatatttctaccgtatgtattttttgaggcgtatttattgaatacattaattgctttataacacgagctggtttctttacacgtgtcaacaccatattattgctcaaaatatgggcataacaaaggcataaaataacaataatttattttattttgttgttagtcatgtaattaaaatatacactattctatggaatacaatatacaatttgattctatggaatacaatatacagtttattttattttgttgttagtctcctagctttgtatataaatatacaatattctatgaaatacaatatacaatttgattcaccattcactacatggtattagagccatacttagaattgtgattcaaaatttaaaattcaaaattagagttcattaaaaagtaagattagggtttgagtttagggttcctttttcagaaaccctagttagagtgcaagttctttctcatcgcccacatagacggattacccagccaccgatctgtaaaaccccaaagtttgacagttagtatcatcgcacgtgggccccacgtgccgcttaactctgctgcccacgtgccgccgcatgagggtgcgtctaacctcttttctggtgacggtcactgtctgtcaagatcccaaccttttcccgacctccttgtatcggtctctagcgattgttgtcattttatggtttgatacttttgccttcttcatgtttgg

SEQ ID NO: 336342 - DNA, 590 bp, Cannabis indica
ctacttgattgcgtgcacttgcgtagtgatcataaatttagcaacaaaaccgcaccacccgcaccgcgaacaccatgcacttgagatgtggcatgatgatcgatgctcataaattgttcgacgaaatgctggagaagaactcagtttcttggaacacaatgatattcgagcttgttgatgctatcctcatgtaattaatatctcaaaaaaaaaaaattcaatgatattttagtctggacattacattctatcatccttaaaagaaatttcgtccttcaaatttaacttaccaaacactcgaggtattgtgtcttcataaccttcacctcttactacattttctccctatctaccatattgacccaaaaaaataagtatttaacttttgtcttatcgttcaatcaacaatacatattatatatacaacttaattaagtattgttattcctccatgcattacttgaataataaaacacactccatcaaaatgacttacacatacattctttaaatacaagttttacaattacatgctcttaatattataaaagtttttcttctcttatgaacatccttatacgtcattaaga

SEQ ID NO: 336343 - DNA, 2069 bp, Cannabis indica
aattgtttaaggatttcaagaaacaattacaggcagcgagagataggcgacctaaagtgtcgtcccgcgagtcacttaaggcttacctgactcgctttagtattgccactactaaagttagaaacttaaacgacagtatccaacttactgctcttcaagaaaggatcactactgacctctatatagctagggtaagctatgggacgatttgcaaggtcgcctagtgaggaacatcaacgaatttaatgaaggagctcaggtattcgtatagaaagaagaagcaaggaacgagataaaattgctaaagactagctcgggaaataaacccaactctgttatagcaagcactgtctcgacaaaggctgacaatgcaggtggctccaacaccaagagaaaagatgactctaaggatttagccaaaaataagaagaaacaaaaaaagcacaacaagtatgtgccaatttacactatttataccgagcttaatgaaactcgggaaaatatttttctcgtaaatgagaatagagttgcattttgcaagcctgagccagtgagacatgcgagacacaaaagggacgcaacaaagttttgtagatttcacaaggacataggaatacaatggaagagtgttgtcagttgaaagacgagatagaaagttttatctcgcgtggctattttcaaaagtatgcgagacgacaaggtaatggacaaaaccagccaaatccgcccaataacccaggtaaccaaagattacaacctcctcccgtagaaggagatgacatattggtcatcttgggaggactgcatctcgctatagaaagcagtaatgcccagaaaagatatgtcaaggaaataaaaatgagcaatcaatctttgctccagaatcatctaagaaagccaagactgaagaacctctaattgtattttcagaggaagacacaaagcacatgaaatatccacacgtcgaccctctcgtcattacaattcaacttgccaaaaaaagaataaaaagggtgttggtggataatggatgctcagtgaatatcctatacaaggatacactgaagaaaatgggattgcaaaatacgaagttaaaaccttatatggtgaatttgtgcggatttaccggagatagtgtcgccagtcagggcattattcaactcccattaaccgtaggcgagccaccattatccacaacagtgatgcaagattttctagttgtcgacctaccatcggcctataacatactgttgggtcgtcctgcactaattggactagggatagttagttcgattaaacatctatctttaaaattttaaacacaggtaggtgtagtgcgaggtgaccaactgctggctcgcgaatgctatcgtatagaattacaaaatagaaaggccagccatcagttaattgtagccataacagaggaaggcgagaaacaggatgaggatctagatccttgaattcaagatgaaaagaaccaattgaaaccaatcgagaaattggaagaagttgttttagatccagaaaatcccactaatgtgtgtttatggggaaaaatctggatgaaaaactaaaatagaagttgttataccctaaattcggctggaacacacgtgtcaaggtaaagagaatgtgaatcggtgtcatatctttttatggaataactcattaattgcgtaagtatcagagtatatttgtaacacgctgattgtaaggtcttagggggaggaatcgatgtacgaactagtacttagtgtataacgagaaaccatatgtcgctaaagaagaatagcaaggcaccagagaaaagtaataaataccctagcttgcgataagcaaactaagactataagtcgaatcggctcgaagaacaagaatgcgagatgaccatctcgctacgaggaagctccctataagttccatccaactaacaggagcgaggctcatgaccctggcaagtcagaagatttccatatatccgcaatcgatgtaaaacacatcaagtcaacctcggaaagaatgatggttccagctcgccagcgggatcactacaatcaagtttttgt

SEQ ID NO: 336344 - DNA, 689 bp, Cannabis indica
agtaatccaatggcttaaaaaaatgtaaccatgatggttacaataaaaatgtaaccattgaaacctcttccttaattaaatatatctagaaaaataccataagtctacatagaaaataactatgtagatatttcataaactaatcattaattttctaattaaaatataatatattttagtccatttattttaataaatcgttaataaaaattttacttgatttaagttggtctataattaattaatcaattaatttttagcttaatctagttttcataattgaaaattttcaaaatatttacatttaaaaataaatgtattttgaaatttataagggaaatgattattaaaataaaataaattatattatgaaaattattgcaatttaagttgatctgaaattgaaaaatttccagcttaaatataatttaatatttaattaaattcattaaaatagaaataactaagtatctagaataaaatcaacttaattattaattctaatttaatatctaagaaaatattctaatttaagttggtctaaaattttaatttcaacttaaatatattttctagttaattaaatttattgaaatagaaatgaataattaagtatcttgattaaaatcaacttaatatttaattttaatttaagttctaggaaaatattctaatttatattggtgtaa

SEQ ID NO: 336345 - DNA, 612 bp, Cannabis indica
atcctcggtttctcctaggggaatgatgctcggcgtttgctggcctacagtctgataggctcttcgtatcagcacggtggcttgccgactacgatcttcaatttcttcatggtgagcccttaatgcctccatctctttgtccctccactctgcgaacatacgcctctgttcgtcaaatgcgaggtttactgcggcacgtaattcctcttgatcgtgatgcagggtattgttgtgaaactgcatgagtccgagcgcagcgcagaggttttgcaattcagttgcgtcttcgatggtcgtttgggcgttgatgcctggtggaacagtcatgttatgaatgtcctggctgtgtgtggaaccgttgttttcggtctcttgcacaccaagcacagtttcagtaacaggagtcgtctcaccattcaccacgcttaggattgacaacgggtggaacccttaaactccctaggtcctgcaatgtcggatccagcgtctgtgagtttgctgggtcggataggcctccacgagtttgtaccatcgtgtcgagtattgaaaagagcgatctgtgattctgctctcaatgaaagcaccaaaacgttgacttcgcttttagccaac

SEQ ID NO: 336346 - DNA, 485 bp, Cannabis indica
ctgtcaggggctttgatttgtcttctctctctgtcccttgctagtagatactcacttagatcatgctggtttccactttcatcactttcaacagtctcaatttctctttgactagcaggtgcaggtgtagattgaggctccacctcaatttgtacattctcatctggtgtagtttcattgttcttagaattgtttacagctttgagagccatctcttcttccttgaacactacatccctactaatcatacacttcttatacccaggttctaggcaccatagcctataacctttaactccttcagggtaacccacaaatatgcatctcaatgctcttggttggagtttgtcttgcttaacatgcataaaagcagtacaaccataaactcttaaatgttctaggttaggagctttacctgtccacatctcttgaggagttttaaagttgttgggcactgagggtgatctgttgattaagtaacatgc

SEQ ID NO: 336347 - DNA, 783 bp, Cannabis indica
aattcgtgtgtatctttatttatcgttggctaataatatccttctcgaataatcttctttgacaagctttccaacctgcatggtccccacaaaagccttcatggattaatttgatgatctcgtttgcttctgtgagaaaaacaaaccataggagaggcattgaataaccccatcgatataatttgccttctacaattgtataatgaggcactatatagaagagttttcgtgcctcgtttttgtcagctggaagtttcctgttgagaagatagttgactataggtgtcatccaggtgggagagctatctatcatctcgacttcttctttctcacatatacttggctcatttaacaccttaaccggtaccaagtttaattcacctagttcattttaagaggccaattttgctaaggcatcgacattggagttttattctcttggtatttgctcgatttgaaataatcaaacttttccatgttctttcgaatcttctcgaggtacttttccatttttaagcccttagctttatattcccctgggacttgatttacaattaattgtaaattactgtggcatataagatttttcaccttcaacacttcagcgatcttcaggccagcgatcaaggcttcatactcagcctcgttgtttgaagtgtcgaattgaaatcttaaggcatagtgaaacttgaagccttctggcgaaattagtatcacccctgcacaaagccatgctagttggacactccatccatgtaaaacttccaagtgttcgcgtctcgc

SEQ ID NO: 336348 - DNA, 965 bp, Cannabis indica
tagagtctactccttttcatggagagccaagacaagccagtctcagtcttcatcttatggtttcacaccccaatcgggccagcagtctttcaacatggggtactcacaaggtttccaaactcctactcctagtgggtgtcgaagagggtacaatcaagggggagggtctggtgcaagtacaagccatcttagtcagggaaagggaaaggcaaaagtaaagtcatctgctcaagcctgcgctcttggggttgatgatgtacagggcggtgctaactaaggagttgttgatggtatggttcttatctcacactcttgggctcatgtattatttgatattggtgcatcgcattcctttatatctttgatgtttactagtatgttaggtttgagttgggaaacttttagtcctgtgttacatttgagtgtacctatggggggacacgataaggtatcaaccatatgtaggtcaatttgtattgtgttcgagggacacaagttatctggaaacttattagtgttgcctatggggcaatttgatgtaattcttggtatggattggttgtctaaataacaagctattgtggattgttcatgcaaaagagtgactcattgaacccctagtggtgatttcattgtttatcgagccaacatgagcgcagtgagaaaaaaatcctatcttaagggcatgcttctgtggaaagagaaacttagagtgttatgggaatctatttgcgatcgatgatgactctaggaatttagacaagttcccttggatatcagtggttagtggttttctagatgtgtttccaaaggatttaccagggttaccacctgatcgagagatcaagtttttcattcatttgattcccggagctcaacaagtttctattgtgccttatcgcatggcactcacagagttggctgaattgaaaaaacaaataggggagttaatggataagggttac

SEQ ID NO: 336349 - DNA, 779 bp, Cannabis indica
aaatcgcaatgtatttgtaaaatattttttgtttcattctgaaaatatttttactggaaagtagacaaagaattaatgaatttaggattttacaaaacctaatttagattttttatgaattagttatgattttttgaatttagatgaaaatatctgaaactggatgcacacgcgcgcgcgcacgaggggctttactcggcattcacgtggcttcagacaagccctgtctaaggaaacttggacacgggctgtcttaagccagtgtcacgccgagttccctcatccattgaggctgtgtgctgcctcctgtctcggtcatgtgccccattccgcgggcgcaggggtatgaattgcatacccctgtgctctaaacttgttttcgtcatatcttttgattcaaaaatcatttttcattgaatttttttttttaattttggtatttttcctagtattaaattagaattgataattaagtttcttttatacttgattatttaattcttgtatttatgacatttaattaaattgaaaattaaatatttaagttgatttctttaatgatacttaaatattattattttcaagacatttaattaaatagaaaattattttaagtttgataattttattttgaaaaacttaaatttgaataattttcaaaaatattttatttttaatttattaatcatttaatttcaaaattgcatttttatttaaatgcagaaaatttggaactttttttttaaaaaatagattaaagttgaaaattaattatttat

SEQ ID NO: 336350 - DNA, 603 bp, Cannabis indica
agattgaactacccaagagtattggtggaagttctaatgaaccaagagtttcctagcatgctagaatttgaggatgaacatggtagtatggtctctgtgggtgtaaagtatgaatggaagccagatttgtgtgctaattgctctggtttggggcacctggttgcagattgtaaaaagaaatctggtgccaaaagggaatgggtcattaaagaagataaacggaaagagaaacccaagattgatgatgagggatttcaagcagtattgaaaggaaaaaaggtacaagaacaacaaaatggtgtgaaggtgactagtacttcaaacggttttaaggttctggatggggtcaatgatgatatggaacttaaggatatgcaggatatgcagtgggctaatgatgagcaaacaggctatacaagagaggggggaggaccctctcttggcaatggataagtttctagtatggaacgttcgaggagctaacaaccagcaaaaacaacaacatattaaacagttcattcgaactcaagaggctgggtttgttggtcttctcgaaacacgggtcaaggttcacaaactgggagccttgtaccttaatgtttt

SEQ ID NO: 336351 - DNA, 940 bp, Cannabis indica
taaaaatagagtacagtaattttaattatttttatgtattttatttattaaaataccatcgtatatatgtcgtttggataatattttactattactttatgtagttttttattatttttgtgtgtttataaaatatattaaaaatataaaaaacaaaaaattgaacttaaaaatataaatttcttacaaaaaaaaaaatagtattatatgtaattctttattattattattattaattattattattattattcaaatgtcaagtgtaatttttatcattccatggctaaaaagattggacttactccaataatttagtacagttcaatgttcaatctattatataaacaaggactaaattttgtccacagataaatacagtttgtatttacatttttttttttggaacaaaaagcttgcatatttattgaataaggagtgcatgtgtatgtatagttagtttattagagtaaataaaccctcgatcaagtaatattgtaggttcctttttcatttagaaatgaaaagtaaattaactaaagccaaaaaatatcaacataaaataaaataaaaataacacttgtgagatgaaaaaatttacttacaaaaatatcaatgatatgaaagaaaaaaaaaacgatttgagaattgttattcttaaaatgtgaacaccatacgattctaatataaatgataaatagttttttttatattacttattatgaactaataaaatatatataaattttgacaataaattatcccaatattaatattgacattttatggttccttagcaattaacatatatatgattgtgatttgtgaacttgaaaagaactttgttgttggttgtttatttggtgtaagttgaaaaatatcttttttattaatcaattaattaaatttacttttaattttatatttatttgaaacatac

SEQ ID NO: 336352 - DNA, 2487 bp, Cannabis indica
cgtaattggattggatcctcttgctttggaccaagttgttggcaaaggtcaggtttcttccgattcaagtgctctcgcagatccggttgggagtaattgctgacaaatcttgtcttactcattgactttgtctttgagtggctcgcggatatactggttcccatactttctcgatcattagctcgttgagtactttctcctcttcgagttgatcgaccatgggttttggatcgcctcgaagtcacgcttgcttcttcatgctctgttctttcctcccgaaagtggtttgtcgtatttcccccatcagggtatgtatgagtcctcactctataagtttgggaagaacgttggtgatttctagtaggtgatctccgttctcccgattgagtcctaagatcctcctcattttatgagggatttctcgttcatcagtttctgattgcctcccatctggctgttcatcctgatttttagggggtgtcttattttccctaggttgttcttcccggaccttttcctgtctcctggttcgtgagccacaaggtctgcctcgtggtcttctcacttcaagttcaggttgattttaagcgttcatgtgccgacctggccgaggctgcctcacgttctaactcagtgttcctacgctaggcctcttctagacggcatctctggcaacggctttccgtttcataagttctttctcctacagattgggcacctccacgattgagcttttcatcccccgtctcagggttctgaccattcccacgctgagttctcctcgagcgtgttgtccgcgtactaggatcaacgtcgggttgagttctttaggaagtgtggtccgtgcactggggccaccctcaggttgagcccttctggactacagattggtagatcttctggagcccatgggctcttttccaaaaagatggttggcttcctcatgcggggtgttaacattttctggattttgagccatgtagaaggttgtttttcttcaaaagaagggagggttttttctgagctttttcacagaggctctcaatgaaagcgccaaactgttaacgcagattttcgttaaccaaatttgagcctcacaatattgatttcacacagaaaaaataaaagttatcaaaataaaaaatatgaacacaaggttttttacgtggttttgcagttaaaaatctgcattgtccacgagtcaatcttattcagatttctgagtattttttagggcctctttcatatgagtttttttgtcccttttttgatcttctttgtcactatttataattacatagtggacattgaattacaaagttgaccgaaataattttacagcaatcatccctaaaattgtgggatttgattacatatcacgtagtgtaaatgcagtttatgatttggaaatcgtataactgtgattttcccgcttttactgggtcaaaactatcgtgtatcaaacacgtctttaactgttgaatctagagatgtctcgacagaaacttgattatcgtgatcccaatagcgagctggggccactcttccttccgaggtcgacaaggtatgtcttgtgtcgatcgcggttatttacacagaggtcttttgactcgccagggttgtaagcctcgctcctgttagatggatgaagctataggaagtcttctcgtagcgagatggtcacctcacttatttgttctttgagccgatccatctttttcacttagtttgttcattgcacgctaaggactttcacggttgatacgtgtcgctttctctagtacctcactattcgcatttagcgatatatggtttctcgctaatatgctaagtgccagcttgtacattgattcctcgcctaagaccttacagtaaacgggttacaaatatactctgactcttatgtaattaatgagttattctataagaggaattgcattgattcatattctcttaatcctgacacgtgtccttcattagggtggccgccgaattttgggtataacatgcgttaacagaatgtaatttcaatttttaaacaaactattaatctcgcagatagcactgaagcagccaattatcccaatctccctattgtatgtaatcaaggtgaaacactcaataattaacgcttttacctaagtagtaaatccacgaagcatgcaatttatttaacttagataaagctttgagatttatggagatagactaatctaggcaacaaatcaatgaaccatataattcatttaacttaggtactatttttcatcacaattaaaattataatttgtcacaaacacttagaatcctagactattaggtgaatagtaatcctaagatgacaatagattaaagtaaaacctaatttagcggccgtctaaacaagattaaaataataatcataacagtgaacatagaagaatagaagcaatttaatatataatggaaactagaaattaacattcaataatgaaactaagaattcat

SEQ ID NO: 336353 - DNA, 666 bp, Cannabis indica
gaacatacaagtttccgaacggatatgggtctatactgttagaaggtcatgtcatttggtctaaagaacgctggggctacataccaaagataggtaaagaaaatgttcaaagatcagattggacgaaatatggaggtatacgtggatgacatgctcgtcaaatccaggaaagctgggggcatatagatgacctagacgaatgcttcaaagcccttaggaaatacaacatgaaactcaatcccttaaagtgctcctttggggtcagctcgagtaagtttcttggttttattgttaatgctcgaggtattgaagtcgatccagaaaaaattcaagacctcttggatatgaaatcgcctacaaagatcaaagaatgccaaagtttaacttgtcggatagccaccagtagatttttttcaaagtcaacagacaagtgtgttcctttcttcaacatcctgcgaggaaacaagaaatttgaatggacggaggaatgtgagaacgcctttcaagagctaaaaggacaacttgcaaaacatcccgtactttcaaagcctctagacggagaagaactagggatatacatggttgttacagagcatcctctaagtgtcgtactgatcagggaagaaaacaatatccatcatccagcctactgttgggttttatgcc

SEQ ID NO: 336354 - DNA, 758 bp, Cannabis indica
cagataatcacatagagctcgaaacgagctttccaacgatataaagaactcccaaaacggagtcccgagtcaaaagttatggccaaaacaaaattcagcatttctcgatgtactccaaccggaattccagttgaagcagccctaaaccaaccggaattccggttgtctgggcagagaacacgaaaattttcaatctttaagcccccaaaacttactcaaatccttcccaaacaccaccaaactttccagatcattattatatgacataataaacatattccgtagctcaaacacaataatttcactaaaaatcaaaaagtgttattaaagctccaagcttgagttccaagctcaaacacaataactcaagcttgctttacacaaccaaaatcagagcttgcaatctgatttaaactcaatgaaaccttaaaaacgcctctgaatttaccaaaaacaaaacctacaattcaacccaaaatcatgctttaacccacaacatgtcaagttctaaaacttgagctttatacccaatttactcaatccatttccagcagcaaataccatagaaaacacatggttaaagctagaaaacattctcaatacttcatctaaagctcaacaacatagctcataaccaaatcatgcataaactcacttacaacaactcaaaattcaaacacatgcaatcaaagcatcacaaccctttttccattctcatccaacaacaaaaatcagcaacaataacaagaattaaagct

SEQ ID NO: 336355 - DNA, 568 bp, Cannabis indica
aagatagaaagttatccgcaataccggggggcattgaagtccctggtgagctttggaaggacataaggaagaacggaccagtagactcgatgaatgattttcttgaccgtgcagaaggcttcatcaaacttgaagaggccattcagtgggcagaaggtaagcaaaaacctagcaagtcaaaagctacttctattgggacatttgtccagctcccctattactcgagaaattcaagttcaaatggtaaacggtccaacaacattaataggaaagggaatggaaaaaagggaaagttcacccgcaaaaccgaacaagttactggagagaatcctgccaagtatactgcatttggcatactgatggaggacatagagagtgtttacatggccactcaatcactagccccgtacaagaggcccgcacccatgaaaaaagatgtaagcaagagagacatgacaaagttttgtcaatttcatggagactacgcccacgacaccaatgaatgcaacaatctgaagcaggaaattgaatttctgataagaaaaaataacccgcatgtacagaagta

SEQ ID NO: 336356 - DNA, 847 bp, Cannabis indica
acttgctagggttatgagcctcgctcctgttagttggatggaactatagggagcttcctcgtagcgagatggtcatctcacattcttgttcttcgagccgattcgatttttacacttagtttgcttattgccagctagggtctgttttacttttctctggtgcctcactattctcctttagcgatatattgtttctcgttatgcactaagtaccagctcgtacattgattcctcacctaacaccttatagtcagcgggttacaatatactctaatacttacgcaattaatgagttattccataaaattatatggtaccgattcacattccctttaccttgacacctgtcctctagctaaatttcgggtataacaacaataaactagaaaactcctcaggccgaatatacacatttagagaagcaaacatttttctttttctaccactaacagtgaagataaaataagctgtaatggctgttgtgtgcagcttttttaaaaaactatcttaaaaaaataattcactttttcgatctcataaaaattacacttaatcaagcaaatcttttttcttttactaacactagcagtgtagttaaaataaggttttaatgactgttgtgtatgaatctatttcaaaacaaattttaaaagtacttaagattaataaatattaaatatttttatatacaaactcctaatcattcgttttcacaaatgcaacaacaaatatagatgacaagcaagttttaaatatactaattgacaaccaagacttttcaagcaaatattgctcaaacaacctccatttatccaatcccaaaaaatcaaaatccaaccaaatcaac

SEQ ID NO: 336357 - DNA, 878 bp, Cannabis indica
atacgagaaaatcaactacttcctatgtttattgacaagcttgaactgtatatgttggaaggctcaattacaattcgtggtttctctttccaccatgaaagcagaatttatggcgactagagaagcttttaaggaagcgttatgccttcaggaaaaatttatgagttaaaataaatcaaaggatgagtgattgtgtattcaggtagctagtcttccatccacctttgtaagaatttggtttttcatgaaaagagcaaacgcatagatataagactctattgaatcagggagaagataaaagaagggctagttgatttagaggaagtcaatactgaagataatcatgctgatcgatattgggactaaggtcataaccttaaacaagttcaagcattgcttgaacttgatcaatctcagaagttagtatactaagattcctggaacaccaaccaatgatggctgcattctttcttcatcatcatcattcttttaatttgaagtaactaggtagaatttgtggtatagttcctccaataaaaaattctctgtaacgttatctctgggaagttgttcaatcgcagtcccagaatgagtcttgtggaatgatagtcgagcccaaaaatggattcccagatgactatcatggccactccagattcttctctcaggatagctaacttttccttagaaaggagctccagctggcttgttatcactcctagaatggtagttttgggtagtccactccagctctatcctttatgaaagcatcttcagtgagggtccgtggccctcgagtttggaagctcgttaatgttcatggaggccatggcacttaagctgatgtggagagtgtttgaatttattttaccaggatc

SEQ ID NO: 336358 - DNA, 588 bp, Cannabis indica
ctgaccattgtttctgttcgggacttgccaattcctgtttaatgggtcgtcatcaataccgtcaccaacgaccatattgatttcactatccaagccataacgagacggtttagtagaaaccctcccactacgagaccttctgaacaagaacttcagtggtagatttttcggttgtatcaacttgcaaaggttcaatcgaggaagtgggattatcctctacttgagtagaagatgatggaacattagaaggagttatatctgaaagtatttcctccaatactactttgctttgcggcttgaattcttaatatagtcatcttcaaggaaagtggcatttgtggaaacaaaaactttatcatccttgcaactataaaatagtccacccctaatctccttagaatttccaacaaacatgcaaacctcagtttgcttttcaagtttgccatctttctttcttaagacatgagccaggcacccccagattctgtaatggcataaactaggtgtacgaccattccataattctaaaggtgtcttagggactgatttagatggaacaacatttaaaatgtcagttgccatctgaat

SEQ ID NO: 336359 - DNA, 636 bp, Cannabis indica
attaaggaagttatggccaaaatactaatcaagtgacaaaaatcttttcggcagtgagctgtcgccgcgacgagcaacctcgtggttgcgacgatcgagaaaacctgtggccgtggcaaggggtcaatttctaaattgcgatttttttgtctttttattttaaagaggagttatctttttttttagtgagatattttttagtactataaataggacctcttaggttgtgaatttgataattctagagctacaaaattgagagacaaacttagagagagagcaaggaagagacggagattgcaactttgaagtgttcttcattctaaatcttttcttctccttcaactcttactaaatattatgattttcattataatgtctagttcagagtagttttcttttagttaaaggttatttcaaaaatcgagacatgaattcttagtttcattattgaatgttaatttttagtttccattatatatcaaattgcttctattcttctatgttcaatgtcacgattattattttgatcttgtttagatggctactaaattaggttttactttaatatactgtcatctcatgattactattcacctaatagtctaagtgttttgtgacaaattacaattttta

SEQ ID NO: 336360 - DNA, 834 bp, Cannabis indica
gcttatttgctacgggtgatgttactaatagcaatctttgggttaaaccagaacatgatactatcaaggtgaatgtcgatggagccatctttgaaccgcaacaaaagtttggttttggttgggtggctcagaatagcaatggtactcttattgaagttgtttcagggagtaggttgggctgtgtgcttcctgaaattattgaggtaattggtatcaaggaagcgttgagttggatcaagagtaaaggatggggtaaggtggttgttgaatctgatgctttagttgtggtccaagcaataacaagttcacttcatatgccatctcaatttggtttgttagtgaaagattgtcgtttaattttatctactttaaataatgtccaaatttattttgttaatcgttctgctaatagggccgcacattgtgttgctaaggggtcttgtttttcgtcagaacgtactttctatgagcataatgctccttcctctttacgagacattgtaattgcggatgcaagttgattatctatgataaattcctttttcaaaaaaaaaaaaatagtaaatatataataggtgtgattggtttaagatttgaaaattattttatgtttttaaaaattaaaatggtgggggtccacctaagaattattaattggttgagtgttttcaaaaacaaaatttgaatattaatttgagttttacgctaaaaaatgaaaacacattatgttttatgttttcaaatcatgaaatccaaaaactctccaattattctcttacttttttattttgagattctcaaccaatcacataaaacacattatgttttatgttt

SEQ ID NO: 336361 - DNA, 756 bp, Cannabis indica
gtgtgtgtgtgtgtgtgtttgggcggtttgggatctcacaacctagaaaatgttcttctttttgggtgaaattggttttgttggaaaatagaaaattttaggccaaaagaccattttgctcctaaggcacacacatgagcataaacacatgaaatggcaaatttgtcatttccactcacacatatatatcacataattcatattttctcatttaacacataaaaggcataactaaatcccaaaaatatattttggaccccaaactcggttcagccgaaaatacccaattgtgactataccgtgccgacttatcagaaatcacctacaaaaagacaaaatatacatactatataataatatagtccataaacataatataccataaaattacgatttttacctttctcaggtcaaaattacaaaaatacccatgtcacaccaacatggtcttaaaatgcaataaatcacaataattctacatattaaatcatataataatgtaatttcttattaacacttaattaacttagttaggattgctaatccggttattaaactttaggatattacatatccaatctaatcttgtgtggtttttatggttttgagatcttacagtacagttgcggtttgaaaaattataaaaactacatgtacagtttggtttgaaaaactagacaaaaactacaacactcgcaccgcgaatactctaattgtaaccagatgtctaattttttgtaattagattggatttga

SEQ ID NO: 336362 - DNA, 889 bp, Cannabis indica
cgttggaccccaaagatgtataagcaaactcttccttttccattatgagctcggggtaataggaaccataatgagcagattttacaaccaaaagtgatgggtagtctttgaactgtagtgatctagaattagctttgccggggataatcgcttcaaaaacagagccagaagttccaacccccaacaacctacccctcatccatccccatcttccaattctcctttgtatcctttttaacaaacttttttcttctttttctcttccactcttcttctttataatcatttttttacaaattcacactttttttacaaagcttaagcaagtttgtatctacaacactcacgttatcttttttaacaacactagatatgtatatataatcaaaagactatcctaattaaaataggaaacgtacaatttaaatttaaatatatataattttatacttgttaagaaatttgaataaatgtaattataatttttcttttgattgaagtaaaatatatcccaattagtagagaatttagaggaccacagtttgtgttagttagtcgtgtcccttggctgagcattaatcaacacatgttaatgttcacatccaaacagaatgcatgtgcttgatatatataatgttttttactattattaaaagaatacacttcatttctaataatataagtacagtactgtaacattcaaaatttaattcttgcaattaatataaggggaagtttcatttttaggagttttatcaaagaaaattaaaattatataaaaaaaaacaataatttaggataactagaagaaataaaaatacaatatttattttgtatcacatatattaatacaaagataattttattctattattatttttatattatt

SEQ ID NO: 336363 - DNA, 877 bp, Cannabis indica
atgaatatgaaaaaaattagactaaacttttttttaggataccgaaacaagtagaaggtacatcaatacatccattttaagggagtgcattgtagaatcaccctataattataataagaatttaaaactttaaactaatttaataaaataaaatattcattaaattaagtaaatattaaatatattttttaataaaataaacttattgaaagatttaaattctataattaatcctaatgtacaccaatatttttaaaatgagaaaacaaagactatgagaataatcatgcctttctagaagaatcacttgatgaagttgaagaaaaaagaaattcaacaaacctaaagctactggctcatcaacaaaaagtggctcggtacttcaacaaacaagtgaaagaagaaattttttacaggagatatataactcagaagagtgttcttgaacacaaaggacaatgcaacaggtgtgctcaacataatttggaaggaccatataaattaaccgaagttaaaaaatctagagcatacaaacttggtcggtatgatgaaaacatggaactagtttttgtaccaaggtactggaatggtgaacacttaagaaatatactaccaataagtgcaaaaggtctggggaccacacaagttgcacaatgctcgaacacctactcttaagtggtgttcttctgagcagacctcgctaaaaggtttgaaaaacaactggtactcagatcggatgaccactttcaaagtaaaaattgttcaaaattattgctctttatcaatgtcttttgaacggagtatatcgttcaattgcttaatgttttaattagctaaagatcaattagatcatgtaatagcttttataattcaataa

SEQ ID NO: 336364 - DNA, 649 bp, Cannabis indica
gtaaaataatttccaacaaggatttcgtccccgaaatctaacctgaacagctccggatgttgagttctcatatcaaactccaattcccaagtagcttcttttacagtactatttctccagagtacttaactagtgctatggttttgcttcgaaggaccttctcctctctatccagaatttgaacttgttgttcatcgtaagacaggtctggttgtaactccaatgcctcataactcaggatatgcattggatcagacacgtacttccttaacatggaaacatggaatacattatgcacagctgacaatgatggaggtaaggctaaccggtaagcaacctgtccaaccttctcaaatatttcaaaaggtcctataaatctaggacttagcttgcctttctttccaaaacgcctgattcctttcatcggggacacacgcaggaagacatgatctctcagctgaaatgtaatatcccgacacttgggattcgcataactcttctgcctgctctgagaagcaagctttcgagctttaattttgtctattgcctcatttgtcttttgaaccaactcagggcctagatatttccgttctcctatttcgtcgcagtgaattggggaacgacactttctaccatagagaagctcata

SEQ ID NO: 336365 - DNA, 733 bp, Cannabis indica
ctcttattagatttatttaattttgtagggatttttctattattttaatctataattattaaaataaaaaatttataattaatttttaaaagacaatatttttaatattaatggatccgattgaataatataattaaaagagaaaaaaaataataaagtaaagtgaacaccaaatttttaaagaggttcagccccgtgagcgtggtaatagcctactccccttgtattgtattaacttaagagaatgaacaaattattcttcctctttgaaagctcttacaactgatttctgactaattctctgtaacgccccgacccgtagagacgccacgtgtgtgttcttttacaaacttattcctagctattctattagtttatgaaaagtggggtttaatataaaactttttgattaaatcgaaataaaacttctttatgaaataccactaaatatagggatcccctgtttatgaaatttctttataacaggttacaaaaccgttaatacaaaaataaagttacactttcacacataaaagaaaagaggttgatcttgcttctcagaacccaagacaccacggttgatatgtacactgctgggagacttctgattcatggtcgaacatagctttattcctcttacctgcaccatgaagcactcgtgagtcacaatgactcagcaagaaaagttattagatcaaaagcattataaccgcagatattcacatctcaatat

SEQ ID NO: 336366 - DNA, 940 bp, Cannabis indica
tttcaaagttagagagtattttttttgtgtgtgaagaacttcggtccaacaagttcttagtactttgttattgtgttactttgtattgtttcttgttgtaattgtgcaggttgaacaccttggatattgttaatcaaactttgggagaagtcttgttcgtgagtcatctttttggaaggaaaaggtgcatgtaagtcactcttcgggaggaatattgcaagttagtcactctttgtgaggaagattgtaggttagtcactcttcgggaggaagatttcaagtgagtcactctttaggaggaagattgcaagttagacactctttaggaggaagattgcatgtgcactcttcgggatgaagtgtgcatgtgctatgaattgaagagagttcaaggtctcggcacttctaaaatttgattagaagaatagattacaacagttgcggcaaattcaaagagggagtctttatttgtataagtcaattttattttgtaaacacttgttaattatctaataaatttctttctctgggcgtggccccgtggactaagagcaattcgaaagagttattgataccacatataaaatgttgtgcgtcattttaattttctacattttactttctgcagtatatttttgttctatcagattttgtgtctgatagaacagagatagagtatgttcaaacaattttattacagttccgcattatttaaattgtttgataatttcacttggtaattattaaaaaaggaatttcaatgatgaagaacagaacgtaggttaaatgaattatatacttcattgatttattccctagaatagtgtatctccaccaatctcaaagttttatctaagttaaataaattgcatacttcgtgaatttattgcttaggtaaaagacgtaattattgagcgattcgccttgattacatacaata

SEQ ID NO: 336367 - DNA, 766 bp, Cannabis indica
taaataaaatattacgatatatatattcagtatgtgagatcgattttttttaactgaattatttttatattaataacaataacatatatatatttattatacataaattttatgcagatggtgtacataaataacatagtgaacaaaaataaataacctagtaataaaatatatagaaatgtttattttaattaataaaaaatacaataaaatttaatatttactaactaataaatataattctttcataaataattattttatttttatatataattaacattaaatatataataaaaaaatatttttattttaattttttaaaatagtatataagattcatgtgctcaaccaaacagtgtaatttaattaacatgaatatgattacatattaccatcatacaaagccaaacacagtttacatattttcctacaatcatattctccttcataatattccctataattaaattattttgaacaccttataccaaatacccatctcaatatacagtatatatatataaattaatcacaccacgttaaaataatatttattcaattattaaataaaattattgtttattaagagttattttatcaagaatatataatacacttataacaagtaagcagaaaatcaactttgtagtgaagtgaacaacttatattgcgactaggggtgtttaataaagtttacaaatcgcccaactcgaataaatcgtccaaatcaaaatgaataaatcgacaaaaaatacaactcgaa

SEQ ID NO: 336368 - DNA, 317 bp, Cannabis indica
tttttaattggtttattaaaataatagtaaaatataatttatagatttatgctataataaaatattaaaaatgagagaattaaggagagtagaaaaataactttagagtgatttgaaagtgtcacgtcaccacctcatactttttctttataaatatataaattagctgataaaaattataaaaatacacttatcacatattttgaaaaaatatatataataataaaattaagttatataatttttttagtattgcatattattatattgtaataaaaataaataaatatattagatcattaaatatatacagcagt

SEQ ID NO: 336369 - DNA, 398 bp, Cannabis indica
aaattttctcagttagggcgaaaaatttcatgatgcttagaataagcaagctgaaagacagaccttacgcagttaagaaagcaagcattatggactgtaaaatcgcatgaagccatgacaaagaagaatctcagagttttttaacctagggtttcctaaatattttctacagcaaagtcgaaggtgcattcaaaatgtaaacatgcaagaacaagcataaacgtaatcgaaaacttactcaagagtcagatatctgggttcgagcaacgtcaatcaacaaagcagttttgatgaaggcagcaaacttcaagccaagaacctctcttttcgctctgaactcacttagcaaagagggatggtgaaaatgaacttatgtgccaatgctagtcgatatttat

SEQ ID NO: 336370 - DNA, 648 bp, Cannabis indica
ttttgatatttaacatattttaaatttaaaagataactttatcttttttatttgaaataattttttttttttttaataaatcaatgaattgtattgcacaaacatatttacatcctaagagcatcccactacaagggcctcaatttatacaattttatctttccatcattttccatctatgtttttacaatgaatgctatctataaagcaaaaaaccactctttatctacacttgagagcttctttgggaacaaaaattggacccgagcctttacattccatttcacctcctaaactaaccaggttgtgtctatctttgcaccctgccatataacagaattcctcaatttccaagcgcaataaaccatagcagcagtagcaacacagtatatagccctcttgaattttgaaatttttgctctccctatccatttgacaagttgttgcacattggaggctctagcaaattaaaattatcttaaaattatccattttatttgaaatattatattaaaattatcttatatgcaaattaaataattaataaatttaaaattaacctagatatttttatagatattctaaccatactattttcaacttcaaaatttgttgttttgttaaatatttaatcatttataaattata

SEQ ID NO: 336371 - DNA, 651 bp, Cannabis indica
ttcagcagccccacttgatcatcaagactaagcttagccccatgatcaatacaacttgggtcaatttgacttgtagcttggctgcgtcgacccatgatgttcttgaaatgagataaaaaatgagtaaccacttcaggaaaattatccaccaccaaaccttgctcattagtataagatgttatcctattctccattctcctttgttttaagaccgaatggaaataggaattgttctcatcccctttgcaaagccaattgattttactcctttgtctcaagaagttgtggtacattttttcctgaagactaaacctggaagcagcttccttttcttgtctttgaatcactatgtccatcgggttagattgagcatcccttctagctgttaagtaaccctctttggcttcttggtaatttcttccaatgtctcctatagtgttcctgttaaagtctttgagcctatgtttaaccctcatgagtttgaaatagagagcctttaaacccatgctccttagaggcatataccaactctccaaaaccacctttttaaaatctggtgttcagtccagaaattaaaaaatttaaaaggtttaataccaatcctctcagaaactactatagagataacacaagagcaatgatcagacatta

SEQ ID NO: 336372 - DNA, 720 bp, Cannabis indica
ccggccaatacttatttggggggttgtccgtacaaccctatttgaacaactttttcgtaccactttgttgttcagcttctgtgtatagtttttctgtacaacttccttatacacctttattgttcagcttggccagcaaaccttcctttatcatatatacctccttggtcggctagctatggtttggccagggtctaaagacttttcttgttcttgacttggaagttgcacagagtgtacatgcttggttattgataggttgtattccacttgtcttctatttggaccatgtggacatgccacgttcggtgagaaaaaaatgggataacattttccccaaagtccttattcaaacgtctgtacaaatagggacattttagctcttatcttggctcttgaagcctttaccgtgcaaccttatctggccaagtattggactcttcaaatgacgtgcttttatgacaaaatgactttattgcaatcaaatatggggaatcatgtgatagctgcacatttttccatgtttatacctttgatcttctctctcccatgtatgccatttactttcctcatcttcttttctttgacatttctctctttctttgaatcagccattggtgagttttaagctttttaaaaattttagaaacttcttgattctcacgttttagagtagtctttttacattataatctgcttgatagctttaggatgcataat

SEQ ID NO: 336373 - DNA, 2065 bp, Cannabis indica
gtcccatattgtgagttatgaaggattggaactaaaaccagatctataatatgaagaacagccagtgcaaatacttgataggagagaaaaagtctagaaaacaagacaatttcactggtaaatgtattatggaggaatagtaatgtagaagaggcaacctgggaacttgagacagatatgctgtagaaatatcccgagttgattaggtaaatttcgcgacgaaatttctataagaaggaggtaattgtaataccctaagattaaggaaatggattagtaaaccctaactagttaaatatgtattattatagaattatattgttataaaatttattatatgtgaattaaattgataaattacatgttaagaccctgttggtgagccaggggcaattttgtaattttgaccagagaagggtaaaactgtgaatttaatttaaatgcgtgcttaaggactatattattatatagtgtacttgttgtgtccttttttaggtattttctgataagtcggcgcggtatagtcacaattggaaatttcgggctgaactaggttcggggctgaaattcattttcaagattatttatttgcattttgtagatgtgtgattagtctaaaaattgaattgtgtgttatgttattatgacataatttcccttaaattcctaaatgagtgttatatggccctacaggcattattgtaatttagcttattttgattatttttaacaaaatggaattttgagtaaaaaggatatgacttttctagttgtttctcataccctaaaaccgaccatcctctctctctttgtccatcttttcattttgttgaattgattaaggaatcgcattgttgagcttggatttgggatgtaattgaagcttgattttatttcgaagtttgaggtagctttctacagctctaattttaagtttatattgctagaattcttgaataaaatcatgtttttgggttgttaggttcttgagatgcatgtgtgtagaagaaggaatgattttgttaaattgtgcttacttgtgtttattttaccatgcttttcatgggattgtaaggttgagtttatgtgtgagattctgattattggatttatttttcagtaatgtttgagtatgaggttttgattttggaattcatgcatttcctaggaatttgttgaatcctagctcaatgtttggagctttaatttttgttgtaaatcaagcacgcttatggtggattagagcttaaaatatgtgtgttagctttctgttatgttgataattattgtgggattaattctggttgttgtgcatgcttttgactgaatttgggtgtgtttctgcataattttcgaagctaaaaagttggttttttaggtttttcaacccagtggttgtgaacatcataggtatggtcgcgaccatgacaatgggagtttattaattattttgggcttttgttttcgccatatgttttgactcggggtactgtttgggatgttctttatattgtcagaaagctcgttccgagctctatatgctgatttggatttcgaatgctaattttataattatttgaagatgaatttacggattaaccctatttgggaatgccagaaattgtgacttggattaccgacactttgtcaggagcactcggggatttggagtctccacgtacttggcacaacaggtaagacagtagtttgcacttagagttaagtgtagtggtgctcaagttttatattattgttgtgattcgctaagaattgggattagggttattaacctaaaatgagcggttatatggtctagggttattatcctagtaattaaatgatttttagtgtatgccatgttaaatatgttggagtaaagaattatgcaccttaggcataattaagttaaactcgctaaattagtaccttgagtttgataataatgcggtttagcgttactaccttagaatttatatgaaggtaagaaagaaattatgtccaataatattgctagcaggtgaaggcatgaattagagttattaccctctataagtgttattttgag

SEQ ID NO: 336374 - DNA, 718 bp, Cannabis indica
aaagagttttatttagggcataaaacccaacactatcctaccgggatagcaggatatgtacccagaactcagctctcaggacccttaccaacaaccgctccaccgatggcggcatacaattttttgctactcccgaatatagtcaaggtcaggccttgacccctgcatcttctcactttggaaatccctcagggatgaatggactagccccattgcactccgctcaggccacaagcttaccaggtccttctcgaggctctcggagcaagagatcctcaaaaggcagcaaccggactgaggacaagcggcagaaaagggggtacaatccccagtatacccagtatacggagctaacgaaatactaagagtgtgtgtattttgctaccaggagaaatacgcactactggagaccgccttccctgtacaaggatagctccctgagggatccaaataaaaggtgcgagtaccacaacgacattgggcacaaaaccaacgaatgcaaaaacctcaaggacgagatcaaaaacttgatctgattgggacatctctacgaatggatcaagaaccgtttgcctcacctcaaaccggttcatgcagtaggaactttgcctcaaggagcaccagggggtgtagccgttccccccggagatgcccagcaaattcctggcctgccgccaagacccaacggaagagtagccatgatctcaggaggacgtca

SEQ ID NO: 336375 - DNA, 520 bp, Cannabis indica
ccttagcttgagatcactaccaattagttgaaacaacaagaattacagagaaaaatcccagccctagcagccccaagccaaaccgaaagagagagagagctcttgagagaaaaatagaattttacttttctttggttttttccaattttctaactttttgaataaatgataaaacatgcatagatctttcctttgtttcaactatgataaatcaaataattccatcacactacgtctacaaaaagacaaaggccaatggggcaaaatgactattttgcccctccaacactaaaaaggatttaaaaggcacttaagggtatttttgggaaactctaaattcccgaccaatcctgacattctcaatgtctacataaactgccccactatactaaaatactaaattgtgattctcctgagccatacaccgcgttccatgttgctgggcaccgaaaatgcaaaattatgaaatttcactatatgacataaaaatgtattcagaattcaaatataacaacataaa

SEQ ID NO: 336376 - DNA, 572 bp, Cannabis indica
aattcctttaaaactggttataggttataattttttttttttaaaaaaagtggggatcaattctaaaaatattgaggcataaatctaaatataactgatttcatatcaaaataaataaaataaataacacacaataacgtaaaatataatataaaaaaactggttatatttatcaactagttaaaaatttgagacaaagaaatcgattccgtaaaccaagataaaaacttgttaagtaaaataaataaatcaaagactggttctttgaattaactgaataaaaaatcggtttctgaaataactaaattaaaaactaattccttaaattaattaaatcaaaaaccaatttttgaaataaataattcaaaaatcattttttgaaatgactaaataaataaccagatgagacataaattaaaatagaaccggtttttataacaaaatgactaaaaataaataacacgcaataatttaaaaatatgttataattaaataaaaaaaagaatcagttctaaaaatactaatacatagatttaaataaaaccggttccacaacaaaatgagtaaaaaaa

SEQ ID NO: 336377 - DNA, 928 bp, Cannabis indica
tgggggtggagcaatgatttttgaaaaagtataaaaactaatctagagtctctaactctaccagtgagactgaatgttaaagtgagctactagataattattcagtctatggaaagttctatacagtttttggcattattctagtaatagattaactactagtgttacttcctgactaacacagatatagttgccaaatagtaaagaatccagtaccctaagaggagtaaatatatagaaaggaatttcacaatatcaaagattttatgactaaggagatgtaatggtggagaaagtttgtactgagtacaacttgtcaaatcttattaccaagaaaatactacataccacacttgatctggacattaaggtgttgagataatgaaaatacacttttagttttgtattagtgcaaataggagtttgttgggttttatgccctaaataaaatctattttcaaaataatcagataactagttaataaaagatcagaaattattttatgttgcatgattcacatgatttctttcatgattatatgtttaatgttcctgaacatatagtattatttttaattatagtgttgtcaacacaatagaatataatcatgattatatgttttaaagtttaagtcccatgatttgtcagtacactagatttacactgactgcattgaggctgccttgaggagtctttttagtaattattttttgagtagccaccgtagtttcagcaacaccgtagcttagatcttgtttcagctcttaatgaaagtaataaaatgttttactgagattttcaaaaactcataaaataagagcttaagaaatactaaatttaataatggagaagagaaaaacttttacgagcactactacaaaccaagcttttagaggcactttttttcagcaaatattaaagaaccga

SEQ ID NO: 336378 - DNA, 916 bp, Cannabis indica
cacttagcgaattcaactttcgcattgtgagtcatcaaagaaatccctataacatggggatcagattacagagatatgggaagctgtccagatcccacgatcagtgtattatacatttatcatgcaatctttctgcttatattcattgtaacgagaagggaaatacttcctctccaagatcatagccctataaatagtgatgcatgctcactaggcaaagggtcgagagattttaccctagagatattatctaagaattcatattcagagatactgttgtaagagctttaagaaaaggattctttgtccttgttcttgactcaatacaaataccgaggattaggctattaccgaactgctcggggctgaacctctataaaatactagtgtctttacattgctttactatatatcaactgctttagattacttatcgcttactaaataagactcaccgtcattggctagaagcaaggtcaacagatataatattttcattgattaaataaatgttacaagtgtgaccaacattttaatctagtgggggattgttatattattttataatataataagtatagattaaaatttgataaatatataattatgtgaataatatatattaagtgtatggtaaataaatgtgtaacctatgattttataacctacatgttgtaacttggagaggagttacaatttgttgtcatttgtaactcttgtgttgatcacacattattagtataataaaagggttgttacacaatttggtttaaggaattcaaaattatgatgatatagttgttacaaaatggattaatactattttatagaagagaaatgaggtggtattttgaatcctaagagtgatcacctaaacactatataaaggagtctaatgtgctcattgagatgagaa

SEQ ID NO: 336379 - DNA, 1407 bp, Cannabis indica
tttattgatatttaaataataaagattacattgaaatggagttttatttagggcataaaaccgaacaataaaagctatagaaaaattatatatgaacacgaagtttttttacgtggttttgcaattaaaattctgcatagtccacgagtcaatcttattcagatttttaattgtgtttttttagggcctctcttgtatgagatttttcatcccttttttgatcttgtttgccactatttataattgcatagtggtcagtaaattacacacttgacggtaatatgtttacaacaatcaaacaatcattcctagaatcatgggatttgattacatatcatgcagtgtaaatgcggtttatgatttgaaaatcgtatagtcgtgattttcccacttttactaggtcaaaacaatcatgtattaaacatgtctttaattgttgtatctagatatgtctcaatagaaacttggttagtgatcccaatagcgagctaaggccattcttccttccgaggtcgacgatgtatgtctgatgtcgatcgcggttcttatcatcaaagatgtaaagaccacttagctttaatttagaaattagcagataattagggtttaattatgaaaatcatttattggtattgaattaatcatttgtgatgatttatttgaattcagaatgtatttttatgttacatatagaaatttcataattttgcatatttttgtgcctgacaacattggaacgcggtgtatggctattaaactcacatcttagtatttttagtttaacgggacgatagtttagacattggaaatgtcaggaatagtcgagattttagaattttcaccaaatacacctaagtgtcattttatgacttttagtgtgggaggggcaaaatggtcatttttccccatttgtcctttgtcttttatgagttgggatttaagtgtattaattagatttttattacttttaatagctgatttttaaatcaaataaaaccaatttttattaatcattttacaaaaaaaaaaaagaagaagaagaagaaaggctttctctctctctttctctctctcgaaaatcctagggcagctagggttctttattttcttcatcaatttgctgtgatttccagcagctcttagtgaattcaagctaaggtaagcttctagacaactttcctttggttttcttgaacttcaagttatgaaattatgcatgttttgagagattgagttccatagttgttgttggtgtttgaatcatgtttttgtagttagaatatgatttattatgttgagttaagcatgatttagtagttgtttgaaggttttagcaagctttgagttttagaactcaagcttgaagctttaatggtgaaaattgattctcaactttgattgttgttt

SEQ ID NO: 336380 - DNA, 579 bp, Cannabis indica
aaataccaagcatgcaaaattttctttccttaaaacccaagaaactaaagaaaaatctaaaagaatttacctagagcttaagcacttcaaaaccttgaagattcttgctggaaatgcagaaaagtaattcaaacactagctgctcaagaagtggccgaaagagagaaagagaggaaagcaattctcttgaatttccaatttttttaatctttgaataaatgaacaaaaatagcctacaacctatcttatttcagccaaccttaacaaaaataaaaccattaattacataatactaagtccactaaaggacaaaagcttatggggcaaaatgaccattttgcccctcccgcactaaagggattaaaaagcactaaagggtattttgggaaaactctaaattcccgactaatcccgacattcccaatgtctaaccatactgccccgctatactaaaatattgaattatgattctactgagccatacaccgcgttccatgttgctgggcaccgaaagtgcaaaattatgaaatttcaccatatgacataaaaatgcattctgaattcaaataaatcaacata

SEQ ID NO: 336381 - DNA, 628 bp, Cannabis indica
ataaacaggttgaagcaataactactatactataccaagtaaaagtgtcaaaggggattttacaataaacttacttgacaagacatgcacatgtagaaggttccaacaagatcagataccatgtgcacatgcaatagcagtttttgctaaaagaggactaaaaacttatgactatgtggctgactactacaaaacatcaactatgagagcaacatatgatacaaccgtacatcctctacctaatgaaagtgaatggagactacctgagagcttggagaagattgtgatgccaccaaaaacaaaaaagacctcagggagacctagaaaaaaaagaatcagatctagaggagaaccaaaagttgtaatgaaatgctcaagatgtggacagcttggacacaaccgacgaacatgcaataatccacagatttacaaacaaaccaatcggaagaaacagaagatggacacaaagcaacaataagtaatagaacaaacacttggaaaaaaaaagtagctttcaaaaattacaattacaaaagctacaaactggttactttgctattatgacatttgataaaattgctttgaaaatagattttttattttattttatttgctttttttagagagg

SEQ ID NO: 336382 - DNA, 587 bp, Cannabis indica
taatcactcatacgatacatttctatatactcagataacatttactaagagtgtcaaccctaactcatgctttcactggattcataatattctagggtaataaccctagaccgcattaaaattaaactcaaggtactagcttaccgagtctagtttaattatgccttaagcgcataattcataatctcaatatatacatatatctgacatggcatagtatttacacaacatatatcactagagtaataaccctaggctattaaaccgctcatattagggtaataaccctaatcccggttacaattactcacatatatcatattcaacataagcgccactacgcatactctacgtgcaaactactgtcttacctgttgtcccgcaataacagagattccaaacccctgggtgctcctgatcaggtgccggtaatcctagtcacacaatctgggatttcacaaatagggttaatccccaatttcactttcacaaaatataaacatggcattcaaaacacagataatcaaatagatatcggaacgagctttccagctatataaagaacgtcccaaacggagtcccgagtc

SEQ ID NO: 336383 - DNA, 965 bp, Cannabis indica
tctggtagtagcaagatagtaaatccttaaagaaggaaagctcgatactttatgctgtctagcatgattgataccttgaagacaaggttcgccaatactctcacggctgtagaaatcatgaaccagtaaactgaaatgtttgggatggcatcagatcaagcttattttgaggggactaagaactttataaatacacggatgaaacctcatcagaacatgcgtgatcacttactcttgatggctagtttattccaggaagcggagaatcatagagctattattgatcaggaaactcaagtgagtttgatcttgaattgtttaagtctaacttttctgccctttacttcaaattacgtcatgaacaagttgacttttgactttaacgagttgatcaagaaccattagacatttaaaaatttgactagaggaccacataaaggagaaaataaagctccaacttctagtaattctacggttggtaaggcaaagcctgagacaaacattgcctctacttcaaaactcaaaaagaagaataaaaggaagaatagcaagaagcatgttaaagttgttaacacgaataataagcgtaagaaggctgctaatccaacaacaagggaaaaaacatgcttctattgtaacgaaaaggaatacaggaaacccagtgtcctaagtttttggcaaagaaaaaaggtatttctaactttgttgtgagttcatgtgttttagagaattattttccccttgggttattaattctaaatctactaagcatgtttattataatattccaataagcctaatggtaagtaattacgatttgtaattatattatggattaataaggtaataagtgggaatatgatcctactaatctaatttaacataaattttaaattcgctacatgtgagtaaataaacgtaatttatttattatgaagatttatatagcatgtgtgaatgtaata

SEQ ID NO: 336384 - DNA, 681 bp, Cannabis indica
acataagaatgagtagctcctgaatcaatcaacacagtataagaacaaccattaataaacaactgacctgtcacaactgacagactagcatcagcgtcagcctgagttatagtgaaaagttgccccgggttctgagcagtattcttctcaggcccctctttcttggcttggggacaatctctgataaagtggcccaccatggcacgttggaaacatgccttggctcgacactcaccgagatgatgctgcttgcatttagcacacttgggatatgatcggaatgaggacccgcgaccctggcggccacctctgtttccctaaaactttctatttccccataatgctctggaagcgtcagccttccgtttgtgctcagggttgccactattggtccccttactgatactaccactagcaagcggatttaatgccatgacgacatcctttgcagcctgctctttcattacttgctgctcggtcacctcagcaattaaggccaagtctaccactctcttatatagagtgtcatgtgatgtggtaattttcaagtcccgactgattgtagcattcagtcctcgaacatgcttctgttttctggtgaaatctgtaggcaccagatcaccagcaaattttgacaaccgatcaaactccagagtatactcggccacagacatttttccc

SEQ ID NO: 336385 - DNA, 871 bp, Cannabis indica
ttattcacatagtcatgttttactttccaatgtgtttgacagcacaagtaaacattcagatgaatttatacattacatacatataatcatgaaataaatcatgtgaaccatgcaacattaaatattatttctgatctatattaataagtacatctgattatattgaaatgagttttatttagggcataaaacccaacagggtctgggtggcagaccggggatatgttgggcatctctggtgagagcaactggagccaatactcccgctgcaccccctggtgctccctgcggcacaacccctatcgcttgacccgagttaatgcgaggcagccgattcttgatccactcatagaggtgccccaatcggattaggttttcaatctcatccttgagatttttgcattcattggtgctgtgcccaatgtcgttgtggtactcgcatcttttgttggggtccctccgggagctatccttgtacaggggaggtggcctccggtagtgcgtattttgcctagtagcaaagtacacacgctcttggaagtccgtcaactccgtgtactgggtgtactgagtgtaccccctcttttggcgtttctcctccgtccgggtgctgcctttggagaatcgtttactcctcgagccttgggaaggacctgctaggctggcggttggagcggagtgcgaggaagcttgtccatttatccctgagggatttccaaaatgggatgatgcgggggccaaagtctggccctggctatatccgggagtggcagagaattgtatgccgctcattggtgaagccgcgatcgggacagtacccaacgccggggctccaggcatataccctgctatcccagtgggatagtatcct

SEQ ID NO: 336386 - DNA, 1085 bp, Cannabis indica
gtctaattagcaggtctggaaagtttgaattggtttgggattgatttggtcgagttatgaaatttttattgattcctacattgaactggatttcaagttcagagaggcctgtaggaaccgaaattccggttggcttccaggatttcctcctagaaccggaattccggttggggaataggtctatcggttggggcaaatttgggaaccctagtttttcccatttttgtgttatttagcgtttttccatgctgtttatcgatagggaaacttctagtttcaagtttaagtccccgggaagtgatttggcgtgtcaattatcagtgttgtgattattatgatttaggagcctgtaactcgccgagcagattgttccactcaggttgactggcacacctaaattaagaattgaggtaagattagtataatagtgtgcttatgtatttacatgtttagcatgcatgttagtaagcctgttagattacattagaaatgtatgttggctttcgtgctatttgatagtatcacatcggtacggctagagtatgactagtgtaccgagtataggctgatattatggtcaatagcaccgttttatttgacggtatcacatcggtacgactagagtatgactagcgtaccgagtataggctgatacagtagcacattggtacggctagagtatgactagcgtaccgagtataggctattaccatgttaaaagtaccatcgtacgaacgttcgagcctcaccactgtgtggggcacggggattagggttgtggtcaggggtatgggggtctgatcataacccgtgatttatgtatgttatatgatttatgcttttcttactgagtctgttgactcacagtgctatgtttatgtgtaggtaagggaaaggccaaagctgaggaaccgtgaggacgagcagatgaagattgtacatgtcggggcggttaggcctggagcgtacgatcctcgggacatcagggctttgttgttagtcgctggcgcaagtattttgtaaatgactagcaaacttttgtaaaatattttgtaacgggatctcgaaatattttgtatgtaata

SEQ ID NO: 336387 - DNA, 550 bp, Cannabis indica
ataaaatcgatctaaaatattatatgaatatagtaatgaatagaggattcaaaataaataccaaaaatgaaaacgaaaaaattatggacagaaaaataaaacttttatatatatatactcgtatacaatctatataccacataaaattatcattaatgtctaaaagagagtattatatacaattttatgcaataaaaatatgaaagtattgagtattataagtaaacatatatacatgaaaattatatgtatataatataaatatgaatgtgtatatatatatgaacatatagattatgaaatatgaatataaaggtgtgtatatataattaaaattatatatatgaatatgaatatatatatatacctaaataaaaaaaaatatattcatatatgatcggaggaatatgaatgtgtacatataatatatatatatataaatgaaaaactgacactgtatacgtatatatatatatatagaacaaaatacaaataaaatacaaggcagagatatataatctgtctttgatatcaactgttagtaaattta

SEQ ID NO: 336388 - DNA, 1364 bp, Cannabis indica
aaccctatgtttgataaatctagaattcttagacaaccgtcttgtaacaattctttagctgttaaaactaaaatcactagaatgcgagatccccgaacttatcccacaaaaacaaatggtgcgtcgccctcgggttggaagatcaccatcttctgtttacagtcaatactagctgagtacttggataagaaatccattccaattataatatcaaaatccactaaacccatttctattaagtcagcactcaactacctattctcaattctgatcggcatagacctaatcaaccttttggagatgactaattctccgccaggcagtagggttccacaccctttctcattactatcatgcggtccatccaacttactaaaaatcctggccaccacataatagtgagtggccccagtgtcaaacaatatagagaaataagagtggttgaccgagagctgaccagttacaattgaggggctagcctctgcatcagcctgagttaaggcaaacacccttgctggagcgggttttgcagcagttttctattcttctttcttaagatacgggcaatctcttttgtagtatcctggcaacccacattggaagcaacctttccctctacactaacccaaatgatgtcttctacaactgggacactccggctaagtgtattgggtttcagaaccaccctgacggttgcctctaccctggttccctcggaacctcttgttctgacctgagccaccgggtgcacttggtgcctttcttttttgatcagtgttctcccctactataaccagaggtaggaggagtaggagccccacaaacgacttgagtccctcgagactcctgagtgcactccactgcgccctcagctcgcagtgcctttcccaccatatcaacataggtggtgttgtcatcagtggtaagcataatatcatatcttatcttcgaatttaagccatccaggtctttttctttcttaatgaaattggttggcaccattcctgaggccaatcttgccaatcgatcaaattgagtcatgtattcggtaacactcatattttcctattgggtcagttgggtaaattcttttctttttgcacttctaacagcttcgttataatactttgagttaaacaattcttggaatttttcccaggtcatagtggtaaagtcaaatgtcagggaaaccatgtcccacaagaccagagcatcctcttagaactaaaatgtggcacaagccaccatgtcattgccggtgatgcccatgaaattcaggattctagtaaccactgtcagtcactactcgactttcattacatcgggacctcccagaaagattggaggtgcctgcttgcggaacc

SEQ ID NO: 336389 - DNA, 696 bp, Cannabis indica
atgcaaaattttaactgcaaaacaacttaaaaaaccgtgtgttcatatattacttttctgtgtgaaatcactatcgtgaggttcaattttaattaacaaaaatctgcgttaacaactaatttgaaagaaaaaaaataaactttgaggtagtaattgtagatttccttcttcatccaagcttagctgaagtgatcctcactacactaatgccatgtttcactttttagtacaggacccatacattagcgatggaccccttaacctagggagaactttgtctcatcctgttaggtcaagaggcaactaattcacttacactaagtaaagtgaatctcactgtgaagcgacctattttgaagatagctgcttttatttgtagtaccatcgtagatgtaccccattctagtaccttggtaacgacactagattcaagttgtagtcatagttgttggaatatcttttaccaggatctagatgtactaacaagtacgtttttaacatcctaaatatgaatttctaaaatgatgaaaataaacacataaaaggtatgagaaaccttacattggttacagcagaattaaataactctttccgctcagatctctaacccttgtatcctttctgtcgcagagtatcaccaagatctgagtccgatactccttcaattgtttggattcttcacagtcttacacacta

SEQ ID NO: 336390 - DNA, 595 bp, Cannabis indica
tagggacacagaaccagactagggacatagaaacgcaccctagtcacaatctcgaacccaaactcagaaatgggacctgggacctgaaccaaaaccagaccgagaaccgtgacagtgatccagatcttgactcgggattcgggtaacagggcctagaacagacccgtagtcggtgcctagatctgggactcagactaggaccggaacccagacgaagaaccaaacccgaacccaaacctagacatgggacccaaaattagaacctgaacaagaatcgcggaactaggaacccagaacaagactaggaccgtgaccaggacccgcacccaaacctagaactaaacacagacctagccttagacccaaactgagactagaactcgggcccaaacacggtcgtgtacccagaccggaacagaaactcggagctggacctaaatctgggacccgatccgaaacacatacttggaccttgatagggatccggatacgaacttggactcggaccaagacccagactaggatcgaaatgctggacctagatctggactgagatcctgacccagacccacacttggactcgcactcgggaccc

SEQ ID NO: 336391 - DNA, 742 bp, Cannabis indica
cagcagctgcataactcaaaacacaaccatgcataatttcacttccataaatttaaaaaaaaaaactaaagagagagttgttggaagcttacctacagcttgaaatcactaactttgctgagaattacttgaaatgatgaagaattaaccaaccctagttgcctctaggttaattcgaaagagagagaaaaggagagggtgaaaatgagtttttcccttgcattgatttctatcttgaaaaaaaatgagtaaatacactattctataattaactaaatctatttaaaatcagattacttaatttaactaaagccacaaaatgacaaaggactaatggggaaaaatgaccattttgcccctcccacactaaaagtcaaaaagggcaccaaggggtaatttgggaaaattctaaaatcccgactattctcgatattcccaatgtctaactatatcaccccgctatactaaaatactaagatgtgattcaactaagccatacaccgcgctccaatgttgccggacactgaacatgcaaaaatatgaaatttctatatatgacatataaaatgcattctgaattcaaataaatcactataaattaacaatttagagctaaaataattttcataatgaaactttaattatctgttaatttccaaattaaagcatagcggtctttacaactatctccccttaaaaggatttcgtcctcgaaatctaacctgaataactctggatattg

SEQ ID NO: 336392 - DNA, 670 bp, Cannabis indica
gagagggtgaaaatgagtttttcccttgctttgatttctatcttgaaaaaaaatgagtaaatacactatactataattaactaaatccatttaaaatcagattacttaatttaactaaagccacaaaatgacaaaagactaatggggcaaaatgaccattttgcccctcccacactaaaagtcaaaaagggcaccaaggggtaatttgggaaaattctaaaatcccgactattctcgatattcccaatgtctaactatatcaccccgctatactaaaatactaagatgtgattcaactaagccatacaccgcgctccaatgttgtcggacactgaacgtgcaaaaatatgaaatttctatagatgacatgtaaaatgcattctgaattcaaataaatcactataaattaacaatttagagttaataaataatttcataattaaaccctaattatctgctaatttctaaattaaagctaaacagtctttacaaattgatgaccatgtgtgctcaaaaggaagccaggctcctataggagcaaggggaaagtgcttacctgaccactcaacctaagaaacgaaaccattcaagaagaacaaagggaaaaagcccatagctcccaaggctgtcataaaaaaagattcgatcaaatgtttcttttgtaaacaaa

SEQ ID NO: 336393 - DNA, 878 bp, Cannabis indica
aatctttccaaagtcatctgcctaaatgtgagagcggccgcgagaaggtgctccggggtgaaatcattgccatggcggaggataagtaccagaagtacctcttcaagagggaacaagagctggcttacattaaggctcaggcgatcgcagggagggcccttcgtattgaagctccgttggagcggaggacccctagacccaagcccgtggtcccagtaccaaatactagggctcccgatgccagcacttcgggttctggtaagtcccctttaacaatacattatgttcctcccgtccatgagtataccagccttaagcctatagggttcgatgaacgtctccataggtttaggatgccttccacccggtgggggaatcatgccaaggagtattatttctcccacttaggccattatttaggtcggtcccgggtgggttctggacctgcggcgcccattctcttggaccattcagcccatttatcctctagttggttccttccctcggacagctttctcggggatgataaagccagtgctatgattcgggactttggtagggccgaattagagagtcagggtaggactagctttattgctctttgttaagtgtatactgttctcacgaatgttctaacacttgacttattttcttgttgcagcagccaagcccatggatgaactcttggccactcttgctggagcccacagtcccgatgcttccccaccttcggctgcttctcagttggtcactcccgggaggtcctcctccaatgccccttcgggtgccattgtcttggtggacgaggaggaggaggttgaggaagttgaagaaggtgaagaagcagatccgaccgccctcgagcgcaagcgcaaggg

SEQ ID NO: 336394 - DNA, 583 bp, Cannabis indica
accactaattaatttttttttaatttttttattttttacattcaattgttatatacattttagttgattgtaataataagacaaatatatatagattgaatttaaagttcaaatcaatcaccataaagaaacatatatattagtttcaactttatatttttttaaatagtcatataaattatatgatataaatatatatatatatcataaatatatatataaaccctttcaatcggattggtcgagttagttcaggttgactgagagagttggtattattttaaacctgcccaatataaagattgggcgggttatattttggtcagggttttgggtttgtattttttatcgagttatctctgtttggtttgggcaggtcattcgggtcgggcagtttacaaaagtttatgtacaaccctaatgacaaccttttagtcataacataagttttttgtgactaaatgtgacttttagttataacaaaaagttacttgtgataataataaatagtagttggacacaagttgtcactaatttagttttagtcacaaaaaattttttgacaaaaaatgcatatataatt

SEQ ID NO: 336395 - DNA, 525 bp, Cannabis indica
cacatttttggacatagtctatatagtcttttttcatggttggccagaagtacccttgtctcaatatcttctttgcaagactcgggcctcctgtatgatctccgcagaacccctcatagacctctagcttaatttacttagcttcagggtctgatacacaccttaggtacggtatgctgagtcctcttcggtagagaatgttatccatcatcacataatggtgcgcttgatactgtatccttctggacagtgtcctctcttggggcaacccgcctttggttatatattcaatgatggggatcatccagttgagctcttgttcaactgctgccacaatattttcggttttaatgcttggttctgtgaggcgttcaacgtgtaccaccttcagtttctcaatctcgctgtctgatgctaacttagccaaacagtctgcgtgggcattcttttctctggggattctttccactttgtagtccgtgaactcataaagtagctgccagacaattgctacatacgcggcca

SEQ ID NO: 336396 - DNA, 1644 bp, Cannabis indica
aaaaaggctggtcaccaactaattgcagtcttgattgaagaaggcaagaaaaaggatgaacatcttgatcctcagactcaagatgaaagaaatatattgaaatcaattaaggagctggaagaggttgttctagatccaggaaatcccataaagtgtgtatacattgggaagaacctggaggaacaattgaaatagcagctaattaactttttgagggcgaaccacgatcaattcgcctggagccatagagatatgatagggatcgaccctaggattatctaccaccacctaaatatcgatctaaattacctagctaagagacagaagaggcgaccgctggattcagagagacaaggggcactcaaataggtagtggataagttgttggctaacaactttatacgcaaggtattttatccctcatggatatccaatcatgttctcgtcccaaagccgaatggaacttggagaacttgtattgacttttttgatttaaataaagcgtgtccaaaggattgctttccctgccaatgattgaccagttggtggatacaactgctggacacgagcttgtgtcgttcatggatgcatactctggatataactagataaaaatgcatgtcctagattaggaacatacaagctttgtaaccaacatgggactttattgctacaaagtcataccatttggattgaaaaatgctggggcaacatatcagcgacttgtgaatgaaatgttctcaaaaaaaattggacaaaacattgaggtatatgtcgacgatatgttggtgaagtcggtaatgagtggaaatcatactacagacctcgttgagtgctttgaaatactaagaaagtataatatgaagcttaacccaaaaaaatgttcctttggagtttccctgggaaaatttctgggattcatagtcaacgcgaggggcattgaagcaaaccctgagaaaaatcaaggctttcatatatgcgatcaccaaccaaaccaaaggaagttcaagccttaacagggagaatggcagcacttaacagattcattcctaagtcaattgataagtgtctaccatttttcaatgtattgtgaggcaacaagaaattgaatggatagaagaatgaagaagcctttaagagcataaaaaggcatttgtctacacctccgattttagcaaaaccagtaactcgagagacactactcctccacttggctgtctcggaaagtgcaattagtgcagcaatagtgcgagaagagggaaagcaccagcaacctgtttactatgtgagtaagcggttactgggggcaaaatcgaggtatcccgctcttgaaaaacttgccttacgcctaatccacgcatctcgcaagctacagccttacttccaagcacatccaattaaggtgttaactgatcaacccctcagacaagttttatcaaaactagatgcttctggaagattgataaaatggtcaatcaaaacggggcagtttgacataacttatcacccacgaatatccatcaagggccaggccttagcagatttcttgatagaaggaataactttagaggaaaaatcttcttgttcaacgagacgcgtatacttggagattatttgtggatggtgcatccaacgagcagggct

SEQ ID NO: 336397 - DNA, 758 bp, Cannabis indica
atacaacacataattcgattcaccatttgctacatggtatcagagccatagtgattcgaaattcaaaattcgaaattagggttcataaaaaaaaaaaagagattaggatttgagtttagggttcttttccaaaaaccctatttggagtgggagtttattctcactgcccactcaagaggattgcccagccgccgatctaaaaaaccccaaagtctggtcattggattccttgcgcgtggggctcatgtgccacctaaagtttctgcgcacattcccacacaccggtgcatggaggcacgtgtgacggcatcttagatggcattcttttgccaattctttactcggttcttgtaagcccacttgcatctgcctcaggttgtaatttggtattttttttgccttcttcgtgttattctttggtgttcattttcttccttttctctttcaattgttttttattttgagattatggcagagataaaatcaaattcgaaatcaatcgttgtttctgatgtggttctcgtgatgtctagaatcatggatcataaattgattggtttgaattatttggaatggagtaagctgattcgactgtatctaaggagtattgacaaagatgatcacttgattgataatcctcccaaagaaaaagacgattcaaggaaaatatggctccgtgaggatactcgcttgttccttcaaattcaaaattctatcgataatgaggtaattagtttgattaatcattgtgaattggt

SEQ ID NO: 336398 - DNA, 343 bp, Cannabis indica
caatccgcacaagtgcagatatccgcattttgcggattggattggattggatcgtgcgtattgaattagatcggatactttgtgaacacccttaaaattgagtattttacccataaatagatataatcatttctagtcattaatttaattaaatggttcaaattatcttttaaaaactacaacctaattaatattttttatttataattaattttaaaccttatttattatgttcaagtaacaaaaattctaaacttaactccaaatctaaattttattttatttacttatttagttttatgactaactaaaattttatttttctatttaattttaaatatat

SEQ ID NO: 336399 - DNA, 707 bp, Cannabis indica
acttcctcccgaagtaaggcttcaacaagtattcttccgaagacaactctcttgttcagtcaagttgttctaacaaactctaggacagggtaagaactgatatataaaacaatacaacctagatgaacaactaagttctcacataacaaagactctcccctcacaaataagaaaaatgcaaaaatgaatactagaagtgtctattcgaatggttgctctctaggttctatttatagaacatagaaacccaagagatagccacaagatcaaatctacagctatacaaaactttcctaaaaaaacatgatctgcagcatcagaatcgggatctgacgcaacaaatctgaccagaaaaggaaacttgccaaaaacgagtctgatcttgtattgagtcttgattcctgccataaacaatttatatattttgattgtatcaagacacaattgaatttaataaggaaaaaggcaataatcaaagtttcatttgaaaaccaactttccataagagaattgcttctcttacaagaagtttccatacaagaaaagtttagcttaaaaatgcgtcttttctaacatagaaaagagcaataaaaactgaataaacaaggtaagaaaatcgattctaaatgctaataattcttaccataaaagaaaaaatattttggcatctaacttgccttaaaaggactttacaatctccccctttg

SEQ ID NO: 336400 - DNA, 682 bp, Cannabis indica
aaattatgttgtgactaaaaattgttactaaatgtagcttttcttgtagtgtatgttaatatgtaaatttgtatatatatatatatttatatatttcctttattttttgtaaatttattagtacatgctttgagagatgatgcactttggaaaaaagtggagagttttgagtgtattatcacctaaactttatcctagcaatatgagtatgagttttcgaattctttgcctcttgaattgtccttccagatcgactccagcatggtacccaaatattccctgttggaccttcttttttctgtgcaagatgtccctctgggaccaagatggtctggctttgaaatgagtggactgggtttgttgttatacacggagccatggttcgactcgatcttgtgggctggcccactgagttgattgggcctcttaataggctcattttaagtgatataggttcatagaagggctatttacaaaaaaaaaaaatgagaaaataaggataagttttgatatatatggcataaaaatttaattacactaaatatgacattttttttaaaaaaaaaacttacaaatatgggaaaaagtcatgaggaatgacataaaaactttaaatttgtgtttctttttatttttttctttttttaaaaaataaaacactaaaataaataaaaaatgatct

SEQ ID NO: 336401 - DNA, 839 bp, Cannabis indica
ccaccatcccacagaagattgaagtatagccaagaagctaatcatgtaatccttgcttaatcacttgatgaaattgaagagaagcgaaccacatgaaacttaaaactgatggcccatcagtaaaaagtagctcggtatttcaataaacaagtgaaggttcaaaaattctttgtgggagatatggtcctaagaagagtatttttaaacaccaaagacagtatggcaggtgtgctcggatccaactgggaaggaccatatcaggtgatcgaagttctagaatcagaggcgtacaaattgggtaagtatgatgaaaaaatgcaactcgttctggcaccacggtattggaatggggaacatttaaaaaaatactaccaatagaagtaccaggtcggatgaccatataaagtacgaaacacaagaacatttacgcttaagtgagtggccttctgggtggaccatgcccaaaggttcggataaaatcttcaagtactcaggtcaaatgacaattattgaaagtacgacttttaatttctacaattttttttatttcatgttaagctaaagatcagattagatcagtatagtagctttgatgtaagttactacggtaacagtcatatctccgatcaataaatgaataaagatatttatttcaaaattcaaattgtgttgaatctattatcatgttattaatttaccatcaagtgcgtacaaaaggtttggtcaagcccaaaactcgggacagacaaaaaagcacacttgcaaaaaatataaaagtgaccaagagtcataagtctgctccgtcacttgaggggcacctatacctgtacaaagcattt

SEQ ID NO: 336402 - DNA, 479 bp, Cannabis indica
aatttgagacaaaaaaactaatttatagagcaacaaaataacaagttacacacaaaaactagttagattaaataaattaatcaaaaccgatttcttgaattaactaaatcaaaaatcgttcttgaaataactaaattaaaaattagttccttaaatcaatttctgaaataaataattcaaaaactattttctaaaatgacttaaataaaaattagttgaagcataaattaaaataaaactgattccacaattaaatgactaaaaacaaataacacacaattattcaaaaatcaattataaacttataaataaaaaaaacaaagaaaaattcttaaaaattctgataaatctaaattttatatataattagcatactagtattcaattccatgcctttcaaacatgttttttctttagggtaaataccattttggaccttgtgttttgtaaaagttatcaattggaccctctgttttgtt

SEQ ID NO: 336403 - DNA, 976 bp, Cannabis indica
tttatttagggcataaaaccctacaggtgatagagttgggatagtatgatattattttgtaaccctgtacagcagttgaagggtaggccttggtagactttgtagttgagtgcaccagaaaagaagaaagaaaaacaagggacgacctgaagccagtacaagaattcctaccagaaaagaatgaacacaaaccctattggaaattacatgtcaacagatcagctacagactagctttttcgcataggaatttacctcaacgcctgggggcaacacctgcatggagcaatcatatttgggttcaaggcctccaacaacgaagcagattatgaagcactcatagctgggctgaaacttgctcgagaggtacacaccgaatacattgaggtctgtagtgattcacaattcgtggtaaatcatgttttaggagagtacatggcccgtggacaaaaaatgatggcctatctaagcaagatacaagactttctcgcacaatttatgttggaatttatttcaccaagatcttagattcactaacaagtatgttgtttaacatcctaaatatgaacttctaaaacaataataaacacatatttaggtaaccttacattggttgcagcggaataatatctctccttccactaagatctctaacccttgtatcctttctgctgcaaagtatcaccaagatctgagtccgaatgtccttctcttcaatttggattcttcacgatcttccagactatgattgaggtaccacttgatgtgtgtgggcaccactctatcactcaaggttttcgaaattagaagaagaaaagagaaagagagggaggtcggctatagaaggatagtgagtggcttaatttttctgaaggcaatctcttaaatcttttattttggtgtgagccatcactatttatttataggtagcccctaggtttaggttagtaattttttggtattaaaataatgaaaat

SEQ ID NO: 336404 - DNA, 1315 bp, Cannabis indica
tggtccccaggaaaccttatcaaactgggattccgattgggaaccggtttgccggttgggataattttgtaaaccctagttttcccatttttgtgatatataggtgataattacgttatttatcgataaggatatttctagttttgactttaagtcctcgggaagtgttttagcgtgtctctcatcaatttacgaatgttatgatatagggccctgtaatacgtcgagttgctgttccacttaggctgatcgacatatctaagcacggaaacgaggtaagattagcataaaacatattatacaagcatgttgtgtttgtgattgtatatgttttgggtgatatcatagcggcataaccattgtgtcggttcgacagtataggcatcgtactggtcaagagtgatattcaccctagagagtattaattggcgctaatcatagcggcacaatcggttcggcagtacgggcacagtactggttaagagtgatatcatggccaattgtactcttgggtgctattaatgctatcatagcggtacgaacatagtgtcggtcccgcagtgcgatcatagtgctggtagtgggtgatatcatggtcaatagcaccaaccattaagaacgttcttaatcatttggttagtcttgtgaataggtgtatgggcgcctagacacaagttggtttcataatttgttatatgcacatcttactgagtctgtcgactcatcagtttgctaccttgtgtaggtaagggttaagcttggctggaggagtagtgagttggggctcggcaaggattgtacatatcgcggcaacgcaacctaaagggtttcgatcttatcacattttgagttaaattttagtattgccctgtaatttttttttaaaaaaaataagtatattgtaactttatatgttgtatatgtattttcaacatggttttaaactcgggatcccggcttatgaggttgtataaatattatataattagattattttcaatttagcaagttttaagaattcaggcattacaaatgatttcgttaaatgtacaatggtgctgcaattttttaaatataaaacttcagatttggggtgtgcctaaaaacttgaacctagatgtttgaatcgaattgtgtatgtatttcataaaatagtaaatatttatatataaagctaggagactaaaagggaaactactaaatacaaatagaaaactactaaaatacaaggggttgtttgacttcataacttaaaaactgtttttagtttttaaaaacagaaaacaggttttaaaaactaatagaggttgtttgg

SEQ ID NO: 336405 - DNA, 742 bp, Cannabis indica
ttcttccccttaattcaaatcaatcccaaatcctcccaaaacttccagaatacctgcaaacaatatacagaaccaaacccaaacaacagaacccaacaattcaaccaaaatcccaaaccaccattagagctccaacctaagctcttgaacttcaatttccaaccaaacaccaaaatagccaacaaattcagcttaaaacaacaaagtttactattatctaacctcagattaagaacccaagccaaacacatacacacagctcctaattcaagcctaaatccataaaattcacttcaaagattaagtaaaattcaaatagaaaagctagggagatttaccttgattcaaagaagtaggaaccttgctagaatttacaaattacagcaaagcacatccaccttcttgctgggtttggggattcgaaagaaagagagggagagatgaggaagagtctcaacttttctaggtttttcctttttatttttctattaattatctttaatcaaatgaagaataccaccagcccccaaaatcactacaagacaaacatcatttaggtaaaaagtgttgggttttatgccctaaataaaactcatttcatataatcagatttacttattaataaagatcagaaaaaacattttatgttgcatggttcacatgatttatttcaagattataggtatataaatgaatttttttttaagtccagaacatatgagttggttaaagattatagtgt

SEQ ID NO: 336406 - DNA, 538 bp, Cannabis indica
attaattagacttaataaagtctcttaattaacaaataaaccctagaatctcttttcttcacatttaagccctagcttagtgaaaaaatccataaactagacatagtctaattttagaattataattgattaattaaaatcaattaactgagtcttacaagaagtattgtctcaactagtatggggaccattggcctatataaccgagcttccaataagcagatctaaaattcaccaagtaaatttactaacttattaattcctcactgaattagccatagaagttggaattgcactttcagttacatagaacgctctatatgttccacgatagagatatgctattaattatccattgttataatttccataatcaatgatcttctatagatgatctacattgcatagggacaaaattaccgttacaccctttcaatgtattttatccttaaaacacttggtcgcctataatcactaaatgagcgctctatcatttatcttttcttagcctagctcgaaggaaaccatcatttcactt

SEQ ID NO: 336407 - DNA, 859 bp, Cannabis indica
tacttaattttttgaaattcaaaactataattcaaatatagttgttggggattgaattttgttatttataatgtgtataagtgatataaaataaagtgagaataatttggaatggtttggagagttgtttgcataaaatgaaaaatttggtaactagtaactagttactgtttctttttcagctttaattcttgaacatttttcactatggtgatgctttttaacaactcccataacttttaaatcacctatttaattccatttacacccaattaagagatggtaacaaccattgagtgtaggatgtttgaatttcaaagtgtgtggtcctaaacactataaatagagaccttggttcacattttgagacacacttttctcttctatctttcaaacacaaagctagagagttctaagacttgataattcctagaagtatttcgacaaaatcctaagtgtttcatagaggggtaaataattttcttggacaaaggtgtagaaactttgttcaagcttttggtggtccccatcgggtgtttgttcttcttttcttgttttgttctattttttagttttatattgttttcttgttctcctctaaacactcttatttatatatatatactatcatatatatatatatatatttatatcttgactatatagtattatatatattatatatacatgctatatacactctctatatgcactttctatatctctactatatatggaagaggtttcaatggttacatttttattgtaaccatcatggttacatttttttaagtccattggattactattaaatggttgtgattaatttggaaattaaataaaaataaataataaataa

SEQ ID NO: 336408 - DNA, 772 bp, Cannabis indica
agatctagttgagcactaaaatttgaatgtaaaaatagtggcgatagtgatgtcgatatgataaaggggatgtatatatgtatgggataatgatggtgatgtttatgagaggaagttggtgtttaaagcttgtagtaattatgatggtgtgtatggctattttggctcttgaaaaaaaataagtaattgactataaaagatggcaagagagagtatggtggatagctatttggcttttagtgaatgaaaaaaaaaacaatgtcaagatgatagctcctatttatagaattaaggtttaactaaactcaccaatatttagccaattttgtgcctcctatttagctacagttaattaaatacaacataaaatacgtaaattcaaacttctccctcatactcggtcaaaagggaaccataactccattaattacctattcaaactcatcaatcttccccacccaaatctctttggcggatgcatgtacaaccatgatctagaaatattgttgagaaatttgttctcccttgctccacgtgtagatcatgactcacttaaatttaaattatttcatattattcattatgtccatgagtaaaacactaccgtatttttctcaatcaatgccatgcaaataatctaaatttccactacttacaatgcacacgctccacttgacaatacccatcctatacatatatatatattatatatatttctcttaatagattatctatttatcttcataactataattatttatactcttatttt

SEQ ID NO: 336409 - DNA, 925 bp, Cannabis indica
aaaaaattgaacaaactattagagttggatagaaattaaaatataaaacgagtttattaaatatataaagttacttacatgcaattgttgtgtgtgttcatcgtgccatttgttgtccttacaatggaactttggaaaagtgttcacagcactgggaagttctcccatccaccttgaatcttcatctaccctcggttttttgcattttgtttagctcttgccgataatttaaagtaaatttaaggacaagaaggttaaatgcaagtgtttttattgtggtgtaatgggacactggaagtgaaactgtaataagtatatcttcgagcttaagaaagatatatatgatttatttgtttttaacgctaacttagtggaagatgataaatatttatggattattgattttggagtcactaatcacatttgttcttctatgcagatacttgatttatcaagggagctgactgatggagaggtgaccatgcgggttggtaacggagcataagtattgctaaatgtgttgaccaagtccggttgaactttaaaaataagtttttattgttaaacaatgtttatttcatacttgaatgtaccaggaatattatttctttatcgcttttgcatgaacaatattttaacattgagtttattaataatgagattattatttttaaatttagaacaccaatttattctacaaaataaggaaatagaatatacgtgttcagaccaagtgagcaattatttttaaatgatgaattgttcaaagtagctttgccttaacaaaataagaggcaaaatgtttgtaacaatgaggaaacttgtgtatggcatctatgtttaggccatattagcctagacagaataaaccggttaacaaaggatagtcctttgtgttgggtttatgccctaaataaaactcttt

SEQ ID NO: 336410 - DNA, 1156 bp, Cannabis indica
ctggcgttggttgagtgtcacgaatctcaaccattttggcctgcaaaaaaattcataataaaactgttagagttaaagaaattgaaattataaaactaatttattaaaaatataaagatacttacatgcagttgttgtgtgtgctcgtcgcgccatttattgttcttgcagtggaactttgcaaatgtatccacaacactgggaagctcccccgtctggggatcagcctatttttaaacaaaattggaattagaaaaatattattaaaaatttccaattgaacaatatttttatcatatattgaaaatatcatatcccactgacaatggtagaaattatggtcttagatccccattcaccttgaaccttcatgttacctcaatttttcgtattttactcagctcttgcctgtaatttaacgtatatttattgttagcaaaatgggtacaatttagtttccatatccttgaacaaatcgtcgtacttaccaccaccattcatagggggctcattaaaggaagcagtggtagaatttggatcgttaaaactagaatcttctctaaaatatcagccatgacatctgctatttcttcttcttcgttgtctaatatttctatagtcggttgcgtgaacgactccccatgaaaataccaggtcgtgtacaattgttggatgccatgcacaaacaaatgtaccctaatattatcgggagtttcaaagttcacatttagacatctcatgcaagtgcatcgtgtaactctagcagaatttatttgcattcgagcaactccaacaaactcatccacacccctacgaaactctacagatcgtctgtttgaagtcatccagcttctgtcactcaccatattgctatacaatataaaaacagacaatataaattaaagttgaaaaagtgtcctactccaccttgtcactttatttctaaaagggtaaagaacctatcccattcaggtttgtaatatacatatagtgctacctattctcttaagattgcttccttttttttttcaaaatttcggcaacacctccctactgttctcataagtaagcaaactattaccaagtatgccaacttacaagaacatgcaacgagatgatgtaccgaaatctttaacaaagaaacaatcaaatgagc

SEQ ID NO: 336411 - DNA, 618 bp, Cannabis indica
ctaacccagaaaatctaccccagacacaacacacacacatattcacaaagattagccaaaacacagtagtttagagtaagaaatcaaacaccagaaatatagaggttcgccctaaaattaggggtacatcctctgatgagctcgccttgaagatcgacctcagatcttgcactatgaagaatgaatattacaacaggtatgaaatccaagtcacagatcgactggtatttctaggtttttctctcttttgttttctgtgtttatttctctcttgttttctgatttctcacactaactctcttctgtttcttgtgcatgtacttgaaacaacatctggagctgaaaaccttctcagatctggtaacctagggctcttgcttctggtatatatcacctcttctcttctgttcccttttatagttgtagttctagggttgatcacagaactaggagttagttacaacttcggttgtaactaacaactagttcttgatccactagaggcgaagccacataggatctgatttctgttgtattctgttggtaattttttttttaattttcacttcatctgtaaaactgtaataataaaggttacagtgaggtctaattttaaca

SEQ ID NO: 336412 - DNA, 778 bp, Cannabis indica
ttttattttgaaaagttttgggttataaaataataatttttttaattttttaagtatataaaatcaaattttccaaatcaattaccatttccaaaactaatacgtttattgcattcattattatttcttagttgacgtctgtctacgcgcgacaacataatttagaaggataattttgtaacaatcaaaatctgccgttttttatttttttttttccacaagatttgaactacttgaaacttcctatttgtttataccataaactaagcctataaccatatatgaatctgtagttagcgacgacacaaatttaataattaatatatttagaatagtttgcagcataaatactcaagtttaacttctaattgtaaataaatactaagtttaattttagcggcaataatacctaaattatatatttttagaattctgtaagtgtacctaatattattaaatattaagtaaattgtcacgtgacaatctttgattggtcaaggttataaatttttattttttttaaaaaaattaatttaaatatactaataagaaaatgacacgtgataaaaacttaacatataattcaagtacctacagagttctaaaaatatattttaatgggccaaccttaggcataagtggcctaggcccgcgcttaggacccacgatcattttaggggccaaaattaaaaaaaaccttttaaaaaggaattatttcacaaaaatataaaaataacaaaaaaaatttcaaaaacacagttttacgaaattttaaaca

SEQ ID NO: 336413 - DNA, 537 bp, Cannabis indica
taggacgcctttcttcttcccaaagaaggctagaagtgacagtgtgagggttcccaaagcaagccctaactcattccaaaaagaacatggtgactggatgttcctcgaaggatactgaccaacaagggtcacttcaactgttaagcctacttcctacacgggatctgtaactcgatcaagagctcatgccatgcgtacaattcctattcaaaaatcagtgaatccctttgttcaaaaagttcaggaagaggagtgttgcacatctgaacactctttagaagacactccctttatcgaacacagtaagggggtgtctgctgatctcattactcagttcgaagaactaaccattggaaatgataaaaatatgtcagtgttagtaactgggacaattagtaatgaagagaagattcaagaactataaagataattggccgagagggatgaagaagtagcccgactctcaacacaattatctcatcaagctaatatgagacaaaaggagagtgaggttgggcaacattcctcgtcttcagc

SEQ ID NO: 336414 - DNA, 748 bp, Cannabis indica
ttcgggtcagagttcaagtcctggtctgagtttgggtttgggtccggatttaggtctagggccagataaggctctgggtgtgggttcgcgtcctgggtcttggtcttggttttgtcttattcccaagttccaatcccgatctaagtctagatttagttctgcgtctaagtccttggttctgatcctggtctgggttcgagtttgggtccgggtccaggtctagctttgcgtctgattctaggtgtgggtttgagtttgggtcccagtctgtgttcgggtttgtgtcaaggtctggacaccgatgtgggtctaggtttgggtccaagtccatgtttgggtcccgagtgcatgtccaagtttgaatctgggtcaggatctcggtcaagatctaggtctagcatttcgatcccagtctgggtctaggtctaactccaggttcgtatctgaatccttatctaggtcctagtctgtgtttgggaccaggtcccagatttaggtcaaggtccgggtgtcagttccagtctgggtagaccaccgtgtccgagctcgagttccagtctcattttgggtctgagggtaggtctgtgttcgattctgggtcctggtcacggttgtagtcttgttctatggtcctcgttcggcgattcttgttcatgttctaattttaggtcccaggtctaggtctgggttctagtcctagtctgagtcctaaatctagacaccgactactggtctgttccaggccccg

SEQ ID NO: 336415 - DNA, 500 bp, Cannabis indica
acaaccaggcgcagccacctcatatcagaaccaccaagtgcaacaacccagcagactcaactctgtcaagccaaatttttcagccaatccaagctaagttctgatttggtgatttcatttgaaatttattttggattacagtgcttaattagtggctgtggttgacctgctagtgttatagtcaatggtgcttgagtttgtcattatgatttaaatgtggtagcagtagtgtgatactgttggtttggacgatttgaattggaatttggtgggatttttgcacattgggctgagaaagattggtaaatctgagaacaatattgattgtgaacttggggttgtcatttggaattgttgtttttcagtgtggttttgaattcgttactgttccctaccgtgtttgtctgaggttgaattggcagtggttttgaattctttactgttctctaccgtgttagacatagtgcaagtgtgaactttgttgtagtgttggacagatt

SEQ ID NO: 336416 - DNA, 799 bp, Cannabis indica
aaaaataaatatagagtttatgctgcttacaaactcaaagtttttagtacttatgccgctatttaccctatatattataaaaatatttgtgagataaatatcttatattttcttattcatacacttatattatactaggcgaaagttacgtgcattgcacgtatgcttagtcatatatattcaattttatttagcaagtgataaaatatgcatatttcttcaatttttattttacattcaaatagtcattctaatatgcttagaaatatttcaacagtaaaaaaaaatcaattaatttagtatgtctgcgcctgttgaattaaaccacatattacctgtacactgtaaaaaccagattattacacagagatttacaaggcagtaaaataatccctaggtggcctttggcctctattaacctagacaaaagcagttaagttagttacaaagttgattaatactttgtaactaactctcctctctttgtgctataatacaacatatataaaaaccagcatgaacaacaattaagtaacaggcagagaaacaaaaactcagagcagtactacagaaacagaaaatcagaggcataacaatatacaacaaaatcagatccttttcacagagaagaaacaaactgttttttgggggagttttttgaaggaggcttacaatggagtaagctttggaacccaaggtgtgattcggatatccaagatctcaggaagattgtccatgcaataaagaagaaatacacaacagttagtaaaaaattcgagagaaacaaagagaatagaga

SEQ ID NO: 336417 - DNA, 507 bp, Cannabis indica
gaattggagtttacacattggctcgactcaatggctcactaataaagaactactggaacgtggagcatttgcgaccctactaccaatgaataaatgatgtaactcacattgctgatgtaaagttttaacttcagttatgaataaagagaatcatttctattatttaagtaattacaaagttttactctttaaaattacttaaggggcatttgtgtatgattaaccagaattcatctggaaatacatggtataatgcaaacccaccattttcaattttttttttttttttttttgttaattttaaaggtttttgactaaacctctttgagaaagagggtggaattgttataacttcctgaccaaacctttttgacgagatagggggtcgaattgttatagcatcctgatcaaacctttttgatgaagaagggatcaaacaactataatttttgattaaaaacctaatctgacgggaaaggaaaataaaaaattataaatgagatataa

SEQ ID NO: 336418 - DNA, 804 bp, Cannabis indica
tctgtagggtcagtcatcaatccagaagcagctagagtgacgtactcgtgtataagagccattattctgtgggtgtaaggacccaatggaggcttgaagcggggacgttacaagtgaagttaaataacttagttgtttttgaaaagtaccaaaaagttattcaaactgaagaaagttcataattgtttcatctctattccttttggatagaattagagatgtgtcttccttacattcagatgcacttaataagcagtaaagaattcagtatccctagagaagtaattcatacagaataatgatgttgtataatattttatgaacacaaaggaagtaatggtagagatagcagttgcttaccatagttctagttatttgggtatagtcagatatgctacacttgatatggatatcaagacaatagattgatttaaatgcacttctagttttatgttagtgcaagtgggagtttgttgggattttataccctaaattaaacctatttcaatataatattatttgttatcaatagaagattagaaatcatttatattaacatgttttgttcatgcttatgggttgatatacaatttatattaaattcaaaacatatagttattcacaatttcagtgatgtcaacacaatggacggtaattgtgatcatatgcttcaaaagtttatgtcccatgattcatcaatgcactagatttacaccgatgtgatagtcagcgataaagtttacttacaccttgaataagtgttatgtcctttccaggacaatggcaaagtatgctagtatcaga

SEQ ID NO: 336419 - DNA, 1125 bp, Cannabis indica
cagatgtagacttcctgtcatctagacaagcctataaatctgagtcagtatagcctacgacatttatagagtgacatataacggtccataattaatttgatttaattattttattaagtttaaataatttcaattaaattaagttaattatttttatttattaattaaatacattattgaataattatttaattaaacgataattatttttataaaagatctactgatattttgatatttagctattagatatttatacttgaatttaaattttaaattctaaaaatttttagtatatttatcttttatttaaaattaaaaagattaaaaaaggtctttaatttataactaatatgtatatggatatatagtatcgtaattgagaataaaaaaaaaatagaaaataaataactgaaaagagagaaaataggattgatattttctcactcctcctccctctctctcatgccatctttctctcttgtcttacacgcctatctcaagtgtgtgtgagattaaaccctaatcttattacagtgtctcatgagttgagtacacactgtaatacttaaatctgttcatcttgtaagatctaatagcccaccctattcctgagtattgaggctgaattagaagatcaaggtgttgattcttcaatcaagttcttggattggatgctcgattgttatacaaaaagaatcaaggataccctgatagacatcaagaggtatcgaatttctttcagtagattaaatttaatctatattcattttgttgagatccttgggcttatgattcatattagataaacaatattttatcaaaattttgcttccgcttttataactctaatatggaccataaaaattaacacccagtgaaagaatcatcttctctgagaaactttaacgagtgaatcaaagaactcaatgaacacaaacctgagttcatgtatattcaggatttaggttgatctactaatgatcatcattatgatatgaataactctttcatggtaaacgatacattagtgaaagatgttactacatatcagtccagtcatgcataatcaaattatacaccacacctttactatccaaatcaaaatcacacacacacacacac

SEQ ID NO: 336420 - DNA, 1408 bp, Cannabis indica
aagctagccctaccctgactctctaattcggccctagcaaagtcccgaatcttaacactggctgcatcatcgccgagatagctgtccgagggacagagctagctagaagataaataggctgaagggtccaagagtaggggcaccgaaggtccagaacccatccgggaccgacctaaataatcacctaagtgagagaaataatactctttggcatgatccccccaccgagtgcaaggcatcctaaacctatggagacgttcatcgaaccctataggcctaaggctagcatactcacggacggaggggacatagtgtatcattaaaggggacttaccagaaccgaagtgctggcatcgggaacccccgtattcggcactgggaccacaggctttggtctgggggtccttcgctccaccgggctcccaatatgaaggggccttccggcggcaccctgggccttattataagcccgctcctgttccttttggaaaaggtatttctggtacttatcttccgccgtggcgatgatatcatcccggagtaccttctctgtagccggaaccctcacatttgggcagacgactttagaaaggttggagtcgtccattgaccgatgcccctggatcaacttggccttccgacagtgctccgttgtgaccaactccccgacgttgagggccttcttgtcatacgtggcgaaggtcttagcccgttggagaaaaagctgagtaggttcagtccgcgcgtaaggagggatcctaacccactccgtgagaagctccggatgctccagagcctggaacctgaaggagaagaagaagcggtgacggtattccttcacatgcttctgatagttaaaagggaccgggccctcattcaaaggatgggcccggagatcgtaaaaactgtccttaaacttatctccctttttagggatggaaacgagttcgtaaaaatacaaaatctctgccggactgggagagccccagctccgggcagagtaaaaaataaataagcctaaaagcaggcgataagcttgaggaatgagttggtatggtgcaaggccgacaaatataaggaaatctataaagtaatcttgaagggggagcatggccccggccatcaagtgcgtttgactccaggctccgaagcccccgtagttatggttgggcgtctccgcattccggggcggccggtggtatgtcccggaggtcgcaggcttgatacctgccaccaccacgatgtgttccagctggtgagggcaggtcagtgtagagtgaagctcggctgctttccacccgttagcacgagacttgtacccttcctaggccaccagacccttcatgacttcttccagggtggccaggcgtttccctcctttcttcgaagatttagaaccggatgcaga

SEQ ID NO: 336421 - DNA, 1042 bp, Cannabis indica
ccgggacctatgcccagggtgcttccttatggcatacaaagacttatcaaatatttacaagttatctgatccacgtgtcccttttcgactggtccacgtatattgggcgaattcaggggcaacatttaccccccaagccttgtttacttggaaaaataaaccaaggcttgcttaagtgcctccggttgactcctcgtttccctggctcaagcccagagcgcgtgagggcacatttaatgatggtatttaatgcagcgattcgcttttttgcagggacgtctccggccgcctcctcggtttcccgacacgagcttggggcgcgtgaaagtgtgcctaatgatggcattaaatgcagcgattcgctttttgcagaggtcgattcgtttcacgccctttgattgatgcggcgcattaatggtgtcagacggatactcaaacgtttccaccgcctttatggcagcttgatctgatccgttgattttcaggaattcgaatcgtgcatctcccccaccgtacgattggtaggtggtgacgcctgttcctcatgcacttttgcctataaaagccaccatctttccttcagtttggttactttccattccttgccatttttgctcgaatttcctagagagaaaattctccaaaacagcacgaaccatcttagcacttagacatttttcccagttttccagtgtttgctttcaacagttcttcttcaacttttactcgaccacattcaggacccccagttcaacgatttactgtaagttttttgcatcctttgataatgacatgcctttacttgctttgtttgtttctctgggttcgtattctgagatttctgggtatgcgagtgttgaggttcttcaagtgttctgttttatgtctactgctttagttgtaggatcgccattatcatgcctctgttataatgtgcatttttgttgaagagagccatgtgttcttcgttcaacagttgcttagggcatagaatgggtttttttttttttctttttttttttttgtaaaaccactttctgcg

SEQ ID NO: 336422 - DNA, 847 bp, Cannabis indica
caaagtggggcccaatatccaactcatgtggccggccacttcataggatattgccactttattttttccattattttaatgctaattaaatctaacctaaccctaggtggtttcctataaataggtagtgatggctttagggaaaagatgatgcatctcattccttcagataaaatttgagcctccttcctaaccctagccgaaaccactctctctctctctctcttccctcttcaaaacctgaagccacatagtgaaaagagtgagtgcccatacacatcaagtagtactcaatcatagtgtggtaaaataattccaacaccatgaaccaccacaatcggtctacatgcttcccacctttttattgatgcatccaatgccattaaaataagagcaagctgttgtctgctgttttcatatcaacaactgatccttggtttgttttttccaccatgtgaaagaaactcggtattaggctgtatgaggcactagtgtttcctgttaagtcatttactgcatgctccttacttctcaaagctttcatgtagttcatcttgatgccaaacctgtatttcaattctccttttatatgtagttgtgttgtttttgtttttatgtttaggaacttcggtttgatgcattctcctatcaattttgatgtcgcttgcctttggtcttcataactaatatttattgggcaggtgtggatttttgagaacatcctaatcatgaatgtatttgtcagcctatttttagatgctcgtagagaccaattacagctttggtgaacatatttctgttgggttttatgccctaaataaaactctttacaatctgattagtaatc

SEQ ID NO: 336423 - DNA, 1062 bp, Cannabis indica
tttttttttgcatttttacgaaattctacataaaaattcttattgcaactagcgctgcaacctaaattgtaacaaaaaatcgtatagaaactcctattgcaactagcgctgcaaccactttagaaactcgaactgtaaatttaaaaaaaaaaaaattaaaaaatagtatatgaggtaattctccaaaaatatatacctactataattaaatttaattttaaaaaaaaaaaaggaaaaaatgtttataaataaagaatttagttattaattatatattattaattcttttaaaaaatttattagatttagttagagatatttttttaattagtacgacatttaaatatcttttatataaattgattttttttttattattattacttatataatatgtgtatacatttatatcataatttattcttaaattaaaataataaataagtatgtacatatttatttaaaaaaattacatttgaaataaagtattataatatccctcattacaatttttcttccccgtataatttagaacaaataatagtagtatcttattcatatgtacatcaatttaataataataatagtgatagtggaaacacgttatagtgtaaattaaaatttataacatacaaagagtacaatcttacacaatataataagtagatatataaacatagggacccgattttgtcacgtgatagtaaataaaagaatacaatccgtgattgtatagtagccataggattgtgttgctgcatgatctaaaggctgggattaaagtaagggtagttaggctttataaattggtaaccggttgatattgtatttaaaaatcattatttttaaaaagttgatattgattgatgtactgacagatactatttttaaatattaattgtttggttttttttaaaaaaaaaatgaaaaagtgacatgacatgacatgattgatgtctgataatacactgtactttttaataacttttcaaattatattgattatattatttttttttaaaaaaaaataactataaatcttaatttcaacacttattcatt

SEQ ID NO: 336424 - DNA, 815 bp, Cannabis indica
gtttgaagttggcttatacctactcccgggctaaatctactacttccaagagtacggctctgtctgacaccttgagggcagaggcggacttggccaagaaggaagctgaggaggccagggcggagactgcagctgttcaccatgagttgggtgaggccaacaagaagttgtttaccgctgagaagaaggtcaccgtgctgacaaagcacctcgaggctgctgatcgctttgaggaaaccatcgagaccttatctgctaaagttgaccatcttcaggatgagaggacttctctgcggcaggtcctccttcggctgaaggatgataaggatgctcaggcggtcgaggccaacagcttgaaggagaaggttgatactttggagactgccggtctcgagctcttcttcgatttttggaaggctaatccccaggccaacttcgactatgatttttggcgtgaggaacagtcatgttatgaacatcctggctgtgtgcggaaccgttaattccggtctcttgcacaccaggcgcagtttcagtaacaggagttggtccatcattcaccacgctccccgtctgtccaggattgacagcgggtggaaccgtcaaactccttgggtcctacaacatcggatccaacgtctgtgagttcattgggtcggacaagcctctgcgagtttgcaccatcgtgtcgaaagagcgatctgtgattcttctctcaatgaaagcacgaaaatgttgacttcgcttttagccaacgacaatgagtctttttgataatcaataaacgatgtgtctgctggaaattattttaccag

SEQ ID NO: 336425 - DNA, 1136 bp, Cannabis indica
aattgggagccggacccagatcccaacccaaacctggactcgggacccaaacctgaacctgaactcagacccaaacatggaaccagactagggacacaaagccagggtcgggacccaaacctgaacccaaactcaaaaatgggaccggggacttgaaccagaaccagaccgagactcgtgacagtgatccagatcttgactcaggattcaggtaacggggccttgaaaagaccagttgtcggtgtctagatctggtactcaaactaggacctgaacccagacgaagaaccaaacccgaatctagacctagacttgggacccaaaattagaacctgaaaaagaatcgccgaaccaggaccctaatacaagactaggaccgtgacaaggacccggacccagacttagaaccgaagacagacctagcctcagacccaaactgagactggaactcgggcccgaacacggtcgtgtacccagaccgaaactaagacccggacctggacctaaatcttggacccgatcccaaacacagacttggacctagatagagattcggatacgaacgtggactcggacaaagacccagacttggatcgaaatgctagaccttgatctggaccgggatcctgacgcagacaaaaacttggacccgaactcggtacaccaacttggacctggactcgaacctagacccagatcgtggtccagacctggacacaaacccgaacacagcctcaaacaggaactcaaacccacacctagaatcagagccaaaactagacccgaacccggacccaaactcgaacccacaccaggataagaaccaaggacttagacccagaactgaatccaaactcagatcgcgattggaacttgggactcgtacccatcctataccaagacccagggcgcaaacccatacccggagcctgatttggacctagactgatatccggaccggaacccaaactcagaccaagactcgaactttgacccgaactcaaacccaaacttgaactaagaatcgcaaatggaactagaaccgaactagaagtaggactaggaccaggaactaaaccaaaatgccaacctagatcaaaaccgagatagagacctaaacccgaaccgagactagg

SEQ ID NO: 336426 - DNA, 767 bp, Cannabis indica
acaggataaagattgttaaatattattttagagtttctattttgtaaagttattaattagattttttattttgttaaatggtaaaatggatcttgtattttctaaaataatagaaatagattcttgaactaattttttttgttaaaataaaatttaataataatctgatctaaaagtgttatgacaaaacagttcataccttttgtatctgttcgtgttaggaattgtcttcaagttggttatattaaaaagaaaagttgttgaaaattaagctcatggtcttattttttctattttaaaacataccaggtctattttattatttaacaaaaaagagggtccaatcagtaatttttgcaaaatacaaagtctaaagtaatatttaccaatgataaaattaaaataaattattttgaagtgtgaaaagttagaacttaattcaataatactaaaattcatatatcatgtaaattaattttatagtttttttttattatataattaaatattgtgtaaattttttttattattattatgttgcataattttcacatgatatattaaaattataatagggtaatagaattttaataaaaagaataatttctataatttatatttatttaatttttagttaagttcgaatttaatatttttttttaacttgtaagtttgccttcgtgttgtgtgttctctctttactttatattaaacaagggagctcaacttttgtaatattttatatatatatattgtacttatactga

SEQ ID NO: 336427 - DNA, 552 bp, Cannabis indica
gtttgggtctgggtttgaggttgtgtctcagaagtcaggtcctgggttttggatcctgggtcaggtcccgtgtctcgagtttggggtcgagttttgggttcggtcccaaatctggggctgagttttgtgtcgatgtccccgatctgggtcaggatccttggtccaggtctaggtccaagtttgggtttagggcctagttcccccatctaggtctggattctaggtccaagtctaggtccaagttcagattcgggttgggatcctaagtttgggtctgagtctaggtcccagtacgtgtttaggtttgagtcagggtctgggtcctgttctgagtccaagtccctattttggtccagggcgggatcccaatctgggtccgagacaacgtctaggtcccgaacaaggtttgggtttgggttcgggtgcgggttcaggtcctgagtttgggtctaggttcgcgtctagatccgggtctgggtcttggtcctgggttccgatctcagtatgggtatgggcctgggcccgtgtccaggttagggtttagggtttagg

SEQ ID NO: 336428 - DNA, 919 bp, Cannabis indica
atattacatcaaatataaaaaacttataaaacaaatatttattagataattacttttaaaaatataaattatgaaatgtatactaaatgaaagataaaaaactataagacattaaaaataagataataaacactcatagggtaagaaattaatcaaccacccataaacaaaaatacttttggatgaattaatatgacataaaaagaataatatttataacctacatgatgatgcctacatcatttataaacaatgtaggacatttagttccatgtgtttttgtagaataaaaatagaataaaaaaaatctaagatgccacataaacttattttgtgatttcctttatattatatatagatatgcctgaataagcattatctttattacttttcttaatatattttttcacttatattaaaagtattattgaataatttacaataatacttattgtgtattattttcaataagcttaaaatattattattattttaatttttctataatacattttgtcactttacattataagcattattgaaatatattatcatgaaaattttttttaattattttatcatattcataagactaaaatatcattattcttttaattttcccaaatactattcacatgatttacaataatactttttcttactatttaaattaaataattattacaatataatatatttttattcaaacaaataaacaatactgctacaagtttatagcaacaattcccatgatattaaaaataaaatatttatgaaagaaactaatagaaattgatataacacatatatctcctacaactattgttggatatattttaccaagatctagatttactaacaagtatgtttcattaacattctaatatgaattctaaagcaatgaaataaacacatataa

SEQ ID NO: 336429 - DNA, 517 bp, Cannabis indica
ctctctctctctctctcctacacgcctttataaaaatctatgtctccttactttcttgttcttattgtgtagacgtggtgtttactgagattttcggaaatcaaatatttagtgcttaggaaagaaataacaaattaaataatagatgcgagatttttacttggttccggtattaactattcttagtctacgagtctattttattaggcactttggtcggtgaatattaatacagatttgtgtacaatggactggaactctttctttctcttgttccccttgaagaagaagcattataggaatttttatagttatatagtattttttctgacttcaaagtgtcttgcccctatcttatagaatagattccatatgtaaagcccgcttagtttaatttgggaattagcagttaatcttgattaattatgaaaaattatttatagctatttaaataatttattatactgttatttatggaattcagaaatgcatggttatgtcattcagtagttttcat

SEQ ID NO: 336430 - DNA, 505 bp, Cannabis indica
cgacattgtatcgatattcactcgataaatacactttggatgcgtttcatttgtatggttacacatttaattttaataaattttacctatgttcccagcaactcttcccaactgccacattgcatgttagacacgtttattatcgataagctatcgacataacgtcgacattgtatcgaaaaatatgtatgctgtttcatttgttttgcatgttgtcgacaagttatcgacatagtatcgatattctgtcgacaaatacacacttcatgcgttgcacctgtacagttacatatttaatggccattaatttctcctacattcccaacatgtataatgctctataaaagcaaattcctttctgattcataagtgctcttgtcttctacttctctcttacacttaaaaattaaagccaaatttctcttattcttaagttctaaatatgtctactagaaagaacaagggcaaattcccaattctaaatcctaaaaagctcaagcaggag

SEQ ID NO: 336431 - DNA, 1234 bp, Cannabis indica
attcccaacatgtataatgctctataaaagcaaattcctttctgattcataagtgctcttgtcttctacttctctcttacacttaaaaattaaagccaaatttctcttattcttaagttctaaatatgtctactagaaagaacaagggcaaattctcaattctaactcctgaagagctcaagcaagaggatgatggtataattactcctcaaatgcagaaagttctagacgcctatagagcttttgaaaaagaacgaaatcggaacgagttaaggttgatacaacttgaagcacaatttagcaaaattggtctatggccggctccactaccaaggttccccgaaggatgtcgtcgttgcaaattaggcatctttaatggtaaaccggtgaagcctggatctttatgcaagtattgcaagtctcacccgcaagccaaacaattttaataatttgttattttatagtttgtggtgagttttatttaatgtttgttttttttatgaacttttattttaaagttatttgatgttattttatgaatgaacttttatgttattggtttttttttcaattttcgatttcaaaattgacaatacatcgacattgcatcgatatatcgtcgacactgttggtcaacttcatgtcgacatactatcgataaaatgtcgatagtatgttaatttgtttttcatcgaaattctatcgaaaagccgtcgacaacatgccgataatggtcatcactgacttttcttggtagaatatcaacatacaattgatattccatcgataaatcgtcgataacatctggaaaacctagattttgaaagaaaaccagatctgccagatctcaaccttttcagaccaaagaacaccagttccaacaaatacgacacatataacgaaagcaaactacataaagtctaaaaaatgcttaaaacacaagttacccattataatggtgtaagattctttagtgatattagggtgtgctccgattttccaccaacgcccaccgagaaacaaccattcaatagggaagagagagtgggacgagaaagagggaagtttttgggaagttttttcatttttttctagagagagagagtggtgcacgagagtgagggaagagagagaggaagagagagggaagttgttttcagtttttaccaattttatttatttattttttttaaaaaagggtaaaatgggaagttcatgtaatcaatggaattaa

SEQ ID NO: 336432 - DNA, 759 bp, Cannabis indica
tcatacaatttaaagatcgtaatagaagtaggagattaatataaataggagatattatgaaaccaaacaatttgtatcaaacaaaacaagttgtgtattgaactaaaaacttaacacacataaattaggaatactattaaaaattcggataacaataactgaaaaaaatatctgtttaaaatttttgcaaccccatcaaagcttaatgtgcatacttgagggtattgtaatccagttcctggtcttacagttccttgtcaattatttttttcttttttcatgagtgtacagatcaaactcctaaacaccttcaattgaccttcgcattgcctataaacacaaattttgtataatcttttgggccatacaaaaatccttagtaaatgcttgtcctttttcaattacaaattttgtataatcctttggccatacaagaaactatattttacaacttgtaagaaagatgtgattcgaattcagtttagtggcttgagaggatcaaattctaggttgctacttgtatttataaaacaaaatactttgacaactttctttcttagatctttgtagagaatggggaagttttctgtactaattatgcttcttcttttttttgtgcctttactgcattttgcataagtttggtactgtactttgttggtgttttgtgtccacggatttcctccaccatgagtgagaggtctcaatatatttgggaggaggtcacccgtggacatgtgaacctttttgtctcttttc

SEQ ID NO: 336433 - DNA, 1095 bp, Cannabis indica
cctctacttggctgtctcagaaaatgcaattagtgcagaattagtgcgagaagagggaaagtaccagcaacctgtttactatgttagtaaaaggttactgggggcagaatcaagatatccacctcttgaaaaacttaccctatgcctaattcatgcatctcgcaaattcaggccctacttccagacacatccgataagggtgttagctgatcaacccctgagacaagttttgtcaaaaccagatggctctagaagattgataaaatggtccatcgagctggggcagttaggcacaacttatcacccaagaacatccatcaggggccacgctttggccgatttcctgatagaaggaataattccaaatgaaaatccaatcaccctgggagatacagacacttggaagttgtatgtggatggagcatctaatgaacatggctcgggtgcaagggtgatattgatctcgccaaaaggctttaagtttcactatgccttaagatttcaatttgacacttcaaacaatgaggatgagtatgaagccttgatagcttgtttgagactaacggaagttttaaaagtcaagaatctggtgtgttacagtgactcgcagttaattgtaaatcaagtcctagtcaaataccaggcaaagggcttaaaatggaaaaatacctagagaaggttcggaagaacttggaaaagtttgattattttaaaatcgaacaaattccaagagaacaaaactctaatgtcgatgccctggcaaaactggcctcgtagaacgaacttgatgaattaaaattggtacgggtggagtattagacgagccaagtatatgtgaagaggaagaagttgagatgattgacagcttgcctacttcgatgacacctatagtcaactatcttctcaacaggcaacttccagctgacaaaaatgaggcacgaaatctcttgtattcagtgcctcactacacgatagtagaaggcaaattgtatcgaaggggctattcaatgcctctcctacggtgtgttctccccacagaagcaaacgagattatcaaagaaatccatgaaggcttttgtggagaccatgcaagtt

SEQ ID NO: 336434 - DNA, 674 bp, Cannabis indica
aattttaagtcaaaataataaatggtttggctgaaaaaactttttgaaagttttaaaaaaaaaataatatatgtgtatatatataatactgtcacctttatttacacaaaaaaaaaaaaaaggttttaagctactaactaggccagagaaaaaaaaaaaacaaggaaaagaaaaagcatacaaaacaatagccaggggtaaatagtttttaatttgagtatgtacatttcaaaaataatgtaacaattaacggtatttgagggaataaaataagcaaagagaaattcatcaatattttaaaaatgaagttgatatgcgcaattaactctaaattttatgtgtgggattgaaatatttattttcttagtaattttttaacataattaaaatcactcataaatttacgttacaaaaattcaaaatcagcacaagaacctcctcgaactaagataactcatcgtcttatcgaaaaacatgctatatcaaactatgggttgctaaaatcttaacgtgaaccacatgagataaaattgctcttaaaaatttagacaataaaattttaacatcttcaaagagtatttcaacacattgaaaaacactttcccattattaatagctgtcgccactggcggacccaattaaagaccagtgtgggcttaagcccatgctgaaaa

SEQ ID NO: 336435 - DNA, 565 bp, Cannabis indica
ttttctcccattccaagaactcaatttgatgctagtggatgagaatggtactgttgaggaagatagtcgttattagtttagttttattctactttttaatcttctaatgaaactgattttgtatttaagctgaaatgtatggtctggatgacttaaagtatctatgtactagttcgaaatgaggaataattggtgctaggtattattttagtattttattgacttattaaatctatctataaggtgattacataactgttgggatattattgttattttatattgatgagtggtcctgattttgttactaatattttcttattaatataggagttaatcattacttttaaattagtattttgtgatataaattaaaggatcatttataagatttatcttcctacaagggtcaaagtgtgacctttgactatctaagttatggatattacatatgtgccacgacctagggctagagtcgtgatagaaaaatggtatcaaagcaccaggtttaattacctcggagtgtgtcaccaaatattttagatttattttaaataataatagt

SEQ ID NO: 336436 - DNA, 653 bp, Cannabis indica
acactatgattgagtacttactagctatgtgtgggaatgtactatatcactataagagatgaaaatttgaagagaaagagagagagaaggattcgaaatagagagaacagagaaggctcaaatttcactgaaagcttaagttgcagcaactgtaagttttgagtctttcactatctatttataggaatccttctaggtttaggttttaaattatttgacattaaaaaattgataaataaatggtaaaaagaccttaagtggccggccattaggatgtgggccccccatttataatttttctatttttctcaattatttatccttttctttcataaatggcatattttccaattcaaccacttaaatatcaaaactatttatttaataattaaaattaattatcaaataaaatttctattcaatatatatatattcattaaacttaataaagtctcttaatttacaaatagatcctaaaatctcttttcttcacaattaagtcttagctcagtgaaaattcattaacaaatagaccctaagatctcttttcttcacaattaaaccctagcttaataaaaaattaatcattaagacatagtctaattttagaattataattgattaattaaaatcaattaattgagtcatacaag

SEQ ID NO: 336437 - DNA, 1911 bp, Cannabis indica
ttttgttctcttagaatttgctcgattttaaataatccaatctttccaagttcttccgaaccttctctagatacttggccatttttaggcccttagcctggtatttcccgagtacctaatttacaattagtgacgatcactatgacatatgagattcttgaccttcaacacttcttctatcctcaaaccagcgatcaaggcttcatactcagcctcattgtttgatgcataaaattgaaatctcaaagcataatgaaacttaaagccttctggcaaaattagtatcacccctgcactcgagccttgctcattggatgcatcatccacgactaacttccaagtgtccgcgtctcgttgaacaagcagatttttttttctggagttattccttctattaagaaatctgccaaagtttggcccttgatggatgttcgagggtgataagttatgtcaaactgccccagtttaattgacgattttatcaatcttataaaaacttgtctcaacggttgagcagtcaacacttttattgggtgtgcctggaagtaaggccgtaacttgcgagatccgtagattaggcataaggcaagtttttcaagagggggatacctcgattctgccccagtaaccttttactgacatagtaaacaggttgctcgtgctttccctcttctcgcactattgctgcactaatcgtttgcctcgcaatacattgaaaaatggcaaacacttatcagttgacttcgaaatgaatctgttaagtgcaaccatccttcctgttagggcttggacttccttaggcttggttggtgatggcatatctatcaaagccttgattttcttaggatttgtttcaatgcccctcgcgttaacaatgaatcccaaaaacttttctgaggaaactctaaggaacacttttcgggttaagcttcatattgtacttccttaatatttcgaagcactctgaaaggtccgtggtatgacttctactttttactgattttactaacatatcatcgacgtaaacctccatgttccgtctgatctgattcgcgaatatttcattcaccaatcattgatatgttgccctagcattcttcaacccaaatggcatgaccttgtaacagtaaagtcccatgttggttacgaatctcgtatattcctgatcttggatatgaatttttcctgatcttggatatgaatttttatctggttatatccagaatatgcatccatgaatgacataagctcgtgcccagcagttgcatccaccaactgatcaatcctgggtagtggaaaataatcctttgggcacgcttatttagatcagagaagtcaatacaagttctccaagttccattgggttttgggacaagaacaagattggctatccacgagggataaaacacctcacgtataaagtcgttgaccaacaacttatccacttcctgtttgagtgccccttgtctctcggaatccaagggtctcctcttttgtctctttgctgggtagtttggatcgacatttaaatgatggcagataatttatcaatctctatcatatctccatggctccaggcaaaatgatcctggtccgcccttaaaaaacttattagttgctattttaattgttcgtccaggttcttcccaatgtaaacacactttgtgggattttctcggtccagaaccacttcttccaattcttcaattggtttcaataagtttctttcatcttgaatctgaggatcaagatcttcatctttcttctcgccttcttctgtcaagactgccattagctggtgattggcttttctgtgatgtagctctatgcgatagcattcacgagtgttgtcgagtgaatttcgcaacaccaaaatgtattatctaattgatataaaagagaattttcagg

SEQ ID NO: 336438 - DNA, 1198 bp, Cannabis indica
ttgggtttgaatattttaatttaaatactgaccaagtgggagaatattagaatattttctaattatggaataaaataaagaattgattttgagataaataaatttttcatatttattaaatctagacaaaattaattaggttatattctatatatgttcagatttcgatattcattaaccgatttaatttcccaattaattgtcaaaatattttgataattattgtggcgcagatactaatagagtattttacctataaatataggatctcagtccccgagctcttcactcattctgttcaaaactacaaaattttatctagagagagttgagagagcgaggaagttcgaattcccataccgaagctatctcaaggattgaagctcaaacatcaatagttggatgtattttaattctttcattgcatatatacaattgatatgtttacaatttatttcgcattacatatcgttcatatatatatatatatattttattttcatattatattataatctaacatcatatatcttacaaaaaaaattgatagtgtatcaacaaaatataatcaaataaatttacatacatttaacacaaataataataaaaaaaatacaaaatcaaaagaaaacactgttagataaattaacaattaacccaagatctatttgtatataacatagaacacaataataagatataataattaggtatgtgtacctgattgatccatagcaattatctctgtttgatccacagcagttactccaatttgatagtgcaatactatcaactaagtcttcctccctagatctctaaatcagaagcagtttattttatctgattatcaaaaggtatacaattgtgatgagacaatatgtatttatagagttagggaggggacttagctacaaaccctagttgggctgggcctgctcatcaaaggcttcagtcaactagaaaagcccacacttctgcttcacctagactttacacacagatgctaagcccataacaattgatcaccaacaacatgggctaacacagcaaagaactatccaatcaacccaagttttaataaaaccaataaaatttaatgtaagcccaaataaaagtctaacattctcccacttgggctacattgattttaatacatatatattatatatcaaaataattttgtttgaaaacgactcat

SEQ ID NO: 336439 - DNA, 750 bp, Cannabis indica
cgggtgggaagcggctgagcttcgctctaacctgacctgccctcaccacctggaacagatcgtggtggtggcaggcatcaagcctaccatctccgagaccttccaccggccgcctcgggatgaggagacgcccaaccataactacgggggctttggagcctggagcaagacacacctaatggtcggggccatgcttcctctctaagactatttcattaatttctttgtatttgtcggctttgtgccatatcaacttattcctcaagcttaccgcctactttcaggcttattcattttttatgctgctcggagctggggctcgcccaatccggcaaaaattttatatttttatgaacttgtttccatccctaaaaaggtagataaacttaaggacgacttttacggtctctgggcccaccctttgaatgagggtccggtccctcacaaccagcagaagcacgtgaaggagtatcgtcaccgcttcttcttctcctccggtttccaggccgtggatcatctcgagcttctcacggagtgggttaggatccccccttacatgcggaccgaacccactcaactatttcttcaacgggccaagaccttcgccacgtatgacaagaaagcccttgatgtcggggagttggtcacgacggaacactgttggaaggccaagctgatcctggggcatcagtcggtggatgactacaatctttccaaagtcatctgtccgaatgtgagggctccggccgc

SEQ ID NO: 336440 - DNA, 474 bp, Cannabis indica
ttcaaaaaccttatggtgatcgaacctcaattggatacaagatgttgtataagcaaagagataacttgggggaagaagagtccactacactagtgatcaacctggacaaaaaggctgacaagcaatcatcacttccctcgacacctgaatcctcagaccccactagaaaactaccatcaatcaacccagacctaccaaggtgaagttagaaggaagaagaatttccacggagaatatatctcagatggagagattcatcccagtgtgtcacttctgtaacaagaggggtcatattcggacccagatgctataagctgcagaactacttgaaaactatgatcaatcaacctaagagttttcaaaaaaccaataaaactcgaaaggaaggatctcaaagtgagtggagattgaggggtgatcgtgaatcgaatgttgggtggtggctcgagtttcgctgtctgcatttctggaagg

SEQ ID NO: 336441 - DNA, 503 bp, Cannabis indica
cagctcttcccgtggctacccaattacggaagcggaagattcttgtgccgcaattttgtttgaggtgtggtgaggagtcgaaaatgccagaacatgctttgtttttctgttcaagtttagtgcagatgtgaatttgggtgggtcagcggttgagtttacgtaagtgcctcggtggtccgatgccggatgtattattgaggttgttagagctcttgtctcgtgaggattttgagcgtgcgttgaagctgttttggtgggtcaggtataataggaattaagtgctatttggcgggtcgctttcgcgtgttggctgttacgaaaattatgaataatacgcaagtgcacgtaatcaagtagtaaactcacacgagtgaggtcgaaccacagggaattaaactgaataccactaaataagacttatgattctatttggtagataaataactttgacagattttaaaataaagaaaaacaagaaaattaaagaaagcaataaaggtgtt

SEQ ID NO: 336442 - DNA, 886 bp, Cannabis indica
attataaatagtggcaaataaaaaaaaaaaggaaaaaaactcatacaagagaggccttgagaaaaacaattagaaatctgaagaagattgactcgtggactatgtaaaattttaattgcaaaaccacgtaaaaaaccttgtgttcatatttttatttctacagcttttattttttctatgtgaaattgtcacgattaggctcatattcggttaacaaaaatctgcgttaatagtttggtgctttcattgagagcctctatgaaaaagctcagaaaaaccctcccttcttttgaagaaaaaccacctccttcatggctgaaaatctagaaaatgttaacaccccacatgaggaaactaatcattattctgggaaagagcccatgggctccaagaggtctaccaacccgcagtctagacggatcacccgttccaggaggactcaacctgagggtggccccagtacacggaccacatgttcccagagaacccaacctggcgttggtcctagtacgcgaacaacacgctcgaggagaactcagcgtgggagtggtcagaaccctagcgcaagggatgaagagctcaatcgtagaggtgcccagtttatgggagaaagtacttatgaaacggaaaaccgccgcctgagacgccgtttggaagaggcgcagcgtcgaaatgctgagttagagcgtgatgcagactcggctagggtggcacaagggatgattgctcaaaatcaacctgaacctggagtaaggagaccacgaggcagacatcgtggctcacgaactaggagacaggaaaatgtcagggaagaacaacctagggaaaatgagataccccctgaaaatcagaacgaatagagcgttctatatcgtggaacatatag

SEQ ID NO: 336443 - DNA, 2158 bp, Cannabis indica
tatttactcaatgaaccctcaaagtccataacacaggctcgcaataagtcttccagtatctgtattgttctttctgattgtccatcagtctacgggtgaaaaactgtactgaactccagattcgtacccatagctctctaaagacttacctagaatttcgatgtaaactttggatccctgtcagaaacaaaggattttggagctctatggagacgaactatctccttcacatacaactcttcatattgatccaccgtataagttgtttttactagtagaaaatgtgatgacttcgtgaaacgatccactatggcacgtactgagtcatacattctcgtggttctaagcaaaccaattacgaagtccattgtaatatcttcccatttccactcaagaagtgttactggttgaagtaggcctgccgacctctggtgttctgctttgtttttctggcatgttaaacatttagacacatattcgactacatctcttttcattccacaccaccaataatagggtttcaaatcctgatacattttggtggttgccaggtgcaacaaataaggtttagtatgagcttcatcaagtatctcctttttgagctcatcgctatttggaatacaaactcaatctttgtaaagtagcattccattattcgagatcgagaagtccataggccgactgaacaatacctcatctaaaattttaactagctcagcatcttctaattgtgtctttctaatcttgtccaacaaatttaactgaagtgtcaggctatgtaacttcccaaccataaactcaattctagccttaaccatttctgaggctaatgaggagctatcattatagtattaaagacctgcccgggaccttttgtgctcaaagcatctgccactacattggatttcttgggaagatattaaacctcatagtcataatccttgactagttccaaccaccgcctctacctcatattcaaacccttttgagtgaagaaatacttgaggctcttatggtctgtgtagatctctcattttccccatacagataatgtcaccatatctttagagcaaacacaacaataacaagctctaaatcatgtgtttggtaatgttgttcatattccttcagttgataggaagcagaggctataaccctgtcggctttacttagagaacatcccagaccctatctggatgcatcacagtaaaggacaaacttttcttggtctaatggcaaagctaacaccggtgttgtgatcagccgctgcttcaattcctgaaaactcatttcacacttgtcggaccatacaaactgtaagttcttcttagtcaactctgttagtggcattaaaatcttagagaaaccttcaacagaataacgacaataccctaccaactcaagaaaacttcgtacttcagtaactgttcttggcctcagccaatttttaactgattcgatcattctcagatcaaccataattccatattttccaataatatgccctaggaaggacactttcgacgaccagaattcacactttttaaactttacataaagcttgtgatccctgagtcattgtaaaaccattcagagatgttgctcatgctcttcttctatttgagagtgcacaaggatgtcgtcgataaacactataacatagttatcgaggaaatccttgaacaatccataaaggccgctggagaatttgtcaatcctaatgacatcaattagaactcctaatgaccatacttggtctgaaatgtagtctttaggagttgtatttttagctccgtaagttctcctggggccatcctatatggtgcctttgaaacaggtacgccccaggtgccaaatcaattataaaatctatttctcattgtggcagcaatctcgataactccttgggaaaaacatcaagaaattccctcacaactctgacatccttaggactaaatggttcaggcttgctggacttaattacaactactaaaaatcctacacatccactgtgtaatcaatctttagcctttaaaactgaaataatcgggattcaagaaccttgaacagatttaacataaacaaatggatcttcaccctccggctgaaaagttactattttctgtttgtagttaatgctggtcgaatacttggatag

SEQ ID NO: 336444 - DNA, 532 bp, Cannabis indica
tcaccctccggctgaaaagttactattttctgtttgtagttaatgctggtcgaatacttggatagaacatccatcccaagtataatatcaaactctattagttccaactctactaggtcaacactcaactccatattgtcaaccctaactggcgtagacctaatccaccttctagagaaaactaactctccgcaaggcagtagggttccaaaccctcttttaatgaaatcataaggcctaccgaattgattaattacttttgatgccacatatgaatgtgtagccccagagtcaaatagtatagtaaaataggagtttttgacaagaagctgacctgtcaccagagatggtctggctacaacatcagcttgagtgatggaaaacacccgagcaggtacgagctttgctacttgcttctgttcttctttcttcgtctgagggcaatctttcttaaaatgcccaaccataccacactaaaagaatgatttccaattgcactcaccgagatagtgtttcttacaacgtgggcact

SEQ ID NO: 336445 - DNA, 842 bp, Cannabis indica
cccgttaaaggatttcatcctcaaaatctaacatgaatagctccagatattgagcccttatgctggactctaattcctaggtggcttcttccaccttattgtttttcaaaagtaccttgaccaaaactatggtcttgttttggagaaccttttctttcctatcaaggatttgaaatagttgttcctcataagataagtttgattgtagctctagggcttcgtaactcaagatatgagtcgagtctaaaacatatttcctcaacatcgaaatatgaaatacattatgaacagtcgataatgttgttggtagggctagttaatacgctacttgcccaaccttctcgagtatctcaaatggccctataaacctagggcttaacttgctcctctttccaaagcacatgatacctttcattggcaaaactctcaggaaaacatgttctcctacctgaaatgcaatatctctgcccttcagatcagcataacttttctgcctgctttacgaagtaagcatccgagccttgatctgtcttttgcttcattggtcctttgaactaacttaggacacaaatacttcatttcccccattttgtcccaataaattagagaacgacacttcctaccgtacaacatttcatagagagccattcctatcgtactttggtagctattgttgtaggaaaattctatcaaaggtgtttatcgagtttcttggcaactaaatattttttgagcttaagaaagtaataatggagtaaattgtgaaataacaaataagagatttttacgtggttcaggcgttaattatccttagtccatgagtctattttattaagctcatt

SEQ ID NO: 336446 - DNA, 565 bp, Cannabis indica
ggatgcatgacagagtctgccgggactccagcggttggcgggcctcctacccctcctgcatcaggttttagcaagggaagtagtggttcgaccacaaatacattaaaaaaaggaatccactgaaactggtggctcaggtcagattaagaggttccgagggaaccagggtcgaggcaatcgccagggttgttctgagacccaatacacttacccagagtgccccaattgtaagaagcatcatctgggggagtgtagagggcaggggtgctttcagtgtggcatgccacgacattataagagaaattatcctcaactaagaaccaaagcaccgaagactgtagtgaaacccactccagcaagggtgttcgccataactcaggctgatgcagaagccagtccttcagtagtaacaggttagctctcggttaacaactcttatttctctctattgtttgactctgggggccactcattcctatgtggcagcaagaatttttagtaaatttgatagaccgcacgatagttatgaatcatggtttggaaccctattacctggcggagagtt

SEQ ID NO: 336447 - DNA, 556 bp, Cannabis indica
atgaaacttataaaaaaacacagtaaaaaagtaataaataccgcctggcagtatttttgtaagaaaatagcaaaagttagtataccatgtaaatttccctaatttttttgtgattaaatttaacttttagcacaacaaaaagttatttgacaacaaaaattacttgacaacaaaaaattaattgtgactaaaatatagtatttatatacaagttgttactaatttaattttgatcacaataaatattgtaattaaaatcacaattagtcacaacaagttataattgttgtgactaatacctttacataaagacatttttctcacaatataaaaatgatgatttataattagttataatttttttatttttaattacaaattttattgtaatagaaacttttgtagtaaatccttataatatgctctattgttgctcaaaaggtggagacttaccatctcaaaacttccaatcattataataactttcttaaattacccaaacattactaatgtaaagcccgcttagttaatttggaaattagcagttatttatgtt

SEQ ID NO: 336448 - DNA, 871 bp, Cannabis indica
ataatatattatttttttaaaaatagtaattaacataaagagaattctttcatcaattaaattttaacaaaaaatataaattttatttacataaaatctgaatatttgaatactaattatcataaaatctgaatgttaattacaatcaaaaacatatacatttactttaatctatagagaaaataaaatcagaatacaaaatcttacaaattagtataaacatacttggaacaaaaaaacctaaaacaataaaaacaaatcagatctattttaattctcaaaaaaaaaaaatcagatctagcttataatggaaccgcgccgtcagccactgcaaactgccaccgtcagttaggaaccccgaaggagaagaggactttctgaacgtccgacgtactgaagaccgctggtggagaccggacttacgaagggtgcttgtccgcttgtggagattgaagaccgaagaagagaaagacggatcaagaggggggagttttagctgccgacgacaagagaggccatggttgccgtcggggtacacgcagagagacagagggagaaggagaaaaagggacaaaaaaatagtggctgctaggaagagaaagagaaaggtgagtggatttttgggtttcttcaaccaaagaggccatggttgttggctgtacacgcagagatagatagagggatgaggagaaggagaaataatgaagatagagataatgtggctgctagggttttctaaagctactagggttacaaaatagaaaaggacttaaatatatcccattaaataaaagaaattaaaaattataaaaaaattaaattaatatataatgttggaaataggggcagtttttttttaatatattcggcc

SEQ ID NO: 336449 - DNA, 687 bp, Cannabis indica
aagaaattcccttttcagacctattgatctgtataccaacgattacatccgcttcactaagatctttcatgccaaaattttcacataatagagatttcacatcgacgacatgaatattatccaaaaattagcaagtcatccatatataaacatataatgttacccacattattttcagatttatagtaaatgcatttgtcacttatatttactataaaactatgtgaaatgacaagattatcaaatttctcatgccattgcttaggtgtctgtttcaaaccatacaaagatttatctaatttacacactttatgttcttgaccaggaacaagaaaaccttcaggttggtccatgtaaatctcttcttctaattcgccattaaagaaagtaattttaacatccatttggtgcacaacaagattatgaatagaagcaagagcaaaaagcacatgaatagatgtaattctagtaatagatgaaaatatatcaatgaaatttacattttctctttgtctaaatcctttgccaacaagacgtgccttgtactttttaacagtaccattgggtctcaatttcttttttggaatccactaacaatctattatcttagaacctggtggtaacacaactaaatgccaagttccgtttaactcaagagagtcgatttcatcattaatagcttcattc

SEQ ID NO: 336450 - DNA, 655 bp, Cannabis indica
aggtagaggtcccgagggtagggctcgtggtcggagtgatgttaacccgccacaggctgcccaagccactcaggaagcccagaaattggaaaataggttttcaaaaatgccagccagaattgaagaacaagataatgagatccagtggttaagacagtagggtgctcctgcagtgcctgttcctgaagttccagtggcacctggccctgttgtctaggccaaaccagtagtagcggtaaatagaatggaacctctgtatgagagattcctcaagcaggcacctcttgtttttctgggaggtccggacgtcatgaaagccgagcagtggctaacgatgattacgaagatattgaatttcatgggcattaccgagaatgacaaccgagaatgacagagtggtgtgtgccacatttcagtttcaagaggacggtctagtctagtgggacatggtgtctatgatacaggatgtcaaaactatgacctgggaaaatttccaggaacttttcaatgcaaagtattacaatgaggccatcagaagtgccaagatgaaagagtttacccacctgacccagaaagaaaatatgagtgtgacggaatatacaacgcagtttgatcggttggtgaggttggcctcgggtattgtgccaaccgattt

SEQ ID NO: 336451 - DNA, 972 bp, Cannabis indica
gtgatactctgcgactgaaaggaaaaaagggttagagatcagagtagaaggagtcatttaattctgctgcaaccaatgtaaggtttttcataccttttatatgtttattttcatcgttttagaaattcatattaagatgttaaaaacatacttgttagtaaatctagatcctggtaaaacatattccaacaactagcctcagagtcatggtaattgatttactttcaagtaatatggatttaaaacaatgtatgtgtgatttggatgtgattcatgttgatccatgtgtttattgatgattgattgatgtttacaaatttttacgtaaaataattggattttcgttctaatcatttttattggatagtatggaaaaaattaagctattcacttatttacagaactcaatttcgattttatttgaattagtcatgaattttttgaaaaatagaaaaatcaggaggtggtgtcaacccacgtgcgcgcgcggacacgagtgatcacaccgtgtgctcacgcattaggataggggttgtccgaagtttctcggttgttcccctatctgaacacctccctacgcgcgcggaaaggctgcatgcagccttagtgtgcggcaaacctcggctgatcaccccctgggacgcgcggatggtatgcaatcataccaaatgcaattttttccaatttttttatttttttcatgctttttcatggaattagtttcgatttttttgtgtagttttgtattttgaattttatttttcaaatttaaaatctaattatcataattaaattaattaatttttttaattaatttaagatattagtagttttttgaaccttgaaaatagataaaaatctatctttttgcttagttgattatcttattttttagatttattattttatccttattttttaaattttaaaggttctatatatttttattatttttattgttatttgtattaa

SEQ ID NO: 336452 - DNA, 1773 bp, Cannabis indica
caaaaattagaaccaaaatctttcgcaactctagctcttttacttcttctaggttcagtttctataccctcttcatgctcattatccctaatagcagacatgttactagatgatgcaccccaactatttctcaatttaaatagaaatctatgttcgtaaaaattggcatcattagattctaaaatagtatgtgcatttaaatcatataatctatatgcatgctttactatgaacagtatatccaataaaaacacattcatatgctctacaagccaagttaattcttttaggattaggaattctaacatacgccaaacaatcccaagttttaaaatatgagatattgggttgtttatttttcaaactttcatatggagaaattttacttttagatttaggaactctattaagcacacaacacatagttaataaaatttctccccactaatgagtagcagcacccggattcaataaaatagaaacaacagattcagtaaaagttctattttttcttttagcttttccattcagttcaggtgaataaggtgttgtcttgtcgtgtatgattccatgtgagttataacattcaacaaaagcagtggaattatattcagtgcctctttcactacgaaacttcttgatctttctactaggttgattttaatttcagccacaaatatcttaataatatcaagggcttcacttttatttttcattaaatacacataggtaaagtcagaacagtcatcaataaaagtgacaaagtagcgtttaccatttctagtcaaagttctatcaagttcacaaatatcagaatggattaaatctagaggctcggtttccttttctatcacaaatttatgtggtgttttcataatcttggcttggctacaaaattttcatttttcaaaatcatctaaagataatttagaaattacgcctaaactactcatgttcttgattatgcgtttatttacgtgacaaagtctagcatgccaagtattaaaagaacacaacatataagtagaagcattaacttcattgacttgaacattcaatttaaacattccctcagttgcataccctgttcctacaaacatcccatttatggttaaagtaaacaaatcaactcctatagtccgtgtgaaccccaccttgtttagaaggtagctcgagactaaattcttccttatctctggagtgtgtatcacatcttttagaatcacagttcttccagaggtgaagttcaattctacatttccagtaccagcaactatagtggtgtgggagtcacccaacaatactttctgatcctcagtagcagcaacatatgttttaaacatatttttatcataggagacatggcgagaagcgccagtatctacccaccacccatcagattcaccaatgaggttgatttttgaaatcatagatgtaaatggtagctcttctgtcaggttagcctgcggagcagaactaggcttgctcttacattttcgtgccatatgacttggattgttacagtggtaacacatgaacaaaccagagtcatttctattagggggtacttactgcttattatttttgttcctttgatggttccaattctgattgttattattagtctgaggttgactgttgcggtttgaattcgctctgtgattctgattcttcatgtttttccaattaggtttcagaacagtagtggatcttttgttagtgttgttgttgtttccaacaacaagcgcctcttccttttggtcttattttcga

SEQ ID NO: 336453 - DNA, 1243 bp, Cannabis indica
ttcacttaagagcaaatgttcttgtgtttcgtacttgatatggtcatctgacctggtacttctattggtagtattttcttaaatgttccacattccaataccgtggtaccagaacgagttacattttttcatcatacctacccaatttgtatgccccagattctaaaacttcgactacctgatatggtcattcccagttaggtctgagcacacctactgtactgtctttcgtgtttaaaaatactcttcttaggaccatatctcccacaaagaatttccgagccttcacttgtttgttgaaataccgagctactttttgctgatgggccatcagctttaagtttgttgtggttcgcttctcttcaatttcatcaagtgattcagcgaggagtacatggtaggcttcttggctatatgttagccttctgtgggatggtggttcgagttctacgggtagcatagctacatatccatatgccatggcaaatggagtctgtccggttgccattttctcagttgttcggtacaaccatagaactttaggaagttcctctggccagtttcctttagcatcctcaagtattttctttagtgtatccttcaatgtcttgttgactacttcaacttgaccatttgcctggggatgggccactgcggagaaacttttaatgataacatggttcgtacaaaaattagtaaaggactggctgtcaaacggtttgccattgtacgaaactattttgtatggcaatccgaaccggtagattatgttatttacaatgaaatcttgaacttttttggacgtaatggttgctagcggctcgacttttgtccacttggtgaagtaatcaaccgcaactactgcatactgcacgccacctttgcccttgggtagttgtctgatcaggtcaattgcccaaatggctaaaggccaaggactttgcatctgagttaactcgttgggtggtgctggaggtatctttgaaaatctctggcatttatcacattttttaacataggccttggaatcttcgatcattgtcggccagaaataaccttgccttagaattttcttagataaactctgcccgacagcgtggttttcacaaaatcaatcatgtacttccgacagaagttctgcagcttcttcttgactaacacatctgagcaatggcatggagaatcctcgtctgtacataattccctctactatgatgtaccgtgctgttggaaattattttac

SEQ ID NO: 336454 - DNA, 575 bp, Cannabis indica
tgaaccctcaaagttcatgacacaggctcgcagtaaatcttccagtatctgaattgttctttctgattgcccatcagtctcagggtgaaaagttttgctaaacttcagcttggtacccatagccctctgaagagtcacccaaaattttgatgtaaactttggatccctgtctggaacaatagatttaggagctccatggaggcgaactatctcctttacatatagtgcagcgtaatgatcaactgaataggtaatttttactagcagaaaatgagccgactttgtgaatctgtcccctatgacccataccgaatcatacattcctattgttctaggcaaagcaaccacgaaatccattgcaatgtcctcccacttccattcaggaagagctagtggttgcaataaccctgccgacctttgatgttcagctttgatttgttggcaggttaagcacttggacacataatctactacatctcttttcatcacataccaccagaagtagggttttagatcttgatgcattttggtggttcccagatgcagtgaataaggtgtggtgtgagcttcatcaa

SEQ ID NO: 336455 - DNA, 845 bp, Cannabis indica
tccttccactcagatttctaacctttgttcctttctgtcacaaagtattatcaaaatctaagtccgattctccttcaagtgttggattcttcacagtcttccacactatgattgagtaatagacttcttatgagtggacatgtactcttacactataggctcgagaattatgaagaacaagagaggggaattcgaaaatagtaaagggaggaggctctcaaaacaaaactctagttgtctaacagaatgtacactagattaaatgcatggatgaaaatgagagcatcctattccttttataatatttcacctaggtttaggatttaaattatatggaataaaaaagataaaataatagcaaaataaaccacatattgtccgactatagaggatgggtcccactagttataattttgccattttattcgaccatttatcttttctttcacttatgccatattttcaaattttaaccttataaatgtcaaaattatttatttaataattataattaattatcaaataaaatcaccgtttaacttatttattaggggtgttcattagatcatatctaatgtttttaggcctatccagatctgatccaatcatatattggatgttagattttaccatccaatccgatccaatcaatttaattcatctaatcgatccaacatccattggatgttggattggatcggttctatccattggatgtatttcatatgtatttattggtttaatttgggtttatccaatattttagacatagtatttttttggatcgaatcagatccatccaatattttaggtccagtatgcactggattggattggatccatcc

SEQ ID NO: 336456 - DNA, 1368 bp, Cannabis indica
tacgatgaggcctaaacacgtttgccaattgcgatttcggtgtcggagaacatgtttaaagcttcaaggcattgagtctccaaggggcagtaatgtgtttgattgtgtgggtttcatttatattcatctggtttttagcagcaagcttaactgttcatattctgcaaaataatttttaattggttttagagatataaaaatggtgtgttttagttttggtaatcatatgtgataaattggttataaaatggttcattaatatttttttgattgaactatctgctacaagtgctacaggtacaagaaagaacgaaaaaatggaggagatttcccatatcaaaatcaatgaattgtttagtctttaattctttttgttattagcacgattggttactattgtttttaattctttttattttaatttagtcttttttttgttttaatttaaatgcatttttttctttaatttatgatatatatgacagctgacgtgccaatatttaagtaagttggcaatttttttaataaattgttgattgggattttttttaaatgatgtggttcagttataaggtgacatgtggtatattatgtggctgtaaacagtgaggtacctacggaaattctaaaatgttaacagaaggtatttttgccgccaaaaaattaacttaggtatttaagtgcaactaaaagttaaacttaggtatttatgccgaaaattactctttattttataatctcaaacttttatttatttgttttttgtcattttatggctctataaataggagctcattttagtagtgaagggtgtaatttttagagtagaaaaactatagccgaatttctctcaacttttcttctcatcttttctctttggaaattttatgagaatgattaacataatggcctaatcttcattggaaggttagggatgattctatatgcaaagtgagattattttatatctttgattcactttttgttggaatatttatttgagtaatgcaagttcatatttcacttttatttttattttcttctttcatctatactactatctatgctattatataccaaatatatataaacttagtcatgctctttctgtatatttttatttagtgattatagtaatggtagcattgttcatttctatcttttatgttcattttatttattttttgttaaatgatatataggtttatactcatgctcttcctatgtgtctaaaaattaataaaagtaatattaatgttcatttcatttactatcactatcactatcaccaccatctctatctctttgtattatttttactaaaaatatataggattagtcatgctctttttatgtgttactatttag

SEQ ID NO: 336457 - DNA, 672 bp, Cannabis indica
caattcgtggtctggcttactatccacgtatgaaagttgtgcaccaaaatcctgtcaggccaaaggctagccggccatgcaccttcaagatgcaagatggccggccatggcttgtccagaagctagatggcctatattggccatgggatagtcggccaaccccctagaagtggttggttcgtcactttgtcgtcccgcttgagtactcggactcctaattggttgaagtgctgagtagatgacttagccttcttgttggtgagttgtattgccacgtggcaatgatattggccacgtagacatgtcacgtcaagtgggcggaataacaatcatcatgaaaaaatttgtcagtgttttctttgtcattgatcaacaatcaattgtactttaataatattatgtggagaaacaactgttagaattttgtaaactaactttataacaaccaaatgaatatattaataaaactaacaatgtcataatttttttaaagagctttgtgtgggattgtcaatatgaaacacctgcaaatatcataaaaaattattgtatcgttatcaatttgtaattattgatatgtcaagtttcagagcattagtaaaatattaatgcagctgcaattcaactacacagaaacttaaaaaaccagaacaatatttctatgtacgtggc

SEQ ID NO: 336458 - DNA, 1088 bp, Cannabis indica
tggtctgtagggtcagtcatcaatctaggaagcagccagagtgacatacttgtgtataaaagccattattctgtgggtgtaggacccaataaagacttgaagcgggaacgttccacatttcggcatattcctcatcgagaatggggcaggaaccggcggaaaattctctaatgtaaaaataaagtttatacaaaaaatctaaatgaataaaaatattaaactaaataaaaatttaaatttacacgttatttattattcaataatattaattatcatccaaaacatctttaaaaatttataaaaaaattatattaatatactaaaagaatataaacataaattataaaatataaatattattaaaaaaataattaaaatattaaacggttcttgtcaaggcggggagtatcatccccgtcccttcctatttaatattcgaggacaaaaaatgatcctcgtcccccctcgtttttttttttttttgaaagaatacctcaagttcataaactaagaaagaaagatgggaacaacatgagggagtccctccccttaaataatactagcctcgttccccatttagatggggaattgccacccattaggggcggtcccgtggcccttatctccatggaaaaaatgtatatccctaattagtgccaaaaagataaaatgtattattattattatttaaatatgtttttttttaacaaatcatgtaattttattaataacaatcaattaaaataatagcctgcaacccaatcgagaaatctcccgaattgaaaacacgaccaggattagaatcagaaaaacgagccacccaattggctatctgattcccatatcgcgcttggcaaaagaaactaatataaaattagatgaaaatgaatgcagcatcacagttaactttaagaacacatatattcaatttcttctactgcttagaagacacaacagtataaaatgttgcagtaggttcattcaacccattaacttgagcactcaattactgtgcaatgtatataattggatcattaacaactccttcaatcgcagagaacttgttattcccaaccactaacaatgat

SEQ ID NO: 336459 - DNA, 531 bp, Cannabis indica
acatataaaagtttgagaaaccttacaggggtgcagaggaattaaatgacaccttacactcagatctctaacccttgtatcctttctgtagcagagtatcaccaagatctgagcccaaaactccttccttgtgtttggattcttcatagacttacatactatgattgaggaccaacttgatgtgtatgggaacttactcaatcactaatgactgaatttattttgtgaagaaaggctaagtattttcgataattcaagaggaagaagaagaaggaagaggtctcatcagaaagctaggtttttagctttggaggccttagtttggatgaagagacgatagccttccttttatattatgttcaatagggttagggttgaattattaggaataaaaaaaatgataaaaataggttaaagttaaacttgatggccggccacttaatgagccccactcaagtttgggttttgtcatttttcccaaatattttacctatttttcataaatactattttttgcactttcaaccctat

SEQ ID NO: 336460 - DNA, 503 bp, Cannabis indica
tgctaattaggttgaaagtaattcaaggctatttttcattttggccaattttttaaattaataatgaacggtaatggtctatccataatttgattgatggatgccgaccgtagacatacgtatggtcgtgattaatccttagaagtaaggaatcaaatccttattttacatcaaacacctccctttcccctttttttacagcccatgttattgcccttgagtttgctttttcttcaattgtataagcctttttttttcaacaatttcccctgcttataagttacattagtatctttataactgtccactaatcctaattagtaattaaatgcatatcaaccttctcaattgctcattgaaaaattgtgccttcaaattgaaaatgctgaacaatctcttgagtttgtttgtggggttccaatggtagttttaatttagtataaaaaaatgtttgttgtgtatatgctgttttcattgttgttgttctaaattgattttttttt

SEQ ID NO: 336461 - DNA, 928 bp, Cannabis indica
aagatcatacagggaggctatgaactcaactgacagtaggaaatggggaacaacaatggacaatgaaatggactcactaaggaagaatataacctggattcagtgagaaaataaaaagataagagaatcattagcaacaagtggatttataaacttaacgacacaattctagggtgtgagttagctagatttaaggctagactagtggcaagggactttacacagaaagaaggtatagattatatagagatatagcagtaaaacaaacctcaattcaaatgttgctagctttgacaggtatggatgacttagaattggatcaaatggatgtgaaagcaacatttttgtatgtggaattagatgaagaaatccacatgaagcagcctcaaggataagaggtaaagggaaaggaagactatgtgtgcttgctcaagagatcactttatggtcttaagcaggcccctaggcgatggtacaaaagatttgatgagtaaatcaccaattagaattcaagaagagtgtctatgactgttgtgtttatgttaaaagtgccaatgtcaaatttgtggtatatctactactttatgtagattatatgctaatttcaagaaaaagaaatcaagaaatcaagaaggtaaaacaactattaagctttgagtttaaaatgaaagaccttggtgaagctaagaaaatacttaagattgaaatactaagagacaggaaaaataagagcctaatactatctcaaagtgcgtacatcacaaaagtgctgcaaaggtttggttttccagatgtaaaaccagttagtgcacctttagcacaacatttaaaactatccaagactcaatcactgatgcgtgtcgtaagccacaacaaatttactattttttttttaattttaatacttccaattattttagtataatcg

SEQ ID NO: 336462 - DNA, 364 bp, Cannabis indica
aaaaaggagaactgcgtgaaataaggattgagaaaaaaaaacattatattaaattgattaaggtacgtatacgtgagtctgacgccgggccatgccattgtcggggagtataggtaggaccctcctatatcatatattcatatattcatatgtatatattgataaggaacaccatctgagctagcctcaagtggccaaagtgggtttgtgttagagatcttgagttcgagtctcaggtaaaatataacatgattgtaatatatgttatattattttataatataataaagtttagattaaaatgtgaataatatattaagtgtatggtaaataaatgtgtaatctatgattttatatcctgcac

SEQ ID NO: 336463 - DNA, 589 bp, Cannabis indica
aatagggcaaggttgggacctgcgatgatgatgtcgtcgacataaactaacagtgcaatgaatgtaggtcctgtccctttagtgaatagggtgtagtcagcttgagattgttgaaatccttctatgataagggcatctgaaagcttggtgtaccactgcctcgaagattgcttcaagccgtagattgatttatgcaacttgcaaactaaagttgatgcatcaccatctgtgtttggggaagttaagcctggtggaataaccatgtatacttcttcatttaaatcgccgtttaggaacgcgttgtttatgtcaatttgtagggtgtgccatttttgaattgcagatatggcaaggatgagtttgaatgtaaccatcttggctacgggtgagaaagtatcaaagaagtcgagaccttcttgttgagaaaaaccttgtgcaactaatcttgctttgcatctttcaacactcccatcactattgtattttatcttgtatacccatttgcatcctatagctctcttgtttggtggaagcttgacataagtccatgtcttatttctcaatagagcatatatctcggtttgcattg

SEQ ID NO: 336464 - DNA, 504 bp, Cannabis indica
ttcgatgcatccaagtacctcaaatgctttaaatttctaatcaaatcaatatgctctccaacaaaagaaagaactcttagtcctccattccttaacacaacttcttgcacatctatttcaacaaatgaagaaggaaatgaccttaatggtaataaaatcaggctgcgcaaattcttcactttagtaaagtcaatttcttttgcatccaagtaataatcgtaagatagatggtgagtcttgctacttaacttgtacaagtcttttatgcagccatcatatgataaaaaactctgaccagatacatacacagcaagatcatgaataagatcgtgcatagaaaaaaaatcatttcttgtgtttctttgaaaaaatgatctcgatattaaagcattcaagtagtcttctccaacatcttcaattcttcttccttcttgaggctgtaaaagaccttccgccatccatatgaaaattagtttttttctatcaacatcacgaaattcgtaa

SEQ ID NO: 336465 - DNA, 1012 bp, Cannabis indica
ggtctttcgcgatcctctttcgggtcttaattttttcacaaagtcaaatcacgagagcattgtctgcgattgccttagacttagacatttttcttactttggtccttgtcagcttctcattctaaccttttatgcaactcgttgggccaaactctacgcgaagctagtggagatgtataaaaagggattcagatgtgtcttttcgatttggaaaattttggtcgaatgtgcttcttatctacgggttcactcttgatcttagcttttgaaggaagaactcaagcgtatttctctcgggaagactttggttgagtacgttccctgctcttattgcatgttgggctgaatgattttggcaaatggaagtaagatgttgaagctgtcagcagtcggattatcataccccccaaatgagctgggaattttgggactcaaattcttggtcattttcttggagtttaacttgggtctttcttcaatttccaaagaagagtgttgggcatagccctacctcgtaccatcctttcggggggttcctcggaagtgcacagccacccttaggcttctgtaaatagaaaaaatttactcctaggcaagatctagattgtatatcccaacgatccttttcaccgtgcaaaccccgtaagggagactttaggccatttgcaatgtgggaggccgttgatttcttaggggtaaagctaggcctgcatccatgcacaaataatttccttgcgtagcggtttgctcaagcagaagccatgttgaatcccatggcagcaatcttttggctttcaatgagaaaggctaaaagtgcgcaaggagtgcaaacataaaacttgcttgcaaatgccgaagggtatcacactattgggttcacgttgttgggttttatgccctaaataaaactcatttcaatataatcagttttacttattaatatagatcagaaataacatctaatgttgcatggttcacatgatttattccatgattatatgtacataatgta

SEQ ID NO: 336466 - DNA, 1379 bp, Cannabis indica
ggcggtgtgggattgtacagcttacccggtatttccccttacggatcacgggactactgactgtcacattatccctccaaataaaaaggtctccaatatcatttttgaaacgttatttctggaaagttgttcactcgtgaatgcccatctcggaaggagtcttatggaatgatagtcgagtccataagagagttctcggatgactacatgtccactccgggtccagtcttcaagaaagctagcctcactccgagatagagttcttgttggctagttgtccctcctagaatggtagttctggatagtcgactccaacagacttcatcctatccagaagcatcatcagtgagtgtccttggtccataagttcggaagctcgtatatgttcccaggggctctaatactttagctgacatggagacttcactcaaagaggagttggttaagttagttatttctagctaacttaacatctcctttcttgcagtcagtgattttagtatcttgatcctaagcctataaataccaccttgtcttgttatttcgatagatgagattcagaacttagtttagatgagttgagagtttgagagagaaaataatgagaggttgagagagaggtgctgagaaaagagagacattgggttttgggttttgaatggagaatcttctgtagatgaagaagattattaggtaagagtgtgagagttaaaacactttgagagagctcaacagagaatctgtctcgactgtaatgtacctgttgttgctcaatcaataaaagagatttggtggtgttctaaaattggagtagagccatagatcacatcaaactatcggacttgaaccagtatatatcttggcgttgatttcttattttttacatttattttgtctagttttatctactctgtttacctctattttatccgattattgtccttgatttgttaatcgactctttgttaattatttgattgtttaagttttattgatttaattctgcacagttagttgtaattttcccacaaatcagagcatggtaatcgatcaagaacgcgaaatcaagattctttttgctgcaattcttgaagaatttttttgaatgtcattaatggcgagattcaaactggagaagtttgatggaactagggactttgtgctatggagagaaagtctgaaaggaatcatagtgcaccagaaagtctccaaggtccttggagatgagaagttattggcagaaaagaaaccagaggaaaaaatagaaatggatgagatggcgtactacatgatcatcatgtatctatgaaacaatgttcgaagaaaactcattgcagagaagacaacgaaaagagtttggaataaattggaagaattat

SEQ ID NO: 336467 - DNA, 753 bp, Cannabis indica
tgtgtccattttccaagcgacgagcccatgtgttaatggaacaaattggacaacctttgtaatcttttgtgcttaagcctgataaattacggtaagctggaaaattactgacagtccacaataacattgctattaaagaattcttttttaaaactatcataagcctcaacaccattctcatacaattctattaaatcgtcaatcaatggttccaaatatacatcaatattatgtcagggttgttgcgggcttgatatcattaaagaaagtatattaaatttcctcgtcatcactaaccagggaggaagattgtacataacaaggaaaaccgaccatgaactatgacgactacttagagatctttgtggatttactccatccgcagacagaccgagacgaatatgtcttggttcagatttgaattcaagattcatgtagtttacttttttccaagcttgagaatctgcaagatgtcaagttttccatctttaactctcttggtctcatgccaaatcaaattttcaaaatgttctacactacgatataattgtttcagtcgcggaatcaaaggcatgtaccacatcactttttgggggataagtttcttattctcctactcttgtttactttaaggggagataaaccacacatcgggcaataatccatgtctgcatattccttacgataaaaagtgcaatcgttcggacatgcatgaattttttcatacttcaatcctatggaatttaaagtttt

SEQ ID NO: 336468 - DNA, 544 bp, Cannabis indica
ctttaattttttttaaaaaaatgaatagcatcaatgccacaatatagtgtccatgcaaatttttagaatgacattattttctcttcaatggtatagatcttaatattttgccacataatatgtccacctcactaagcatcctttaaagttttaccattagaaatgctcttaaaagtacatgggcctgatttgctacatatcaaagttcgggggattctaattaacctaaaaataatatacaaataataaaaagtcaacaataaaataataaaaatataaaaaaaatatagggaaattctataatgcacccccttaaaagggatgtactgatgcactcttgacttgtttcggcatctagaagaatttttttgtaaagaccgcttagtttaatttggaaattagcagttaatcatgtttaattatgagaattatttatagctatttaaataattatttatactgtttttattgaattctgaaatgcattttatgtcattcagtagttttcataagtttgcattttcggtgcccggtaacatggaac

SEQ ID NO: 336469 - DNA, 897 bp, Cannabis indica
tattagctgctatttgagctgctcgtccaggttcttcccgatgtatacacaccttgtgggatttcccgagtcgagaataacctcttctaattcctcaattggtttcataggtttctctcatcaaactcgggggtcaagatcttcgtatgctgcacctcaatgcgatagcaatcgcgagctacatctggtcgccacgtaccactcccacgccttcttgtgtttggaatttcaaggataggtgcttgatcgaactgactgcccctagtccgatcattgctggacgacccaacaatatgttacaagccgatggcaggtcgacaactaagaagtcttgcataacaatggcagacaagggtacctcgcctaaggttaatgtgagctcaattatgccaagactggcaatgttgtctctggtgaattcgcaaagattcaccatacaaggtcttaatttggccctttcgagtctattaacactctcttgatccttttattggcgagttgaatggtaatcaccaatagatcgacgtgaggatacctcacgtttttctcgtcttcctccgtgaataaaatgggaggttcctaagttttcaccttcttggaaggttctgaggcaaatgctgactgctcgttcattatctctttcacatatcttttttgggcgttattgttttcccctgcgatatgcggccctcccgaattaaccaggatgtcctctccttcaacaggaagaggttgcaacccttggttgtttaggttattgggcagactgggctggttggatccctggctctgtcttttcacgtactgtttaaaatggtctcgagcgatgagactttctatctcatctttcaaatggtggctgtaacaccctaactagcataggcgtattacgtgatt

SEQ ID NO: 336470 - DNA, 518 bp, Cannabis indica
catgatagcctaataatttagcttgaaaattttctaattttttgtcaaaggttcccttgtttgtgaatgaaactttcttaaaacaatgactactgtaaatgacttgactaataagagagggatttcttaaaacaatgacttgactaataagctaaaaacatgatgatcaatactaaaagtatttttataagatattaactactataaatgcacatgacacacacatatatatttttcttgagagtgattattattactattgttaaacttcttcttcataaacattgtctttgtggttgagatgataatgttgatgatgatttcttctccatagccatgacatttaatgttttcctaccattgtttttgaagatgaaaatagaaaaaatagaaaaagatttttaaaagattgaaagggagagagaggagtgtgaggagatcaagtagagaaggaattatatttatagagaaagtattgcatgagtgtgagatgttatgtgaaaaaaaaaaaaaaacta

SEQ ID NO: 336471 - DNA, 555 bp, Cannabis indica
gcacgttggcttggtgttggcatcttgccatacatgctaccttggtcacgagtgaaaacgtgagcgtcggtgttgggatttgtcttatcatagtgagaacctatggacggtgcgagtatcttggctagagagcctcgatgcatggatgcactcatggatgcttgcgagcatgactcgacgggagttgttcgagagtcagaagtgtgcacgaggcacacggtcgcgtgaaaaatcacatttggggtgttgctgcccaggagggctgcacgtgcagccctaacaggctgcatatgcccatggacacgcgcggacaggaggaaatgcagcctcatctgccgagaaaactcggcgggttgcagggttcccaggcgcggctttgtgtctgaacaagcagcgagaccgagcttcagacacgggttgtgtctgaaatccgcgtgcgtaggcttgccttgtccgaagcctggttcgtgcgattgaagcatgagcacccgaatcttcaaaaacccctaactttttcaattttatcggaatcgagttccgtaaaaactaaaattg

SEQ ID NO: 336472 - DNA, 739 bp, Cannabis indica
tagggtgttaattaacatacttgtaagtagatctaagatcctggtaaaataatttccaacaccatcccctccggcaagtcctacagaagccggaggcgtctggaagactcctcaagtgggctatggagttaagctagtttgacatacactacataccgcacacttctataaaaggacaagcgctagccaacttcataaccgagtgcaatgaagcaaaagctagcgcaaacgtaccagcgccataaaccccagcatggaaagtgtttgtggacagagcgttcaacgaaaacggatccggagttggggtaccaaatctctgaacagactctaactccaggcagccttgcgcttcgaattcacagcttccaataatgaggctgagtacgaagccctgattgcaggtttaagattagaaaaagtcatgggggccacgagagtagaagtctttagtgattcagagttggtggtaaaccaagtgtcgggagaatatcaaacgcgtggagaaaaactagccgcctatgtagcaattgtccgagagctactccatgagttcacggattataaagtggaaagaatcccgagagaaaagaatacccacgaagattgtttggctaagttagcgtgagacagcaagattgagaaactggggtggtgcccgttgaacgcctcacggagccgagcattaaagccaaaaatattgtggcagcagttgagctagagcccaactggatgatcccca

SEQ ID NO: 336473 - DNA, 1695 bp, Cannabis indica
atagacctaatccaccttttggagatgactaattatccgccaggaagtagggctccaaaccctatatcaaaactatcatgcagtctacccaatttactaaaaattctggctgctacataagaatgagtggccccatagtcaaataacacagtgagtaagagttgttgaccgagagcggacctgttacaactaaggggctagcttctgcatctgcctgagttaacgcgaacacccttgtcggagcgggtttcgcagaaatcttctgctcttctttcttaagctgtgggcaatcccatttgtagtgtcatagtaacccacacaggaagtacccttgccctctacactcacccaaatgatgcttcttacaactggggcattctgggtaggtgaatcatgttttggagctacccttgcgattgccttgtccctggctcccttagaacctcttgttctgacttgagccaccggatccagcaggtgcctttgttttctggtcagtggtcgagccactacctttcctactaaagcctgaggtaggaggagtaggagccccaccaacgacctgagtccctcgagactcttgggtgcactctactgtgccctcagctcgcagtgcctttcccaccatatcagcataggtggtgttgtcatcagtagtgatcattagttcatgtcttatcttcaaattcaacccatccaggtacttctcttttttcctaaaattagttggcacgattcctgaagccaacattgccaagtgatcaaactgagttgtgtattcagtaacactcatattttctttctgagtcagttgagtaaattctttccttttcgcacttctgactacctcattataatattttgcattgaacaattcctggaacttatcccaagtcatcgtagtaacatcatgggtcagggatatcatgtcccaccataccagagcgtcttcttgaaactggaatgtggcacaagccactctgtcattgccggtgacgcccataaaatttagaattctagtaataatcgtaagccactttttcagctttcataacatcaggacctcccaaaaagattggaggtgcctacttacggaacctttcatacagtggttccattcggttcactacagcgactggtcctgctttcacagcaggagcacgagccacctgcatttctagagtagggattgcaggggcaccctgctgtcttaagcgtctgatctcttcatcttgctcagtaattctggcttgcatttctacaaacctatttttccaatcttgggcaacctaggcagccctgtggcaggttaacatcacctcagccgcgtgctctgcctctagggcctctaccttgaccacgaacatttggcgtaattcgaactccctgaccaccactagatccgaccgaattaccctaactcttagtgtttcgcctggcgtccatactattagaatagcctgcgtaaccaagaactagtctagtcagatagtgatcaagtaaaacttacgaattgtcgcttaatttcgaaatttaaaacatgtgcctattcaactattaggctactaacatgcttcataacaggcttttcttaaatcatacttttaaaataagctactaaagcaataaaagcttactaaaccgtgaaacgagctgtcgctgatgatgattgtacatgtcgtgacgatcttcaga

SEQ ID NO: 336474 - DNA, 1670 bp, Cannabis indica
aacaactgctaatttccaaattaactaagcgggctttacatacgataggcttctccccaagctcatcatccaaagtcttatgttgttggcgttgctttcgattcaaactcatggcatgccaagcttgaagggaattacaacaacaactttcaagttgtcttgcatgatacttattatgggcatcaactgcttgttgatgtggaccttatgtataagttccatttcatttctctttaatatcacattggggataatgtgtcaactaagtttgggggttaacttaaatttttatttttagtcttttgtttttaaagtcttttgtttttaaagtttttactctttaagtttttagtttttagttgttttttttttattattattattttgagtcaatttgcttaatgtgagtaaatttgaaagtaggtagatagtaaggtttgaaaatttcatttatttatttattttttgaaaaatccatatgcttgatggtattacattcttgactaactttaattttgtgatttaaaagagcatggaatcgtattaggtcattttttaacaattgaattggtttatgtatgctaattgtgaaatgttgaaagttgtttggaaaaaaattagaacttgattgcttgctatttgaggcgaaataataaattatgcatgactaggaaagtggtttagacattctttggattgattgtgcctttcaagccatccctataattttatcacagttaccttttttgtgccttaacttgcttttttttatttctacacatattgagcctaaataagataaatccatgaatatcaaaaatttgaccctaattttaccataagtggatctttagtttggggtaatcttaatgggaggtttaatatatgtgtgtgaaaataagagtgaaattgagagaatgtgaaaaaaatattggcaacaacttgaaaaagaaaaaaaaaaatctgacaataagtgtcaaatttgaagagaaaaaatcaaaaaaaaaggaaaaaaaaaaaataaaaataaaattgttgcaatactgttaaaaaaaaaatctctcatgtaattacaatgaaaggggataacgagattattttatgggatgaattgattagagaaacttatggtataggtgagcctaaatgtccatttcatctacccgtagctaagcctaacattacaagtctagaaagaccttttgattcttagttgtacattgatttatattagtggatgatagtaagtatagcaagcatatgagatatttttgggatagtagattgatagttgtaattggcatgcataaattgtttcaactgtaagttaagtgctaattatgatttcatgaattaaacaagattgaggtgaatcgagggtgtgattgatttaaaattctagattattatatgtgaaatttttgttcataaccatgttatttatcttacttaaaaattgctcatgtttcgattgattgacttgtttcatttatgttgtcttgtttttagttgttagtcttactcgagggcgagtaaggatgtagtttgaggaaatttgttaggatatttttagtctattatttatgttttttttagagttaattttcttcttattgtcactttttggataaattatgcttgtttcttaatttcaagttcaacacttgaat

SEQ ID NO: 336475 - DNA, 681 bp, Cannabis indica
gaaatctaacctgaacaactccagatattgagccctcatatcaaactcgaactcccaggtagcttcctccaccttgctatttctccagagtaccttaaccaaagctattttcttattccgaatgactttgtcctttctatcaaggatttgtaccggatgctcttcatatgttaaatttggctggagttctagggtttcataaatgaggacatgtgtcgggtccgaaacgtatttccttaacataaaaacatgtaatacattatgaattgctgatagtgctggaggcaaagctaaactggaagctactagtgcaacctttacgagaatctcataaggccctgtaaatctagggcataacttgcccttcttctcaaaacgcttcatccccttcatcgtagatacttgtagggatacatgatctcctacttaaaactctacatttctgcatttcaaatctgcatagctcttctacctactctgaaaggcaagcattctggccttgatcttctctattgcctcattggtctgttgtactgattccaaacccaagtatttcctttttccagtttcatcccaatgaactcgagatctacactttctgccatacaacatctcataaggagccatccctatagttctctaatagctattgttgtatgaaaactctatcagtggtaaata

SEQ ID NO: 336476 - DNA, 709 bp, Cannabis indica
ttgtttttccttatcaggaattcaatttcccgcttcaagttattgcattcattaatgtcgtggtcgtagtctctgtggaatcgacaaaactttgtcatgtccctcttgctagcatctttcttcatgggcccgggcttcttatatggggtcaccgactgagttgccatgtaaacactttctatatcttcagtcagaatagtgaatgcagtgtacttggcatgattctcccggggagcttgttcgaatttgccggcgaactttccctttttcccattcccttgcttgtggttgttgttggaatgtttaccacttgaacttgaattattcgggtaatgggaaagtttggaagatgttccagtagaaggagcctttgacttgccaggcttttgctcaccgttcgctcgttgaatggcttcttcgagcctgatgaagcctttggcacagtcaagaaaatcactcattgagtctacgggcccgttcttccttatatccttccaaagttcatcaaggacttcaatgcccccagtatcacagacaactttccatcttcagttatccgtgaaactttggtcgcctccgtcatgaatctgctgatatatgctcggagaggcttgcctgatcgttgcttaacttcgaccaagtctcccagatgcaatggaagttggcgtgaggaggagaattgtgcatggaattccgaagagaaggtttt

SEQ ID NO: 336477 - DNA, 767 bp, Cannabis indica
ttcatatttaggatgttaattcaacatactttttagtaaatctagatcctggtaaaatatttcgaacaactggccttaaagccatggtaatgatttactttcatgaaatatggatttaaaatgatgaatattatttgtgtgttgatttggatgtgttcatgttggtttatgtgttaattgatgaatgtatacgaattttttccatgaaaataatttattttcgttttgaaaatattttatttggattccttgtgaaaaattaagcaattttttttacgaaactcggttccgatgaaaaatgattaagttatggtgttttgaaaatcggggtccattgagtgtcaagggtcgagcatcgcacgcacacgcactcggacaagaagaggctgttcgcgcggatgcttcagacaaatcttatctgaactcggtcagcttggcatcttggacaagggacacgcgcgcacatcaccctgcaagcaaggtcttccgcgcgtggatctgcccattgaacccctcgtgcactcccgtaaagggctgctggcagcctgtctgggctgcacgtgcagcctgctgctgggcagccactcaaaaatctaatttttgttgattatttttcaacaaatttttgattttttgcaattttcaaaccctaatttcaaaataaaatattatttttaatatatttaaacttaaatatcaattttaaattaataatatttaatttttaatagattattattaattctttgatattttgaggtttaaat

SEQ ID NO: 336478 - DNA, 1716 bp, Cannabis indica
ttttgaggtatgaactaagtttgagcttttaaagctcaaagcttgagctttaatgtcacttttaatttaagggcatggttttgatttctgttacgttgaaactattatatggatgatatatatgtgtcatatgaagtttggaatgatttggttaggtttggagctagtttggagaatttaaagttgagaaaaatcgtgttattggctgttcagaaccggaattccagatgtaccaaccggaattccgtttggttagttttcggaaaagttgaatttcgtattttggccataatttttcactctagtatccgttttggacgttctatataccgttttgaagctagcgacgaggtctatgatacggtgtatattttaaagccaaaatataagtttcattatagtgaatttttacctcgaggtttggtaagaaacactaggtgttcctttacagatatgaaacagtattttcggataaacacttattggtttatcatcgttatgacatagggccgggatgattgatcgttctccaagcaggtcggccaacatacccaaaccagaatttgaggtaagaaaagttatttgcactgctaagcattgtttatggttaatgatatgattgttatggtctagattatgatcgagatcccgatatatatttgttgtgactcgatcttgattgagattaataatatgtatttgtagtgactcgatagcaattaaggtaatgatgagaaacgattattgtcgtttgtgaattatttatgaatgagggaagaacacggttatcaccgttgttgtgaatgaattaagatagggtcattaccgttacgagtaattattcttgaaaccgcggacaggtttcttacttatcgtttgctttatctggcaacgatagttacatacgcagctcgtggataacgagtggtgaggattggtaacggtcattacagttatgaataattattcttgaaaccgctgataggtttcttacttaacgtttgctttaccgggcaacgataatgacatacacagctcgtggataacgagtggtgaggattggtaacggtcatcaccgttatgaataattattcttgaaaccgcaaatagatttcttacttatcgtttgctttactgggcaacgatagtgacataagtagctcgtggttaaggagtggtaagggtgctatataaagtaccaggattgtgtgattacgaagttggaaaatgacttaagcatgttattatgtgatgagttgtaatcggatacatctttgttataatgtgaatggatggattttatattgcttaagaaattagtttcttttcttgcagagtcttagtgactaagaattcgtgttcatagagatgtaagattagagtgctttatgaagcactgagattatatggttatggtaatgtgtgaattagagtattttatgaagcactgaaggtgagtatttataatgatgtacgtttagggtgatgtatgaaacacagagattgttaattatgaatagctataaatattcttgattatgtaataagtgtgctctcatagacgttaagttatttatgcaccttgaatgtgtatgacctattggtatgtatattaaattgtaatgaaactttctagcactttttatgattttatttagtagcttttcttactgagccatcgtggctcactggtgctaaataaaactcatttcaata

SEQ ID NO: 336479 - DNA, 754 bp, Cannabis indica
taaattctgttttcgaacttccaccactcttggggcgtctcggggttatcttccttcttttagtctttccatccccaatacaagaattattaatagtattttcatattcaaccggcacttcaaaaagttggaaaggtgctggattacaagccttttgaattgaagacactaaacggggattgaaagtatctggggatttgaagatggatggtgttttctctttgagctcttcacgccaatcaccatttctcttaacatttaacactctttctctctcaataagatgagtatcacaattaatttggccttcctcccaacccaaggacttacccatagatgatgtatcatgattcacaatcagttccatgtcctcaacacaagaaacagggacattggaagccacagccttattagcattagacaatatatctgaattcttcaaattcacagaaccagttcccaagtttactcttgcaggaggtgaattaaaattattctgacagaaagaatttccagagtaatgattcaaataggagcctatcttccccttccaaaaaatgtcaagtatatccttcttctcatcaagctttagccatgttccatacccctatctgagagaattcgattcctcctccattcgtcgaatgggttcaagcaaaccttcaattcatgaccaatacaaccacagttaaagcacatatatggtaagcgatcatacctgaaaggaatgttggaatttattttaccaggatct

SEQ ID NO: 336480 - DNA, 730 bp, Cannabis indica
attgattgatttaaataaaaagaggtaatattatatcaatcgagtacaaacataatagtcaagcttcacccacaagcgatcgagctcaactcaagacagttgagctttatactaacattacaagaatttggagactacatcttgaccatgaatggtcgagctctactccgtatagtcgagctctaccctaatattttaagacttttgagactacattggtcgagctctactaaaagtaataaaggtttatactaacattttaattataatctcgaccatttatgttcgagcttttctaacaccaatcaagctatataatttatcaaatagactttggaaatcttaaacatattttgtgaagttctacccatttacctcattatttgattgaattgttattgtgcatgtgggaggagttggttcgttcaaaataaacttcgttgaattagttgttttagatctataatacttggtattttacttcatgccattgaattgccaaaatatagtatgttaaagttgaacttgggtgattgagcaattgcataacttgaaaatgctaatcataagtaaatatgcataagagctaattggtgcaaaaaatgagaaaaatattactcttgcctaaaaaaaatacaatactctttaattttaactgttaattcataaattatgtgatattaatatagtagtgtatttatttaaatttagataacaaaacaaataaaat

SEQ ID NO: 336481 - DNA, 598 bp, Cannabis indica
cctcctttgtacaaagaaagctccaggggggatcccaacaagagatgcgagtaccataacgacattgggcacaacaccaatgaatgcaaaaatctctaagacgagattgaaaacttaatccgattgggacacctctacgagtggatcaagaatcggttgcctcacctcaaccctggtcaggcgactggaactttgttgcaagtagcaccaacgggtgcagcgggagtattgggtctagttgctccctctggagatgctcaccatattcccggcctaccacccagacctaacgggagagtggctatgatctcgggaggaccccacataggaggaaccacccgcaagaagttgaaccagtatgcgggggccatgaaacacgatgagatttgggaagttgctcaactcccagctcaaaggccccggctgatggatcaacccatcacattcacggaagaagaagctaggatggtgcgttttcctcaccatgactcgttgatcatagagacccccattgccaataaggtggtggccagagtcctgatcgacaacgggagttctgtgaatttgtgttcaaaaggcctttactgcaataggcctg

SEQ ID NO: 336482 - DNA, 399 bp, Cannabis indica
aggctttttgaagaccccgttcttttcttcaatggcctagatatggtcccaagggactgccaactctgtatagtttacaaagcgtggaccacctttcattttcggggaggattccttctttggaggggacttggctaatttcgaacttcgctgtctctgtggactgcgtcttctcgggctccttcctttagaactcttccctctaggactgcgagatcgtgaccgcagcactagtgacttacgtttatctttgtccttctctaacccagccacagaattctcaatcctcttatgcggctcttccaaggcaaagaactcgaccaacgattcaggtcttcgagcttgcagttccttccagaaatcagttcttggtaggacacctattatcaacatacatac

SEQ ID NO: 336483 - DNA, 510 bp, Cannabis indica
acaactcttagccaaaaggctctcattttctctgttgttgaatctattgttctctctggctgtgactatttacttttgttgtatctcttattttgctctgtatattattgcttgttgtatttgagaaaaacacctacttttatatactgttctgtgatctgatctagggcagagccctagtgatatttgtaactgtttttataactgcttcaattgtaactgtctttgtaactgtcttttatgttctttagtcttgatatttgttgtatctgatgtaagggtatatttgtcaaaccctatgattggtgttattcaacttaagggtaactaagtgaatctgtaacaacatcaatatattatctttagatttacattaaaatatatatgtatctactatctattacttaaataaataagttagtatatatatatttaaactttctgtgtatgtgtctatatgaataagaattatttttttgtgttttttattacaaaataaataaaatgcac

SEQ ID NO: 336484 - DNA, 574 bp, Cannabis indica
caatgatcaggaaagaatgagatgcaacaatttagattacgagtgagttgactaacagaaagcaaattaaaagacaaattaggtaaatgtaagacagatgacaaagtgagcagaggtgtaggaataacagtgccagatccaagaacagaagatggtgatccatcagctaaggtaacaatagacgtgggactctgagactgaaaagttgaaaagagactggaattacctgtcatatgatctgtggcaccagaatcaatgacccattttgaggatttggaaagaaggcatgcattagagttacctgaatcggcaatcgcagtgacagaagaagatgaagacttaagtgtttcctgataccttgagaacttggcgaattcatcagcagaaataaggaccgatttgtcagatgcatcactagtgcttgcaatattagcaaagtgttgttgtcgattcttaaactgtaacttcctacactcaaacttggtgtggcctggtttcttacaataattgcacatgatgctcccagaatttggtgtgcgattatcaggtccttgtgaattacctcctttaaatc

SEQ ID NO: 336485 - DNA, 683 bp, Cannabis indica
agcattttatccattgttaacagctgagcatttacaacttgccacaagatgaatcgatgcttcgggacattaatcgaactccaaacactcttcctataaatgaaaggaacctggggtagtttactattatataataggtgcggtttaaacttacccgaggcccctgcattttgtatctccaagctgtcaaatttgtctctcacatggcaaagcttctgccaataccaacttgagtcaagctttagaacataggtccatattgaagtgttctttagatatatgttattgatccatttcacccaaagagaatcactttttttttttgaaatggcctaaatatatttagcaagaacaacttgattccatttggcaccatctttgaaccccaacgcatcatagttcttcagaagacaaactttttcccaactagccacatgaagtttactcctatttccactccaaccccaaagaaaacctcgacagattttttcaatctccttcgttatactttgaaggagaataaagatgctcatccagtagttacagagatcaagtaatacagaatgaataagttgcgtttcttcctgcaaaggagagatgtctactagcccaactatggagtctttgcttgattttctttaggatcacatcacagtctttcgctctccattttgttggtctca

SEQ ID NO: 336486 - DNA, 733 bp, Cannabis indica
cttgtatgttcttggtcagggggtgcatgcttatctgattataccctgagtacgcatccatgaaagttagaatttcatggccggctgttgcgtctaccaattgatcgattctcggtaaaggaaaacaatcttttgggcatgccttgtttaagtctgtaaagtcaatgcacaccctccaggtgccatttggctttggaactagtacagggttcgatacccaaactgggtagtaggcctctttgatgaaattgttgttccatagtttttccacctcttccttcaatgccttggccctttctttgtcgagtagccttcttttttgttgaactggcttgaagttttcgacgtcgatgtttaaagcatgacttatcacggtggggcttattccctccatgtcttcgtgtgaccaagcgaagacatcttggttttcccttaagaactggatcaaagcggatcttatgtcctcaggaaggtttttcccgatcttgattaatttggatggttgtttggggtctaatggcatttcttctaattcttcaatcggaccaacccctgtatcaatatccccaaaacggggatcaatgtcttcgaccccgttttgggcgagtcttcattgttgagaactacttgccgtagctttgagggatttggctgctttctccctggttgcgatggataggttgtaacactctcgtgctactatttgattgcccttcaagcagccaattccacc

SEQ ID NO: 336487 - DNA, 579 bp, Cannabis indica
ttacttaataaataccaattaaaaaaaacataattgttcatgctaaattctggtcaaacaaatccacacaccaccgctctctaaatttcttcatattgtcatcgttcacattattaaacgtagcctctagcatactatgctcgatgtgctctatcacatacatctcgcagtcaccgctgtatgagacaataaaaagtaaataaataaaaatatgcaaattaaattcaagttaaataatataaaattaattgtaattaagttaccttgattccgtctgtcgaacaatgctccggtcgatgacttttgaagtaaaacttctaacctgctctctgaggcggtcagttgaggcaagaggatcatgtcatgactctcgaataggctagcctgcagcatcaaagtgggtagtatcttttcccactttaccaagtgactcttcaattcattcggggaaatcgatccgaggctcgagtcaaatatgttcaacaaccaatgatccagatctacctctagtgtcacccaatgccttgcactatcgaagaagagggccatatatatttctccttattcttccaactgtcc

SEQ ID NO: 336488 - DNA, 510 bp, Cannabis indica
taactcatgcacacaacataacttatatagcacaaaaaattttaaattaagatgtgtaacaccttttacactcttaatgttggtgataatagtggacgttactcatagtaacaagtaactcccccaaatattacaaaaagataataaataatatacattgtcatatgttacatattattaatttattacacatatttaatttatatattatattattatgaataatataaataatataacaatcccccactagattaaatattatctctttagtaataaacttgtaacttttgtaatatttatttaatcaatcaaaaatattatatcaaaatataacattcccccattttgattgactaaatacacacttttaaagaagtcttgcttaggtgcattaggtaaaatgtctttcgacttaaattttaccttagtgtaattaccgcaaagtttgataaaattttgattgctgtagcattgaaccactattcctttagtacaaaccggtgataa

SEQ ID NO: 336489 - DNA, 590 bp, Cannabis indica
gctaaatcacttcccggggacttaaacttgaaattaaaagtttccctatcgattaaaagcatggcaataccctaaataacacaaaatgggaagaactagggttcccaaatttgtcccaaccggtagaccggttcctcaaccagaattccggttctggaaaaattcttggaagccaaccggtcgatcggttcctacaggcctccttgaaccggaattccggttcagtgcaggaatttttcaaaattccatttctccaccaattcaaccccaaacttcatgcaacctttcagacctactaattagaccccaatgaacatattccaagtgataaaacaaagcttcaatcacagaaacgagttttgccattaaagagcaaagcttgtgttcaaaactccaaagcttgcttaaacaaccaacagccactaaatcaagcataaatttacataaaaactcataactaagcctctgaatacaaccacaaacaactacagcaactatagcaagctaaacaacatttcactcataaaacccaaagtttgagttcaaaactcaaccttggctaaatctaactaatcaactaacaaaatctg

SEQ ID NO: 336490 - DNA, 1161 bp, Cannabis indica
tatgttatatcgtattaggtgtattgctatttaaagctagcactacctacaaaaaatagaaaagaaagtagatcaatattttgaacatattttaatttcaccgaaaaacttagagcatgtttgatattgttttctgttttcaaaaaattgtttttaaaaatgagaacaaaaaatagtttttgaagtttttaaaacacaagtcatgattggtttttaaaacagaagataacattttgttgttttcaaaattcttatttttcgtaactttgttttctgaaaactgtttttaaaaaatatggccaaacaagccaaattgtttttaaaaataattttctgttattaaaaataaaaaataatttttaagttatgatgacaaacatgcacttagtgtttttaacaaataaacaaccttatattcgaaagaaaaggagagaaaaaaaagaagaagacaatattacttttaacggtacttaatgatgatcaatgtgtattagtttagaatttgatttttcagcttatatttgttgcatcattgtatttggtcaagccatatagtttattacattaaaaggttattaaaaagtcaattcataaataattgaagggttagtaaattgactatcatacaacaatgataatttagcaatttctcaagaaaaaaaaaatgataatctattataattgataaatgagtaatgagtaatactaaagatattcagagatatgatgatgagttgtaaattaataagatattcttggattttctaatttttatttgtgtttatgttcataatatttttaatttaatccaataatttgcactaatcttctaaaagattgttctggtagattatttatttgttatagtatcgaaaaaattattttagtctaatttattttcatgattatatatgttgtaattatttagaatcatttgtaaattttaaaaaaatttcaaatgatttacaatatcaaaaatttattataaaaaactacttactacgtgtataaagaaaaataatcgcacatgcaataaaatgtataagtatcataaattattcgaattttttttaaaaaaaattataagtaattttaaataaccacaaaaaaaaaaattataagtaattttaaataaccatcataaaaaaaattgactaaaat

SEQ ID NO: 336491 - DNA, 673 bp, Cannabis indica
acggtaacggagaaggagatattagagtattgtagggagaagttggctcattttatggtacctaaagttgtggtttttagagataagttgcctaaaacatcgactgggaagattcaaaagtttacgttgaaagagattgttaaaagtatgggatattcttcttcttcttcttcttcctcttcatatggggttggtcggagtaggatgtaatgtgctttgttttgatttggcagtatgtttggtcgtattcgatcgtctatactagctagccagctgggtaacaaattaatatatgtactgactgtttgttttgtcatgtgtaattaaatttgctgaatgatcatatatactctagctatttttcttagtaaataatagtattgtttggatatttaatttgaagaaaaaaaatatatagagaaaagtattcccaccagatatttattagagatattgtgacaaaaccttttaaagtgtcggtaaaaatgagaaacaaaatatagttacacaattacaatacatatatcttcacatactttgtataaactaattaatatattttgaatataattaaaaggttagtttagagttttaccttaaattttgatatatattgaatcatactttttgaacttttgagatcgttaaaaatttctcttgaactattgagatt

SEQ ID NO: 336492 - DNA, 552 bp, Cannabis indica
cccttatttaaaaagaaatgtggtgtttttaaaattagtaaaaactatgtgtatatttaaaaaagagacatcttttgggcccctaggctaagtgggccctaagcgtgagcttagcccgcctatgcccaatgctaagcatgtctcgagcttcaacccaccccagtcaggcttgccttgcgagttgcgacgcggccccatatcacaagctcttattactaaaaaactaggattttctgaatgtttttaatagtcgggtatagtattcttgtcgttctctaagaccgacgctaattcgaccgtcgtaaaactggataaaataagcatcagtggaaaaatatcgaaaaatatttttctcgacactagaaaaccgtcgacaatactatttattgtggggtagaattttaattgtaatattttgtcatagtaaacaatcataccatattatataagttcagttatgcttttcttgtacaggttaagctattaattattttggtgtatttattgtggggtaattttttttaaaaatactgtgtaaattttatattgtgt

SEQ ID NO: 336493 - DNA, 543 bp, Cannabis indica
gtaccgtctgtaatggatataatttttttttcatttattttctaacggtctataatggatgtaacacttttttcgtttatttttttaagcataatgaaattaacttaacttacagctaagattataattgtttgcacagtcgtcacgaatctaaatcaaaaagaatctaaatcaaaatgtaaaaattatttaggtaaagttaatcacttaacttgtcgttcttaaataaagttagtttctggaaatatgtattctatagttataaatttaactttttcttttcgatgagtttaatgttattaagtactttaggtacgatgcataatggatatagtattattttcgtttatttttttacccataataaaattatctcaacttacagttataattacaattgtttgcacatgtggtcgaaattctaaataatgggcatttgtttttgttaggcataaaaaaaaaaagaaatttacaaaagtactggaatttgggttaacttttacaaaaatactatcacacgaaaaagttttcaaaaaatactat

SEQ ID NO: 336494 - DNA, 510 bp, Cannabis indica
catagtgagtaagacggtggtaaccaaactcgaaggagagaaagggatccaagttcagatcttgataatgctctgtgacaaaaaggtatcaagggatagagatcttgaacgcaaggagtcattatattctgctacaaccaatgtaaggttttctcaaactcttatgtgtttattttcattgttttagagatattcatatttaggatgttaaccaacatacttgttagtaaatctagatcctggtaaagtattcccaacataatgttcatgcatccattgcaaaatcaacaaaattaagtgaaatagctggaaaagaaagcttacccctacaagatgatgttgaagaagaaggtgggaagctcagatcgtcgaaacaacacaaaaatcctgggaagatgatgcttgtgggttcagccttctagagagaaggaggagctttttctaatgcaaatttctagtgagaaaagtgaagagtaaaaatgagaagttaaaaaaggtttccctacaaaa

SEQ ID NO: 336495 - DNA, 480 bp, Cannabis indica
tcacttctgaatacttatagaagctatagattccatatttatgattagcgctcccactcaaataaattaccatgttcccaagatgtaaatatctgccagaataattgatcaacttcaacgaacaaattgaagagcataaataatacaactaagatgaacacaaccatatctggattaagatccataagatcaacaagtgatattgacacaaaaacatataacggtaagtttatgatatcttatccaagatcaaaatcggtccaatccaatgtatactccatacattcgatactggtaaactttgtcaataccctggaaagaacataacacttattcaaggtgtaagtatacctcatcaccgtttatcgtgttagtctaaatccaatgaactgacaaatcatgggaattaaacttttgaacatataatcatgattatatttcactgtgttgatgacactataatcatgaacaaatatatat

SEQ ID NO: 336496 - DNA, 804 bp, Cannabis indica
aataaatttctcaaatcaaatcaaaccgttaagaacggtttggtttggttcgaaaccacgtatttttttttttaagtaattgtactactttttactaagtttttaattttatttttcaaaatatatatttaacatgataagtaatagatctaacatgtaaataacaatataaaaatattcttaaaagtcaaacacaacataaaaatctaaaattcatgcaataaaaaacttaacacataaaaaagtttaaaattatacatataatcatatataaaatatatgtataaattaattatttattataaacagtccggtccggtttaactgttaactatttattacgaaccacaaccgaaccattacgccgtaaacagtctggattaaccaaaccaccaaaaatggtttctctggttatggtctataatggttcagattgtcgcagtccggatttaaatcgcggttttccagtttatgtgaacaatcctagttagaacagataaagaaagacctcaccacactccctcatgtgtttcactcaaaataatttgtcactcaatttcacttgtgttttcactcaaattcgatggcttttacccccaaataagctcacacctctacctttttccactcgtattcttctttaagttatttaaaaactagccaaacagtacaagagaggtttccaacaagccaaacagtacaagagaggtttccaacaaactaaccaaacaaacaccgatgaaaactgaataaaaaatgatgatttttttttttgctgtaggtttcctttttttttcttttttt

SEQ ID NO: 336497 - DNA, 855 bp, Cannabis indica
agctgtgcaatcccacatcgcctggggaaggtcaagtgtgatgattctaaggttgtgtaggtatgggactacacagttgaagagggcttaaatggattgattgatactacttatatcaacaaggtgcatcttatttttcggtagcccatctctaaaagaactccacagttaagcgtgcttggcctggggcaattttaggatgggtgacctcctgagaagttttccaaggaagcgtgcgagtgaggacaaagcacgctggaaacactcgtgttggtctgtagggccagtcgtcagtccatgaagcagccaaagtggcgtactcgtgtataagagccattattccgtgggtataaaggtccaatggagacttgaagcggggacgttacatatactttctgtggcttgttcattagtctcaatattccccctcaagcgaaagggagaattcaccacttgcagtttgcctcgaaatcttatgaacctgtcaacagagagttctttagtaagagcatcaactatttgatcataagttggcacataatgaattgctacttgtttgtttaagaccatatctcagacaaaatgcagattgatttcaatgtgttttattcgagcatgaactggattagcagcaagagaggctactccaaggttgtcacggaagataactggataccttggtaatctgatgtgcatctcttgcagaagagcaactatcaaggatatctcagcagttgtatgagctagagccctatactctgactcggtgttggatcgagcaatgacatgttgtttcttagagctcgaggacactaagtgtaatgaccgctttagtaatttggattagtaaaggca

SEQ ID NO: 336498 - DNA, 671 bp, Cannabis indica
atgaaatcaaacatgccattaaagacctaaacttgagtttcaaagctcaagctaactcaattctatcaccatagctcaaaactaacatccaaaacctaaaatcaacttaaacaaagctcacaaattgaatcaaacacagaccaaaccctaacagcccttaaaacccaaaatcacaatttcaagtcaacaccaaagcttggaaaactaagaacaataggtataggaattacctcaacttgatttccccttgaattccctcctgaaaacactagaaatcagcaaccaattcccttggtcttggctggttcgaagagagaaagagaagggaaggagggtttctttttttttttttttatttttctctaaattgaataaaggatttttccaactaatcttttgctgaaaatggaaagggcaggtgtcatcaacctaagcagccaccaaatcacacatttggttaattactaaaatgccatttaacttaaaacttaagcttttccaaaactaggggtaaatggtcaatttccataaccatgctcaacctcggtattttattttctccaaaatatatcccactaagaaataaggttctaaccttactcatgtcatcaaactagccatccatagcgttttttgttgtcgccgagcaaaattgtaaaaataacatattt

SEQ ID NO: 336499 - DNA, 520 bp, Cannabis indica
cacaaaatttaataaacatagaaaataataataaaaaatttatgttcattagtaaacatattctcaaaaatgcatttaaattacctcaattttgtctgaggtacaactttattgtccatcatttcccagtcgaattttttgacctggctttcggcggctgtcatttgagggaccatcaccatgtaatgggtgtcacatacaccacactggtccactaatttggataataaaaggcaccaagcatccatcagcgtcttcagttcgtcttccgttagagatccaagactcgaattgaagacgaatagcttccacaactcaagattcgcctccatagcgatccaatgtttctgccggtccaagaagatggacatgtatatgcactccatacccttccaagacggcaagaattggtttggattcccacgaacgagttcaaagagggactcatcccagacaaagccagcatggtcagtattggtcttccaagcgtcccaccgacccttcaaacgatgaagaaaac

SEQ ID NO: 336500 - DNA, 1860 bp, Cannabis indica
caccgtcttactcactatgattgagtacttgattttctatttgtgggcatggcactctataactcaaggttcgaatatgatgaagaacaatgaatgaggtgaaatcactatgaaagaaactctctcatctactagttgtctaacagagaaaactagatttttggcagattaaaaattaagtgttcaagtggatgagatgagaacatcatgttccttatatagtgttttaactagggcttagagatgaattatatggactaaaaacgaataaaatattgggtaaaaatacacttaaggtcggccacttaaaaagaccattctcttgttccaattttttcactttatttcaacaacttattcttctttcaataataccatattttctaattaaatcctataaatatcaataactatttatttaataattataattaattattaaataaaatttccatttatattatttattaattagaccatgcaaagtctcttaattaataaatagaccccaaaacctcttttcttcacaattaagcccttacttagtgaaaattcttaaataagacatagtctaattttagaatcataattgattaattaaaatcaattaattgtgtaaagaccgcttagtttaatttggaaattaggagttaatcatgtttaattatggaaaattatttatagatatttaaataattatttatactgttattattgaattctgaaatgcattttatgtcatttagtgattttcataagtttgcatttccggtgcccggtaacatggaactcggtgtttggctcagtaaaatcacaactcagtatgttagtattgtgggatggtttattagacattgggaatgtcgggattggccgggaatttagaatttcccaaaatacccctttagtgctctttatgctattttagtatggagggtcaaattggtcattttgccccaatgatattttgtcctttagtggattttatatggtgaatttatgtggttttaattgttatgtgttggctgaaatataagggaattgagtttattctttttgtttattcaaaatcaaagttagaaaaaaaatcaaggaaaagcattttctctcaactctctctctctattttcggcctccttgagcagcaaggttctttgaaatttttcttgtgaattcatctcctttttggtgttctaatcaagctaggttagctcctaatctttctctctttaagtttgttgaaaattatgaaaagatgatgtttgcatgcttgatgtggttgtgtagttgctgctatgttttgatgttgatttcagaggtttacttatgatttatattgttgattcaaacatgatagggttggtgattagttagttttatcaagagatgaaattttactcaaagctatggtttttcaagtgaaaattgtgagttttgttgctgtgtttgttgaggtcgatttcttgtgttttcagaggttataatatgcatgtttaagtaggtttgaactgatttggatgcatgctagttaaatttaaccaagtttgagttttgaactcaaagcttggagctttaatggtgatttttgattctgtgtgttctggactgttttgttgctttagaaatgttctatgggatgtttagaacaggtctggaaggtttaggttaaattgggtttgaattgaaggagttatgaatttttgattgtagtctacgaggaaccggaattccggttgtacatccagaattccggatggggttctgaaatttcccagaaccggaattccgattggacaaccggtctgccggttgggtgatttttaggaaccctagattttctcgtttttatgttatttgggg

SEQ ID NO: 336501 - DNA, 674 bp, Cannabis indica
aaaaaatctatctatctattctatataaaatgtggttatgtaacagaattcttagtttaacgatattttctgggtttcaccattaactttaacagaatattctttattaattttataatattattatatatatttaaaaataaaaagtatgtagatattttatataaagaaatttaaatttaaatttgttatactcaaaattacggctaccatctagtggaggacacgtgtcaagataaagaaaatatggatcgatgaaatcacttttaatggaataactcattaattgcgtaagtagcaaagtatacttgcaattcaccgactgtaaggtcttatgcgaggaaaagatatacaaactgatctttagtgtattaacgagaaaccatatgtcattgaatgcataaagtgaggcatcaatttcgttacatctgggaagacgaaagcgatgcatatcaaccgtggaaaacacttagcatataatgtacaaactaagtataacaggtcgggtgggctcgagacctaataagcgaggcgcctatctcgctataagaaggcgcatctttgttactttcaccagttaacttcagacatcttttcagtgagacttataatcttgacaagccaaaagctaacattcaaatgagtctcaaaaaactctctgttaataagaactg

SEQ ID NO: 336502 - DNA, 671 bp, Cannabis indica
aataaaagaggtattttttaacttagcccaaactttcacgttcaactattttttttgggtatatttttacattattctataaaaataacaactcatatgaaaatagcatgaaactaatatacaaaaggaaatttgattttctatacttacatatacctaatttttttctcctaaacacataacacttaatatttgtgggatatgacatattttaaattatccctaaaatacccccatttacattaccccctcccctttctcttcttctctttactgccgagcttcccagggctaaaataagatatccatcggaccccaatcgggtccccatcggactcgtcagaccaaaaaaaaaatttcagcacatgcatcggatcccattagggtccccatcggacccgcaaatttttttcccagcacgcacatgcatcgggtccccatcagacccgtcggacccaaacaaaatttttttcccagcacgcaagcatcggaccggaccccatcagaccattgtcttccccaaactgtaattttcccgaatcccagatctgaacctaaagctaacaaaactcacggtgcacacataaacacatacattataaccctaaaatcaatacctatcaatactccaaatcatatatcacacacaaaaaaaaacaatagacaaaaaa

SEQ ID NO: 336503 - DNA, 559 bp, Cannabis indica
tttatttaagtttggtctaggtctgaggtcgagtccgggtccaggttaggagtcgggttcggtgctagggccgggattgggtttgggcccagttcgggtcgcgtcggagtcaaaaatattgattaaaaaaactgtttaaaaaaaatatttaaatttttttttttattttcaaaattttgattctcaattaaaaaattgaaagtgaaaacacttttatagaacatgattttaaaaaatattttacttttctaattttaaaaacaaaaaactaattaaaaaaatgttagcaaacaccaccatagattatttttttttttctaaatgtgaacaattttatttatgaataggttaattttaaagctcaaatatataaggttaaacaacatacacgtaatattattaatggcacaatatgcatactcttaatctcgtagaagtttcttaaatttaacatttgttacataaataaataggacgctaaaaatagtgacatgaactaattgtgacgcagatacaattattatactatcaaagataggtgatgaacatttcagacaat

SEQ ID NO: 336504 - DNA, 507 bp, Cannabis indica
atttttcaataaaaatatttttatgtttctgaaaatattttattttggattccttgtgaaaaattaagcgattttggtttttatggaacttaattccgataaaaattgaaaaagatatgaatttttgaagtttcggggtttgagttggtgcatcgagtgcaccgggcttcagacaagaagcctacacgagcgcgcatctcggacacgatatgttgtctgaaggcgctgatgctcggacacggagacaccccaataccctgcacctgaccgagatttctcggtcaagcaggctgcatttgccgagttttctcggcgtctccctctcttccgcgcgcgccaggtgtgttttgcagcctcctggggtgcacgtgcagcctacctgctgcctcaccccaaaaatttgattttttagggattttttcccaatttcggattttttctattttcaaaccccaaatttaaaataaaatattatttttaatatatttaaacttaaatatcatattt

SEQ ID NO: 336505 - DNA, 1105 bp, Cannabis indica
tcggcgattgttgctgccgagaaattagtggattacagataattcgaatccttcacagggtgataattcgaagaaatccactggagaaagaaacataatcagaagccttcttcgtccaagggtgggcaaagttacgatggcaagaagaaagatggtaatggtgggaataaccagaaaggatcacaaccgaatgctaagaagggtgtggggtgtttcatctgcaatggtcctcacatggcgagggaatgtcctagtagggagaagttaaatgccctgatcgcacaagacggaagaagcggcagcgagcaagaaacaacttctaggatgaatcctttacaacttctcaatgcaatcactacggagaagtcgagtttgttcaaaggcttgatgtatgtgaaagcatttgttaatgggagagaagtcacggccatggttgactcgggggcaacaaataatttgtggcgcagaaggaagcaaccagacttggtttggaagtgattgggagttcaactcggttgaaggcagtgaactcagaagcaaaaccgattcaagggtctgctacggtaatgttgaaggttggggcgtgggagtctcaatccaaactcatggtggtcccgttggatgattttgacatgattctaggtgtggaatttttgagtgcagccaaggcgatggttgcacctcatttgagagggattatgatttgtgtggaggagtgtccttgctttgttgaagcaatctcctcaaatcagaataaagagaagggcgttgtgctggaatcagcgacccaatttggaaactctattaagaagaaaggcaatcaagcgtatgtggctgccttgatagagattaaacaagatcagtgggtagaagtacccgatgaagtggctggattgttggaggaatttgccgacaccatgccagacgagttgcctaaagaactccctcctaggagggcaattgatcacaagattgaggtgataccgggagctgttccgccagcaaaggcgccgtacaagatgggtcctttggagttggaagaactcaaaaaacaattgaacgggatggtggaatcaggatacatggtgccctctaaagctccata

SEQ ID NO: 336506 - DNA, 679 bp, Cannabis indica
tttggtgagttttgagcaagaaatgaatgagatattttgggtgaactggtgcaaaccgggttgggtgtttccctatttcctgcgttggtgtaatccctagaaagtataacaaagcttagtgtggtgggttcgggtatcctggattagggtttttgatcatgtgatttacccgttttcattatgtgatttgggcatccatctagcacgagacgtttcgttcaggtcggccagcacactcgaatttggaaagtaggtaagaactgtatataatgtgtgataacaataactgagtttatgtatatgttatgtgtatatgcatgcttatggtttagttgcactaccaccacttgtacagttacggcacatagtgcattggtgtagtgaatattgtttatgagtatagtacagtgataccagcacaagtacgggaaagtatagggtgtttgtggtatatcactcagtggtactcaaggtacgaaacaaaccctaccaacactcgtacaacaaggtatgtagtgtatgttgtatagtagatgtacccaagtatggaacgttcttactcatctattaagccttgtaattaggtgtatggacgcctagatacaagttgaaattatatgatatgttatatgctttccttactaagtttgttgacgcacagttatgctttcatgtgtag

SEQ ID NO: 336507 - DNA, 1432 bp, Cannabis indica
caattcattacaatactaattgtgtcacatacaacgtactatgcagcagaatatacttttcttacctcaagtttcggttcaagtatgttggccaacctacttggagtacgatgatgatctcgtgccctaattcataacaataatagactaataagcatttatccaaaaacacttcttaattgttgcaaaggacaacttaggatttcttaccaaaactcgtagttcaaatacactaaaataaaacttatattttggctctcaaacatacaccatatagtagagctctttgcaagctttgaaatggtatatagaacgtccaaaacggacacgcgagtgaaaagttatgacaaaaatatgattcccgagttctcgaggctgactgaaatggtaaaccggttgaccggtttatcaggggcaaaaaataatttttcaagtttacacactcatcgaaacgctaccggaacttgtccaaaccaccccaaacttcatagggcacatatataccatatatactaccatacttacgtaatagaatctaaaatcgagcccgtaattagcaaacgccagtagtgttcggacttatgttataaaaagttctaaactaaatttctaaccaaaaatcacctcaattttagcatgaaaataccagaactagtcccatgaccacttgagaacaatcctaaaaggccagaacctttataactattctaattcgcaaaactcctatacaaagcaattattttaaacttaaaacgcaattaaaccttaccttaagctttcttggtaggaggattttctatcctgctactaccggagcttatatcgataggttttggattgaaaatcgaaaaaaatagatataagaggagagagaatttgttgaagaaggaggagggtttcattttcgttcttctattttaaaaaattataacattaatatatatataatcaaaacatattgatatgttttatatagaaaaattatattatattaataatataataataaaactttattattaataattattttattatttcttagccactaagaaatttatactattagggcgctaagtcaaatcccacacactcctaattatcccaatacccatattatcaacttatcataatattctcataaattctatcaattaaatcggttatgatatttttggcccctaatcaagtctccaaggtcgccaaacctgaaaatatttttcttacaccggtagctcatattacattcacatacaccatataaatcttcgtaatttataaattacgcttatttatccacttataacgaatttaaaatttatgttgaactagattagtaggatcataatcccacttattatctaattaacccataatatatttataaaccctaattatttaccattaggcttatcaggatattacaaccatc

SEQ ID NO: 336508 - DNA, 1511 bp, Cannabis indica
cggggaaccctggtggtggagccggccatacaccagttttgcaaaattctctttcaagttgcatgaacctgaactcgttacgattttgttctctttcgaaagctctatcgccgtcaaaaacgttctgcatttcaggagtaattatgccatcatcctcctgcttcagctcttcaggagttaagatggggaatttgcccttgctctttcttggccccatatttagaacttaagaataagagaactttttaagagtaagagagaagtagaagacaagagcacttatgaataagaaagggatttgtttttatagagcagtatacatgttgtgaatgtaggaaaatttaatggcaattaaatgtgtaactgtacaggtgaaacgcatgaaatggtgtatttgtttactgaatatcgatactatgtcgatatgatgtcgacaacatgccactttaacggcacggctaacttatttgtcgatacaatgtcgacgttatgtcgatagcttgtcgataggacacgtgtctgacatgcaacgtggcagttgggaagggttgttgggaatgtaggtaaaatttattaacattaaatgtgtaaccgtaaaatatgaaacacatatactgtgtttttgtcgattgaatgtcgatactatgtcgattgtttgtcgacataggaatagatttattaccattgtacacgcgtctgacatgcaaattcctttgggagaatatgtcgatatgatgtcgatggtgtatcgattttatgtcgatgaaggcatgcttggtatagttgtcgacattatgtcgatattatgtcgacaaaatgtcgataattcgtgtcatattttctgctgttgttgttatcgacattatgtcgattgatatcgatgggatgtcgatatttgttttttttttggtgttttttcctttactcaccttgtttgtttggtttgaaattgcaggagacaaagtgttccttgttgtatcgtacgatggtgtttggttatgtgagaattataattggatttacaaagcagatagcagcttgacgttgacagttacaactgagacaaccctacaagaactgcgccaaattttatatgaagagttggaagttgatcctgtagcgtatgatttaaagttggagatttgttccttgtacatgaagggacaaatggttgcgccagaggttattaagagagaacgccaactgagaacgttcttagagatgagggcaacaatgtcaaatacagagtttatgccattattcgtgaccaaggtgagaaaagttgggaattcggagcctacgccgcctactaatcctctccctcggagtgtggtagggtcttgcgttcccgaaacagatgttgggattggtgtgaatgaggaggtcgtccaagaaaaagcaacgctggaagaagacgggagaatcgtttctcgtctggtgataaaaaaggttctctacctcgaaactgcagccgctgtggcagttcaggccacaacagagcaacatgcaaa

SEQ ID NO: 336509 - DNA, 527 bp, Cannabis indica
aaaataagatagataattaagtaaaaaatagatatttacctatttacaagttcaaattacactaatatcataaattaattttaaaaaattcaattaatttaattatgataattagaattgaaataggaatagtaaatatctaaatacaaaactacacaaaaaatcgaaagttaattccatgaaaaaacatgaaaaatcgaagaaaacgaaaaaatttgtaagtggtatggacagtatgcattgcatattgttcgcgcgcgcacgagagggtgtctggccgaaatttctcggcactggaggctgcaagcagccatttcgcgcgcgcaccaggtggatttcagaaaggcacccatgtctgaccgagaaaactcggacacaagcctgtccgaagcccacgcgtccgaggaatgaggctcatccacgcgcgtgagtggggtgatgcacccctgatattttccgattttcaaaaattcataactaattcaaataaaatctaaattaagttctgtaaaaaagtaaattgctta

SEQ ID NO: 336510 - DNA, 405 bp, Cannabis indica
aaactataattagaattaaagctgtgaaaactcccttaaactcaacccaaaagcaagctcaaaattctacaattgcaaagctttaattcgacaccaacttcaagcaattcttcaaacaaattttgaaaaatcaagagggttaagagagagaaagagggtcgggtgagaggggaaacaaaagccaaaaatttccttactttttccttgaaattcaatttttatcaaagtatatcattaaaggtcaaaagaccaaaatgcccctagggccaatgtacacatattcacccatacaaggataatttagtcatttccaacacaaaacacctatttaaataattttcaaatttctcatatataaataaaatgccaataattaatcccaaaatacccggttgtgactatacc

SEQ ID NO: 336511 - DNA, 925 bp, Cannabis indica
gagtagtgtgcctccaattgagagaaaaatcaaaattaggtcaaaaccacgacgtccgtaccaagtcgcgactagcccttaagctggtcgcgactacaggcaaacctcgaaaatcagaggttctgccaaatctcgaagtcgcgaccagagtcgcgacctggaaaaagggtcgcgacctggctctcatgaggtcgcgactactgacgcttctggagccgaattttccaatttttttccagtttatcccagtttttcgccatttgactgaatttgaactttaacactccgggaacctgaaataatgaaaatcaagcgtaaaactgctccaaaagacaccaatagacgagataatgctaactttaaagacccgaaacataggctaattataacctaacattagtaatggttttctttaatttctatcttatccctaagattttaatgctgaatattgcttttaatagaagatgatagggtattatctaaaagattagaaaaatgagaaagaaaatccttatctttctctcaccctaggtttgacccttaggaaacccaaaagagatcaactttttgttggaattattttacgaggatcttagatctactcacaagtatgctgatttaacaacctaaatatgaacttctaaaacgacaataaattaaacacataaaagtatgagaaaccttacattgggtgcagcggaataatatgtctcctcccactcagatctctaacccttgattcctttctgttgcagagtataatcaagatctgagctcgaatgtccttctttgttgactctgaattctacacagccttcctcactatgattgaggtattacttgatgtgtgtgggcactactctatcacttagagggtttcaaaaaacagagaagaaagagagagagagagtggcaatttcaa

SEQ ID NO: 336512 - DNA, 859 bp, Cannabis indica
aaaaatctaatcacgagccacatgggacaaaactgcctccggaaatttagacaataaagctataacaacttcaaacagagcctcatcccattgaaataacaccttcccataaataatagttgtcaccaaatctgaaaaaatatcacaacaccaaaccaaaaaataaagttatattagaatgacaatcttcaagaaaaaaattaaaaagcaactttagaaattaacacataattacacatcactagctcaacaatattaaaaactaaaagaccaacaaaattctaagtataactagccaaaggtaaaacctttggctagtaacaacatactaacaccctaatttaaaattactaaaaatcaatatctttcagattatatttaaaattaaacttaacggtgaattctcactaattgaagactttctacaaaataacagaaaaataaaactctattaccacacaataggaatgatggtaaatcaatccaaaataaatataaggacttaaaagactagaaaaacttatctattaaaagtgaaaaggtcgttgaagtagaaatcatgggacaagaaggatcacttctcatagccattgaccataccacaaaactaccctaaaaaatagggacaagccaaaaaatggcacaaaagccataaaaggcacagaagtgataaaagacatcaaaactatcaaaaatagtacaaaaactagtaagaaactctttgaatagctagtaaaaagaaacaaaacagtaaaaataataaaaataaataaagagtataattttacaatactaaaagaaatacaaaagcaaaattctttaagaagaaaaaaacatataatgaattcataataaaaag

SEQ ID NO: 336513 - DNA, 749 bp, Cannabis indica
cttgccatatctatgtgatacgacccccagatttattatagggattgctcttgtgcttcacgatgcaaattctagaatttctcagtatcgattcactgctcggcttatccacggcttggctggaaagacactgtccgtgcaggtgtatgctatgccatgctcggtgcatctctctcgggcagatatggggaatcaggtccacgtgttaccagtatgtcatgccacctcatagtgcaaaaaaaatgagataacactaatatttaattaagtagaaaaatatatttaagttgaaaattaattctcattaagttttgatcaacttaaattatgatatttttcttagaactgaaattagaattaataattaagttaattttattcaagatacttaattatttatttctatttcaagaaatttgattaaataaaaaatatatttaagttgaaaattaattccaattaattttagaccaacttaaattagaatatttttcttagatattaaattagaatttataattaagttgattttattcaagatacttaattatttgtttatattttaataaatttaattaaatagaaaattatatttaactggaaattttcaaatttaaaaaaacttaaattagaataatttttaaagtatattttatttcattttaatctaaatttcgaaatacattaatttcaaatgtagatattttgaaatttttaattttgaaaatttagattaaagttgaaaatta

SEQ ID NO: 336514 - DNA, 1178 bp, Cannabis indica
ctgcaattgcgaggcagaattgagaatcgctcaaaaatcataaagtttagtagattactaactacttaaacaggaagattacgagcaatggaaaaacccaaaagtagtgtacatttgatcaaaatatagttgtttacattgtgaataaaaacgcaagcaaatacaattgtattatgtttgaataaaaatagtacgagacatttaagataagaaaaacctaagactggttataaacttgtctttacaaaaatacaactaggggcaaaccattaagtcattctcctaaacaaaggatgagagggggagccgatgaactcgagaaatacagtctacacgtagctcggagaaagaccgactacacatagcttgagaaagaccggctacacgtagagagccttgatctctgcacatacctctttcccctcatcatcagaggatcccatttcctgaagccgagatctttttcccaacctcaggaaatttctcaacactggagagaggttgacgcaaagatctcctaccacatgctagggtcttgggttggttggattctctggtagaaaccataccaacttccttcctagatccacctgaaaccatgccaatttccctctaaaattcttcatcagcctgaggaggacctttgagatcactcacaagatctataccctctaggatcacttgtgaggatcggccatggcaggctacggggttcccctggtttggattggtcagaagctcctcagccttggaatctattgttccagctccagctaaggcttgaagtctgtaggaacaaatggaaaattgttggtgcatctgggtattatgagtttggaaggataaacttctgaacacaaaagagactttttggcaggaaggatataatccaatctgaaaatggatttcactaaagaagccagaggtttatgaaaaatgacaagcttgagctgttgttttatacacgaagttcattgacaagaaagccaaagattgagaaatataacagttggaagttgtgcaaaatatgaagagacgattcataatgactcttgaaatcgtataactgccagaattaaaggatgcattttttcaagaaaagatcctgacgaaaatgccatctgtaattattaaaaagctctttttactaaaaaagaactttataaggggcaattgtt

SEQ ID NO: 336515 - DNA, 687 bp, Cannabis indica
gggggctggtatgttctcctttgttaaagcatagttaataaaaaataataataaaaataataatagattgttaatgagaaaaacctagaaaagtgaagacttcttcacctctccctctctttctttcgatttccctaaacccagcaaggaggtgggtgttctctgttgtaactagtgaattttggcaaggtttctactcctttgaatcaaggtaatttcctcctagcttttctatttgagttttcttagtatttgaagtagattttatggttttaggcttgaattaggggctgtgtgtttgagtttggtttgggctcttaatttgaagttaggtaattgtaagttttgttgttttaagctgagtttgctagctaatttagtgtttggttggaaattcaagttcaagagcttaggttggagctctaatggtggtttggaattttgtgtgattttatggattctgttgattggaattggtttagtgtaatgtttacaggtaatctggaagttttgaaaagatttgggattgatttgagttgtgggggtcggatttttggttcccagttcagaaccggaattccggttcctgggagcctgcgtcaaccggtcgaccggttggtcccaggaaccggacttccggttgggaaccggcctgccggttggggctttttcccgagccctagtttt

SEQ ID NO: 336516 - DNA, 615 bp, Cannabis indica
tgactaaaacatattatttagttacaagttgttactaatttagttttagtcacaacaagtattgtgactaaaaatacatttagtcactaattattatttttacttttgtttgagatcaatgctagttggtccacttcatttccacgaaaccaaagaacacatgcatagaaactaagaacaataattcaagaactaaaagataacaaactgtaatgaatctgtctaatctttattgaacttgtaaagtttgaaaattatgagctaaagttttaatgaatgagagttagaggtatttatagctcacatacccgtaagtacacaacactaattgacagttaactgttagttaactaactgaactttaaaagtattacaagtgactacttcgactaatacaaaggcgcaaaaattcaacaactttcccaaggtgccatatcatcgaaacccttcaaagtctgtacaggtgtgtctcatgacagagacgtctcttggttttaccatgccatgtgtcacaatcgcaacaagacaccatgatttctataaaatccctaagtatgaaaatgagtctcattttttttttctcattttcatttcactctgattgttttcaaattt

SEQ ID NO: 336517 - DNA, 972 bp, Cannabis indica
tttttaattttttataaaattattaaattaattagtaaactatatatatgtatatattatatcttcaattattttcatacaattgtattgacaatgatataaaaaattattataattattaaaatttaagtaattaaattcttcaaaattttaactaacattacaaataaattaatatagttttatttgttttaatatttttaatagtttataaaattataatattcgttatcatatttaagtttaattattattatttttaatgtgtcgccaccatgtcacatgttttttagactaactattcgtgtgtagttgtgcttgtgtcacccgacaggtttcgtatcgcgttaaaatactcgatctatatttacatcactatatatacttaatgctgccatgccacatgcttttaagactaattaaccattcgtatatagttgtgcttgtgtcacccgaccagttttatatcgcgttaaaatactcgatttatatttacatcactatatacttaattaaagccgccatgccacatgcttttaagactaaccattcgtgtgtagttgtacttgtgtcacccgaccggtttcatatcgcgttaaaatactcgatctatatttacatcactatatacttaatgcacttaataaagtgagaacaatcctccaatagttttgttatgctaagttagacccaataagtttcctattatggtatcatagttgtccatttttgtaatgttggatgactttatttaatatcaatatattcacagttgtttgacatgattcatacttgtgtgggggcgtattaaaatctcactaataagagcactttcaatagaagtataaataagtagtgaaaaaataagaagtatgttccaatagtgtaccaaaaaatgatataaatttaggtagcgtttggtaaaatttttttaatcaattttttgtttttaaaagtagaaaagtgaaaata

SEQ ID NO: 336518 - DNA, 567 bp, Cannabis indica
aattggtgatgccacataccgactcgcaacactcgatggaattacgattccacgagcttggaatggcgagagtttaaaattatattctcaatagtactcgcattattaaactatgttcactcttgtacttatacttagatatttttcatacaaaaaatcctaactatagggggatatatatgctagaatgtactcttgattatataaaggaaattgattcatgattgttaaattttcaaaattttatcaaaatacttgtaaatatttctacttattacaccaagctgtaagtcgcagatatatatattgaaaacgctagtacccgtgtactgcgaaaaatgttaaaggataattatccccgcgaggatataaatttgtccaaaataaaaagcaaatttgtctaagtacaaagcgcaagtacacctgtaccgcatataaaaaaaagtaaaattaaaaaacataacagttataacatagaggaaaatcaagcatctggaacaacaggagcagtctcatccgcgactttactgatgacctcgttctcggcttcctcagcatccgcaccct

SEQ ID NO: 336519 - DNA, 547 bp, Cannabis indica
aaaaaaaatatatttttaatataatttcaagcgtaaagattaattaagaggctataataatatattataattaatactcctttaaaaatattaaaataagagcattctcatcagtttctattctatctttaaaatacattattaaaatttcatttttttctattttacatttaatttttacattatatcatacatcaacttttttaaaatacattaacggaactccatattttttttcaaattttaatatattttcattatatttatatacaaaaataattatcaaaactcaaaacaattaataaaatacatatagagcaattaataaagtatgtttaaagcaattaatatttcaaagataataatatatatacacatattttattgattgctcttagagtatttgttgtagcgtatttttagtacagttctttaaaatttttaaaacttctctattttaaagaagctgttgtgagtgttctaactctttcattttaaagtttctttaaaatttattatttatgctttacatttaaagaatattatt

SEQ ID NO: 336520 - DNA, 543 bp, Cannabis indica
acatgatcaaaacaacaagttaatatatcacattaagctggcaaaaatattcttgcactatgagagcaccaacaatactaaccaagaaagagagacaaaatgggtaccaacataaaataactaatcaattttatttttttcttaatgaaaaataatgttgcagaggtaataaaataaaatagaataaaaaaatataattttattttattaatttgtttggttgcattttaaaatataagaatgtcattttaaataaaatattttttccatcatttaggtacaatgagtattctattttaaaattgaaagaatcactattctaatgtaagatgagaaatataaaaaaatgttggtcttctacaactctgtgctctatggtgggttttttttataaaaaccttggtgtgtaaagctttcagttgtcatggcttctaaggactgtatcagtggatgatattgtcaacgatacattacagttatcggttgaggatgactgggaatgtaacgaaacgccagtgaatggactagctttgatgtcagtgg

SEQ ID NO: 336521 - DNA, 1002 bp, Cannabis indica
tttttattttttcaaatgtaaaaagtgggataaaaagtctcttttgttgtagtgcaccaatggactcttattttccattaataccgcattcgtcatattatatcctctatgagctccttaaggtttctccctgagcccatcatccaaagccttgtgttgttggtgttgcttttagttcaaactcatcacatgccaaacttgagggcaattacaacaactttcaagttgtgttgcatgacgcttattatgggcgtcaatcgcttgctgatgtgacatagttatcaagtaagtctttctctccttagattttatgtcacattagggacagtgtgaattattggtttggggaggggcttaattttgaattttgttatttatttgattgtttagttgtttaatttagtttttttttagttatcgtggtttagtgtgttgttaattaagtcgagatcaattttgctgctgtttttatttgtggaatagattgaaattttaaactgtgtgcttaatttgttaaatctttggattattttagatgcttgtaaagactatgtattgattaaaattggcaatgtgtgaaatatgttataactgtcttactttggtttgtggtaagattgactgaattgcttagaacttgaatgtcttattctcttgaggtgaaatccttgaaagtgtttactaggaatatgatttaggcaattttttgaatagtttgagcctttcaagcctacataaaatgaatatccgtagtgaacccttttgaacctaaacctattttatttcttcacctttttgaactaaaaatgtttccacagtgcattctatcttcattgtatttgaaatgataccataagtttgggagaatgaagaatggtgtgagtgaaagtgttgaagaaaagaagaaaaaaaactgtgtgattgagaaaggtttgaaacgaaaagtttaacctggcatcacttgtaaattttagaatagtaatttctctcaaaaaaaaaaaa

SEQ ID NO: 336522 - DNA, 636 bp, Cannabis indica
aggcacgctacagtacttttctaaatactatgtgctcctttactaatcaaaaggtttactgaaaaatatgattaattaaaagttttaaataaacctaaacttttactaagtaaacaaataagttacataattacgagatccgttttgttttacaaacataatcaaaatattacatatacaaaggtgtaacccatcgactaataaaatctgagcccatactatcccaaagaccggcacacgccaagcctaaccatctacatcttcaagtctctctcaaaacccacagattgcagatccaaatgctcaggttccagccacaattggaatccctatgaataccgcagatgtggtaaatcctatcaccacgacaggcgccaagagcctgtccactacaactagccaaattgatacaaacatctcaatagatctgaatagcaggcccttgttgggaatattttaccaggatctagatttactaacaagtatgttgattaacatcctaattatgaattctctaaaacaaaaaaattaaacacataagggtttaacagaaccttacattgattgcagcgcaataatatgactcgttccgttcaagatctctagagcattatcaagatttgaacctggatctct

SEQ ID NO: 336523 - DNA, 674 bp, Cannabis indica
aaaatcacaactatataattttcaaatcataaccgcatttacactacgtgatatgtaatcaaaccccatgatttaaggggataattgttgtaaaaagattacagttgttgaccgaggtttttggcaaccaacttaataatatataagaaagttgtaggaagtttagtgcatgagatttttacgtggttggggtattaatgagccttagtccacgagtctttagtatttacgagagtatttattacagagaatgttcttggtagtttttctctctttggttcttatgaaatccagaattctcgacccctgccttaatgtgtttggggggtatttatagtatttttatggggtgatccctagaaccgagctacacgtctttctatatttttcagtaggggcacacatttctaacaagtgtaaaataggaaatgcatggtctatgccctgagtatcctaggggttaggtggatgtaatcctttatcccttcttgactgatgtgatccctcataaagtagccgtcactaggcttattaatcatagcgtaatagctgcagaaggggggttacgccgtcagacttaatacttatggcagttccaatacgccttctcccatgcggcattaaatgcgaggtgactgttcagatggggtttgatacctcccgtaggtgctttg

SEQ ID NO: 336524 - DNA, 695 bp, Cannabis indica
aagttgcatcaactgtcagttttaagtctatcactatctatttatgggaattcttctgagtttatgtttgaattatatgtcattaaagaattaataaataaatggctaaattgagcttaagtggtcggtcattaggatgtgggcccaccaattacaattttatcattttactcaattatttatcctattctttcacaaaagttatattttctaattcaaccactttaatgtcaaaactatttatttaataattaaaatttattatcaaataaaattaccatttaatttatttatcaattagacttaataaagtctcttaattaacaaataaaccctaaaaccttttttcttcacaattaagccctaacttagtgaaaattcataattaagacatagtcaaattttagaatgataattgattaattaaaattaattaactgagtcttacaagcagtattgtctcaactagtgtggggaccatgtgcctatataactgagcttccaataagcagatctataatttaccaagtaaattccctaacttattaattcctccttgcactactatagatttggaatcacactctcaattatatagaatgctctatatgttccatgatatatatagatacgttatgaaattttaaccatcgttctaatcctaataatcaaagatcccctatagatgatttaca

SEQ ID NO: 336525 - DNA, 640 bp, Cannabis indica
aataattaatcactatgtctcttagttttagcagcaatacactatttgactatgattagtttcaaagaaatttgtgggaaaagacttgaagggtatcaataaaatatttatacaatttatttcgtttccaaaagcatgcaattccagattttatatgttttttttttctgaatgcttattttttttaggaaccatcattgaaaaaataagataaatgatttcaagttttaatggaattttcaaaagataaaaaataaaaaaatctagttagtaacaatagattctacatttttatgatttaaatggctctttaaaactaaattatcaaatggcaaatagtaagtataactttatttcttcatttctaagtaaaagtaaaagttgtaccgaagaagtcaatgtcatttttcaaccagtatataaacaaatgtatccgagaagttcctcacaatattttttttaggaagattggctgtcaagactagagctaactataaatagggactgtgcattttgacatggtacaaaatcaatcgagtacgagctgctacgaaaaaatatgtatttggtatgacatgaaaaaaataaacttaagcatgacaacaagtccatataacacataagcacaaataaattagcc

SEQ ID NO: 336526 - DNA, 1157 bp, Cannabis indica
cgaaggagtcattatattccgcagcaatcaatgtaaggttttcttaaacccatatgtatttattttcattgttttagggaattcatatttaggatgttaatcaacatacttgttagtaaatctagatcctggtaaaatatttccaacaatatcttcctccatatcaagagtgatgaaatcagcaggaaagatgaatttacccaccttgacctagacatcctcaatcattcccctacgatgcataatagagtgatccgccatttgtaaggagacatttgttggatgagcttctcccaatttcagcttttgaaagactgatagaggcattaaattcacactagcccccaaatcacctaaagtctttgtttcaaccgagcctcctatagagcatgaaatcttaaaactacctggatctttgagctttgggggtagtttcttttgcaagatagcactgcactcctcaataagtgctacaatctcataatcttccaatctctttttctttgataagattttcttcataagcttcacataacttgtaatttgtttaggtgcctcaacaaaaggtatgtttatgtgaaactttcggaaaatatcaagaaacttcaaaaacttcttgtcaagtttcttcttttgaagtcgttgaggatatggaatttggatgtggtggtcataattaattggtggctactgtttctaaaggttcttagtaaacttttcttcctttaaaccatctttctcaatctcaatctttggtgcaagaataggattcttgactggctcttctaactttttaccactccttagagtgattccactgcaatttttttgaggatttacctttgtgttacttggcaaatttccttgaggtctgttatgaagcatattagccagttgccctagttgtgtttcaagatttctaatggatgctcttgtatcagtcatgaactgagtttgtaaattggtgagagtaagaacaaaaacttgcagatcatttgtttgagcaggtggagtttgaggattttactactgagaagtagaagcttggctttaaaattgaggttactgcctttgattattttcccatccattattaaatgagttgaagaaagttttattgaatttcctctgaaaattggctatggcttgcacttgag

SEQ ID NO: 336527 - DNA, 1111 bp, Cannabis indica
tgtgttgatgcaagccgatcgggttatcgcttatgcctcccgtcagttaaaagattatgaacaacaatacccaactcatgacctagaattggccgcagtagtattcgctttgaagatttgacagcattatctttatggggaaaaatgtgaaatttatactgaccataaaagtctcaaatatttttttactcagaaagatttgaatatgagacagaggcgatggttggaattagtaaaggattacgattgtgagatcctttatcagcctgggaaagccaacgtactggccgatgccctgagcaggaagggtcccgggcaggtagctagtctgattcaaatttcacctcagttagcgaaggatatggtcaaatctagcattgagttagttgcaggcaagcttcagaacttgacgctgcaatctgatctgctagaacgaattaaagtcgctcagatgactgatccggagttagtaaaaatcagagaagaggtttcagctggtcaagccagagatttttccgtgtcagacagtgggatgttattgtttaaagccagggtttgtgttccaaatagtgtggaacttagaaacgaaattctcgaggaggctcataccactccatattccctacatcccggcaccaccaagatgtatcaggatcttaaaccttacttctggtggagcaaaatgaagaagaatttggtagaattcgtatcgaaatgcctaacctgtcagcaaatcaaggctgagcatcaaaggccggcagggttgttacagcctttaaccctacctgaatggaagtgggaggacatcacgatggactttgtggttgggttacctagaaccacaggattgttcgattctatctgggttgtggtagatcgattcacgaagtctgctcattttctgccagttaaaacaacctattcagtggatcagttggcagagttgtatgttaaagaaatagtaaggcttcatggggtaccaaagtctatagtttcggatagagatccgaagttcacctccaagttttggcagagtttgcaacgagccatgggtacgaaactaaaatttagtacagcattccatcctcagacagatgggcagtccgaaagg

SEQ ID NO: 336528 - DNA, 934 bp, Cannabis indica
tcatggagacatatgagttccctcgtggtcctcatatgcccaccctattagtcccactgaccagtagtagctcacttagccaaggtgccagggggtggtggagagctgacaccaagtactccccccttaaagagcattttaagcttttaggcttctactaggaatatatatgatttttgctctgcagacatatgttcatcaccatataccaaatcagagtttctcaaatccgaatttgtcattgtatatgtagacccaaataaatggcgaatatagttgaacgaaaaaaaaggttattattattattattattataattataaataaattacctcctttataaaccattcaaaatgtaaaggaataatttgtttaataaaaataataataataatgaaaataataataataataatatgataaaaaatggtcagtcaaaatgagagtaaaattaggagatattctctccactctcaccacttatacgttaagtgggtggttagtaaaaaataaaaataataaaaaaataaaaagaaagagtctctataaaagggaagagaggcagcataatagggattttttttttatttttttttattttttgggcagtttcagaagtaaacgtaagagttaaacaggagagaaaataagaaagagagaaggctttgtgcataaaattttcatcttcaagagtttctacacagtaagtgataggtaaaattctttattctttgctcttcactttaaatctttctttgctctaatgaatttttctcttttatctttggtccactttgatctaggctttttgagccacaaaagatcttcaaaagtgagatatagccaagagataaaagggaaattctcatttttttacacactgttatactgctaaaatcgaaccaatatttttcttatatttttcatggtccac

SEQ ID NO: 336529 - DNA, 738 bp, Cannabis indica
tccctaatttggggttcttacttgtgaaaaatcgatatctttactcggttaggatatctcattttaagttttgtttcagaaaaagtgactttagtaaaaactcaatatctctctaaattttgattcattttgaaagatatttatctcgttttaaagcttaagcaaagagctacatttttttatgaagtgttgtttggatcggggtgtaactatttttaaaattattattttggggttgtatccagaaatcggcatgatccagaattttaaggaaactgttttaacaaaatatccataaaaatcctaggttataactccgattttgatgatctttatacagttagaaaggttttttgattatctaaaaactttgtgaacaataagatttctaattcaaacattttatgagtaaaattctgagctaaacttactttatatgaattataaatatagagtttatcgggggtctaagggttcgctaattgttgatagggcctagaagatattgtaagagttaattacagcggaattgaggtaagaaaaaaataattatactttatacttgtaatttttatatagtttgagtacttagtgagactggttgaataaattgtctcgaaattgtggaatatgatagtttcggtgaaatagtgttttgtcgattgattgtatatggctgtttaatcacgttccaagtacttggacttggttggaaaccacacatgtatggtgatgtgg

SEQ ID NO: 336530 - DNA, 603 bp, Cannabis indica
aattctaagaatatgatcatacaatttagtacaatgaatgccatcaatatcaaacaacattcattgaaccaaacttaaaaaatataggccaaacctctcaatctatacaaacctattttttctccattatcacctttattaattttaataagattctttgcaatcgcatttctaaccgaatcaagaaataaacaataagactctttgcctcaagcatattcattgaacttcacactatcaataatatccaactctaattcaaatactttcttagtgtccaaatcacttaacacaaaacagtgaacaaagtagagaatagaaactttcaaggcaagctcatcatcatcgccaaacattttccccaacaaaagctttctccacagccttcttgtttatttctttaaaaccaacaaaaatcttctccttcaacaaattttgttcttgtttataccttaacttgtcacattgacccgaataatcaagccgtgaatccaaagaaaattcctcaatactaaaccttagaatctcaccagcaatattaaaccacatctcattattattcggctagatcacatccttcaacaacaaactgtggaacaactg

SEQ ID NO: 336531 - DNA, 911 bp, Cannabis indica
gaagtagccttgccttagaattttctttgataagctctgtccagctgtatgattttcgcagaatctgtcgtgaacttcatatagaagccgtgcagcttcatttgatgtgacgcacctgagctatggcattgagaatcctcttctgtacatgatcccgtctacgatgatgtactgtgctgcccttcttctcattttccgagcttcatttcggttatctgggagttccccagagttgagataggctgctattggcgtcatccagttcggagatgtgtcgattcttttgatttcttctgtgccggtgattctaggctcttcaagaaactggatcgggaccaggttcgccttgtcacttatattgctgcttgccaaacgggctagcgcatctacagttgtattttcttctcttgggatctgcttgaggctgtagcttttgaattgtgcgagcagatcatgtactttgctcagatatgctatcattttttctccccgagccttgtatttgccagatacatgattaaccactagctgtgagccactgcagatttcgatgtgctcggctttcatttcgttcgctagtttgagtccagcgattagggcttcgtattcgacctcattgttggaggctttgaatctgaatttgaccgctgcatggtggtgttgccccccacgtgtgacaagggcaattcctacgccggatagctgatctgtggccgatccatccacgtgaagcttccaggtcggcctgctttcagtgctagtcggctgtggtgttggctcaggatcgccttctgggatgctttcagtttttcctgtgcattccactaaaaagtcaaccaaggcttggcctttgatagctgttcgggtttgaaattgatttcgtactgccccaattccactgcccatttgag

SEQ ID NO: 336532 - DNA, 632 bp, Cannabis indica
taacaacaaaaaaggtatggctcaccactcttcagaggcaaatggctgaacattgggatggtaggttccctgtcaaaatttctgaagatgaagatatgttcttactaacatttggttgtgagggtgataagcaaagggtattgaataaagaacccttccattttcagaaccatcacatagttctgtacacgccaaatgtttgtgaaaatgtctcctcaacaaaccttatttacacacccttttgggtgcaaatatacaggttgcccttcatgagtaaaacaaaggaattggcaaaggcacttgggaacttaattggtgaattcattgaagtgtttgatgattcgttaaatgaaggatggggtccgtttttaagggtgcgagtcatgatcgatatcaccaaaccactaaaaagagggcgaatgataactctttcacaagttcgggatcaattttgggttgaatttcgctatgaacgattacccgaatactgcatggaatgtggaagaattggtcatccatacaacaaatgtatcacttttcttgagaagcttgacaatggtgaagaaccggaacttgaatacagacccaccatgaaaggttcaacactcccaacttcaggctatgatcggtat

SEQ ID NO: 336533 - DNA, 1217 bp, Cannabis indica
tcgagttgggtcagtttgagatcacataccatcctaagacgaccataaaggcacaagcacttgtcgacttcatcaccgaatgcattgggttgccagaggagaatagtgcaatagaattgccagaatgtgtatggcgtttgtttgttgatgggtcgtctaacgagcacggcttcggggcaggaatcattcttgtcacccagaggggtatataattcattcagccttgaggtttgggtttgaagcatccaataatgaggccgagtacgaggccttattggctgggctgaggttagtaaaggggcttggtgcgaaagtaattcgttgttttagcgactccttcctagtagtcaatcaagtattgggtgagtatcaggcaagaggattaaaaatggcggcttacctttcacaagtgcaaaaacaactccaacgatttagtattactctatagaacaagtacctcgtgaacaaaactcgaatgttgatgccttagcaaggttggctaccactaaggaagttgatacactcaatgtcgtcccagtacagttcctccctaaaccgagtatcaatgtggaggagaacgaagaggctagcatggagctggtcgatactcaaataacgtggatgactccacttattgattacttaacaactgggagtctcccttctaataagagtgaggcaaggaagttactgaggtaccaaggttcactctgttggatggaaaattgtacagaaggggatactccatgccattattgaggtgtgtgacagttgaagaagcacaacgcatattgaaggaggtccatgaaggattttgtggggaccatgccggaggggatagcttagctcaaaagataataaggcaaggatactactggcctgctattagtcaagactctctccattatgtaaaaaggtgcgacaagtgccaatgcttctcaacaatagcacgagccccttcagtggaactcacttctgtgacctccccgtggccctttgttgtgtgggagataaatttgattggatctctaccacaaggaaagggtggagttaaatatgcaatagtcgcagtagattacttcacaaaatgggctgaggtggaacctttggccaccataacttcaaaaaaggtgctcgacttcgtcgtgagaaacattctatgtcgctacggagttccacaaaaaatagtatcaaataatggaaaacaattcgacagt

SEQ ID NO: 336534 - DNA, 632 bp, Cannabis indica
atcctgcgtaccaaacgggtcctgatggtaaataaagtgggattatgatcctacacataaaatttaaattttgttataagtgagtaaataaacgtaatttataaattaaggacatttatatagcatgggaccctgaaaatctgataagtggataaataagtgtaatttgttaatcactatagtttatttgaaatacatggatataatatgagttatttgtgaaataaaaatattttcaggttcggagaccttagagagagacccgattagaagctaaaaatgtcacaacagttttaattaaaaatattaattgaattattgagataagttgattttaaaaatactgagatatttttgggtattcgaaattcgtcaaataccttaaaatataaatttcttagtgacttaagaattaataagataactattaataataaagtttttattaatattattattatattatatatataaacgaacgtatcaggttatatatataaatatgggtgcactcttaatggatattacccatgaatgggtaaaattagaaaattttgagtttttatgcttaatttttttttaattaaaaaaatctctcatttttatatagtatgggctgagattgttccatc

SEQ ID NO: 336535 - DNA, 1876 bp, Cannabis indica
ctttcctttcagttgatcaaacagatcatcaattcaaggtaaatgatacttgttcttgatggtaagcttgttcaactcctggtaatcaatacacattcgtagagacccgtccttcttcttcacaaataatatcggagcattccaaggaaagtagctcggtctaatgaatcctagatttagtaactcttgcagttgtatctttaattctttcaattctgatggagccatttgatacgctgcttttgatactggatctgctcccagaaccaactcaatttcccaggtagatgacaatctcggtaaatcttctagaaagatgtcaaggaactcgcataccaatcttgtatattctcaggtccagatgtcacaggttgactggtattcactacagtgactatgaatcccagacaacctctgctcatcaggttcttacctttcaatagagttatccttggtatgtgtgccccctgaactttacccgcaaacaccgctgggctagcactatcgggctcgaacaccaccattttccatttgtagtcgatcgttgctccatacctagacagaaaatccattcccaggattatatcaaaatcaaacagttgcaattctattagattggcggttaattcacaactgttaatctagaaggacaaagaccgaatccacctattggatactataaggtctcccgagggtaactgggtaccaaactttgaagcataaatatcacatggcttatggaaactttcagtaactctactcgacacataagagtgagtagctcccgagtcaaataacacagtataagaacagccatttatagacaactgacctgtcaccactgacggactagcatcagcgtaagcctgagtcatagcaaaaagtcgccccaggttctgagtagtattcttcttaggttcctctttctttgtctgaggacaatctttgataaagtggcccaccatgccacactagaaacatgtcttggcctgacattcaccctgatgtgcttcttgcatttaggacactcgggataagatcggaatgaagacccgcggccttgacgaccacctttatttccccaaaaatttctattaccccctgatgttccagaagcctctaccttccatttgtgatcaggatttccactatcggtccccttactgacattaccactagcaggagggttcgatgtcgtgacgatatcctttgcaatctactcttttactacatgttgctcagcctcctcagcaatcaatggttgctctaccactttcttgtacaaagtgtcatgtgaagtggtaatcttcaagtcccaactgattgtggcattcaatcctcttacatatttttgtttcctggtaaaatatatgggcaccagatcatcagaaaacttagacaaccgatcaaactccagagtgtattcggctagtgacatcttctcttgagtaagcttcaaaaagtccaccatgtgtgaaattcttgttgggttttgtgccctaaataaaacacatttcaatatcgaaaaagccattcaacgagcgaaaggtgagcaaaagcctggcaagtcaaaggctccttctactacaacatccgctcaacttctccactatccaagtaatccaagctcaagtggtaaacgttccaacaacaaccacaagcaagggaatgggaagaaaggaaagttcactggcaaatccgaacaagcttcccgggagaatcatgccaaatatactgcattcactattttgactaaagatatagaaagcatttacatggcaactcagtcgctcgccccatataagaagcccgggcccatgaagaaagatgccagcaagagggacatgacaaagttttgtcgattccacagagacta

SEQ ID NO: 336536 - DNA, 558 bp, Cannabis indica
tccatttttggtgccgggtcacgtgctaagtccttggttcaagtacgggtctggatcgggtactaggtcccggtcctagttccatttccaaagtccctatccttattttaggtctaggtccaggttattgtgtgggtttgggtcccggtcttggttcgggttcgatacctagactcggttcgggtttaggtctttgtctgggttttgatctgggtttgggtttgggtttaggtccctgtcctggtcctagtcctacttcggttctagttccatttgcgattttgagttcgagtttgggtttgagttcaggtccgtgttcgagtcctggtctgagtttgggttcgtgtccggatttcagtctaggtccagattaggcccctggtgtgggttcgcgtcctggctcttggtctaggttgggttcgagtcccaagttctaatcccgatctctgtctggatttagttctgggtctaagtccttggttctgatcctggtcttggttcgagtttgtgtccgggtccatgtctagctttaagtctgattctaggtgtgggtgtttg

SEQ ID NO: 336537 - DNA, 731 bp, Cannabis indica
acttcggggtcaatgttcaaccggtcacacatgacatgcagagatatcccgaccatatctaaatgtttccaagcgaaaaaatccaaatttctcttgagaaaagtgacaagcttttcccgctgttgaaaagttagtttagaaaaaattttcaaaaacttgttattatctaagtgatcaatgggtacctccatggtgtcttccgcagcttgggcggtggtggtgtaatcgaggaccctcggatccaagtctgatttttcttcattcggtatttcctctattctgaacacaacctgtcgagggggtggttattctaacatatatataacgttgaccgacttcttttttgcgagttttaatggcgcgttgtaacattctcgcgagtgcgataagactcctcgcaaaatcctactccagcgggggtaggcaacttcatggtgaggagatagatggaagtcacaatcttcatctctttcaggattgggcgaccaatcaccgcattataggagtattggtcgataacggcgaagtcggccatcaatttggccacgacaggtgcggttcccagagtaattgggaggttgatcattccctttaaagtaatttatcaatgcacgaatggaaccccatcagaaatgtgcgtgatcaccttctcaaaacggcaggttatttccaggaaggctagaatcatggtgctgaaatggatcagactactcaagtgagtctcatcttga

SEQ ID NO: 336538 - DNA, 545 bp, Cannabis indica
gttttgcagttaaaattctgcatggttcacgagtcaatcttattctgatttctgaatctatttttcttttttattgggcctcctcctttttttgatcttatctgccactatttataatttcatagtggtagttaattacaaagctgaccaaaatacatttacggctattatccctaaaattgtgggatttgattacaaatcaagccaaataaatgaggtttttacacagctatgaatatcccaactttattggatcgagatgagcacataattaaagatattcggtaagccgtatctcatagggatgcctcggtgatgagggagctaagatcactttgatagggagcctctgcttgtcacttttgcttctcgagactaatattatcttaaccatgatagttacactctctgcagtcgagaagatcttcctcgcatgcaaaacatcttttagcgagataaccacctcattgtctgttatcttggcttgccatactatctatactcagtttgtatatcgcataatatacgctaagtatttttagtgt

SEQ ID NO: 336539 - DNA, 631 bp, Cannabis indica
agaacctgaacaagaatcgccgaaccaggaacctagaacaagactaggaccgtgacaaggacccggacccagagctagaaccgaacacagaccgaacctcagacccaaaattaaactggaactcgtgcccggacacggtcgtgtacccagaccggaactgagacccggacctggacctaaatccgggacccaatcccaaacatagagttggacctagatagggatccagatacaaacctggactttgaccaagagccagactgggatcaaaatgcttgacctagatcttgaccgagatcctgacccagaccaaaacttggacctgcactcgggacccgaacttggacctggacacaaacctagacccacatcggggtccagacctggacacaaactcggacaccgactcgaacccgaactcaaacactgacacctagaatcagacccaaaactagacccggactcggacacaaactcgaacccagaacaagatcaaaacaaaggacttagacccagaactgaatccagactcagatcgtgataggaaattgggtcttggacccaacctaacgcaagacctaggacgcgaacccacaccgcctcctgaaccaagtcccaaacccaaaagtgg

SEQ ID NO: 336540 - DNA, 549 bp, Cannabis indica
attaataacatacattattataacacaattatgttttacttactaaatatactcacacatattttatttttataaaacaaatcgttcaaataattatactattttaattattaattaaaataaaaaactaaaatattaaataaaactaacactacgtgacttggcacgtaacaatcacctagttataataaaaacatatataaacgcctaggaattcaaaacaataccatttttttttaatatttattttttgtactttttctttttcagaggctatcaacaactcatctgtcatcatcatatatatatatattatttaagtcttttatttccattaaaaaggcacaaagccataaatgtacaagcaaaggggatcaaaaagtaaagagtatgttagactttttatttgggcttacattaaattttattggttttattaaaacttgggttgattggatagttctttgctgtattagcccatgttgttggtgatcaattgttaatgggcttagcatctgtgagtaaagtctaggtgaagcagaagtgtgg

SEQ ID NO: 336541 - DNA, 885 bp, Cannabis indica
acttggtttttagagctgctgaaggatgacttggatcccattcagccacagtcattcacttttatgagtgacaggcagaaggggcttcaaaatgcagtggacacagttttcaatagtcctgacagtaggttttgtgtcagacatatgcatgaaaatttcaaaaaactgtttcctgggctactgctaaaacaacttgtgtggaatgctgcaagagccactattcctgcagagtttgataggaggatggatgagataaagaaaatcaacacaagtgcatacaattggctggcagcaaagaacccatcagaatggacaaaagcacacttcaaagagggggttaaatgtgatatgttgctgaacaatatttgtgaaagcttcaacaaagcaatcattgatgcaagggacaaaccaataattactctgctagaatctatcaggtaacattttcagtgatttctaagtactggcagttagtaattaattgttttaatttttgcattctcacttagtcatgctatttttgcaggcactggttaatgtgtcgttttaccaaaaaaagagagagtttgcctagatggagacatactatacacaacaacatcatcaagattattgcaaaggaaacagaagttgctaaacggtgtggagtgtcaagagcaaatgcaactatgtttcaagttcagacgaatccaggaggttgcaacactgtggacttagagaagaaaacatgcacctgtaggaagtttcagttaacaggcataccttgtggacatgccttagctgcaatttggatgtgcaaccataattcccatctctatgtacacccttattacagcaaagaggctttcgaaaagagttatgcacccacagttttcccaatcccaa

SEQ ID NO: 336542 - DNA, 2573 bp, Cannabis indica
gaggcttcggacccaacccgtatcggcgtctagatcttcgaatcataccaagacccatatctagaaaatttctagacaaagcatccaaaccaaaactcagacccgagacccaaaatcggaagaagaatcggaataaggactatggaacaggaattgaccttgacaaaaaactggatctagacgtggaacagatcacagacccggacctagaccgggatcgatacccggaccaaaacctgaacccagacgcaaacttgcaccaggacctacgacccagaacctggaacccaggacccgtgactcgggacctggacctagaaccacactcataccaaaactcagactcgaaccaaagactaggactcggactgagattaggactgggacccaaacccggactacaaccgagagttgaacctagactaagaacagaacccatattggaaccgggaccgggagtgggaccttggacccgatactcggacctaggacctgagaatggaaccgtgaccaaggccgagaccaggccaagacccgagacaaggaccagtaccaaacatggaccgggacctgcactgggactgggacccttatccagacaaggacctaagaccttaacctgaattggggacccggacccatgacccaggacccaagacctaaacctagacctaaaccttgatttgagacccaaactgcgacccaagacatgagctagatcttgaccaggatctggatttggacctgggacccaggacccaagaccagaggctttgacccaaccccatagtcggtgtttaaatttgggaattggaccttgacccaaacccagacccagaccaaaactcgtacccgtactggaactcgaactagactcgtcatgtggtggtgtttggatttgggaccaagacacagacctgaacccgaatacggacctagacccagacaaggactcaaacccagacccacacctgaaccttaaatcgtaccctgtgaccccaaattggaatcggaactggaagcgaaccctcaaaccctaaaccctaaatcttaaaccttaaatcctaaactctttacacttacccctaaaccctaagccctaaatcaataaatactaaacccaaatccctaaaccctaacctagacacgggcctagactcatacccataccgagatcagaacctagaagccagacccagacccgaattgagacccgaacctagacccaaactcaggacctgaacccggacccaaacccagaccaaaacctggtcttggatctagaccttgactaggacccggattgggaccccgactcgtacccgaatagggacctggacttcgaccaacacccggacccagactcaaacccgaactcgtactaggacctagactcgcaccaaaactcgagatccaaacccgaatctgaatttggacctagaccgagaccaaggatccgaacctaaatgggggaccttggccctagacctgaacctggacccagacttgtactaaggatccagagccagatgagggacttggacccgaaactgagccccggaactgggaccgagacctgaaactcgaccacagtctcgagagacgagacccgaccctataccaagaacttaggacctgactactgggacacaaccccaaactcggacctaaatccaaacttaggacgcggcccaagacctcgcacctgaactagaagaagaacgagatcctagaccgatatctgaatctggacctgaggcttggacttgacccgtagtcagtgtttgaatctaggacccggacccaaaatctgaatcggaccagacctgggacagtaacaggatccaaaccaaaacccaaactcaaactagaacccatactgggaattggacccagatcaggacctatgacttgggacctaaacaaagaccgggacctggacccagaccgggacccgaaccgaaacccaaaccctgacccaaaaactaggctcggccccacgacataagaacaagactcagacctgggacccgaaactcaggcccacactgggacatggacccgaactcggacctaagcccaaactggaaccaggactcacactaggactcgagacgcgaacccgaacaggaaatttttttttgacccagacagggacctaagacctgaacatagatgggggacccaaacccgggaattcggccaccaaactgggagcaaaacttgggcctcaaaacttaaatcgagaatcgagactagaccccagacaaaaacctagacctaggacccacctcaggacctgggatccgggactcgatgcttggacccaaaccgtagtcggtgtcaggatttgggacatagaccagaacccgaaccaaaactcgaaatcaaaccaggactcggacacatacccagaccctaacccacactcgccaactaaaaccaaaacttgaattggaaccagactaggatcttggaatgggactgggaccttgacccggacccgaacttggaaatagaccaaacctacgaccctcaccgagaccgaaacccacctccctcgaaacccaaat

SEQ ID NO: 336543 - DNA, 714 bp, Cannabis indica
gataggtgcttgtgcatatcccagcaatcttttacaatctgtgcacaaatgggctctcgagaccacacgttctcataacgaaaatgaggagcagtgatagtactatgatgggcattagattgtaaaaagatgggagtatcggaactagaaaaaccaatgttgatgagagtatccaactaagagagacagttgctttatcgaggcgaatttctacacaatggtctgtgcctcgtccacgatcccaggtgaaagggtatccgcgaaagtcaagatcaataaggttgcaattatcaagaaccgactgaaaaccgtcaataagagaagttgggtacggacgcccgcctctcttgtcagattgggttgaaatattattaaaatcaccgatgatacacaatgggagagacgactcgctgtgcaatgaatgaagaagagtccatgttcgatcctgttgtcttctgtttggttcactgtagaagccagttaggcgccatgtcgacatgccccttatacaaacttcaacatcaatatgatttggtgaaaaaccaactagattagcttcttctgaaattttctaaaacagagccaagccttctttcctttcggaagcatcaacttaaaaatcgccttcaaacccaagtttgaccctcaaaccaagtagatttgctgttttttgaaagcccatcagaacactcagtatcattactgtcttggtcc

SEQ ID NO: 336544 - DNA, 822 bp, Cannabis indica
aacattaaatgttatttctgatctatattaataagtaaatccgattatattgaaatgagttttatttagggcataaaactcaacatccacatcttgctggagatttaggaaaagctcgagaaaagtatgcccgagccttgcggtatgagcaaaatgaaatagtcttagtgggagaaaaaccaaaaataccacgggtaagggagccaacaataatattcactgaagtagatgccaaccatgtcctcttcccacacaacgaacccctggtcgtagaagtacaaatcgcaaataagacagtggcacagacgatgatagacaacggagcatctttaaacatactgtttaagataacttatgagaatatggggctccaacttagagacttgatatcctgcacccaactcgtatacagtttctctggccaaagcgtagcacctctgggacaaattttcctacctttcactgttggacaaggtccgaggagcataactgtaatgtcacaattcctgataattgatgtcccttcaacctttaatgtcatgttaggccaactggctctatatgacttaaaagctgttacatcagttttacatttgtgcgtcaagttcccaacaaaaattgagtgggatgtctcaaaagaaaccagagaattgcacgggaatgctacaacattgctctaactaaggtcaagaaggaaaataccaccgactagagttcaggtaagggaaaaagcattacccaataggaagttgcccaaggcggggacgaagacatggatccctgacttggggaagcaaacacaaatgttgggccaatagaaga

SEQ ID NO: 336545 - DNA, 472 bp, Cannabis indica
tggtaaaacatattccaacacatttcccattagaaatcttcctccatcaactgatctataatcaaaaaatactctcgacttggacacatgtgataattgcatccggagtcgagaatccattccctgttcattgaagactctgagataaagaataactcttcatccatggagcagtcatcactatcttctgcgattgtaacagagtctttcctgtggtgattgtgcataaagtccttcctatctccatttatgagatttcttgaagccttgctgctccttgtacttcttgtaaaatctttgaaagtgtccagactttccttagaagtaacacttccttgtttccttctctctggacatagatattgattgagagtgatggtgtttactctttgaactcacttttttggtgatcttcctcttgccaaatacactgtttctttcttggattccttctccaattgtaactcgaaat

SEQ ID NO: 336546 - DNA, 846 bp, Cannabis indica
tggaaatcgacccaaatatctcggccaggaaactcaaaatcggtaagggtttgttgctcaaaataaaattagctttaataaaatttttgagagcaaacttggacatttttgcctggtcacatgaggatatggtcggtattgaccccattgtgatgtctaacgcccttattattgacccagtcttttgtcccgtccaacaaaagagaagactactagacaaagagcgggcgcaagcagtaaaagaagaggtagagagactactcgcgaacaagttcatccttgaagctttctactcggcttgggcggctaaccccatactagtgcccaagccaaataaaaaatggcgagtgtgtattgattttaccgacctcaataaggcatgtcccaaggactattttccacttccaagaattgatcagcccgtggatgcaacagccggacatgaaatcttgagattcataggtgcctatttggggtataatgaaatcagaatgcatccaccggaccaagaacatacaagttttcgaacagatatgggtctgtactgttataaagtaatgtcgtttggtctaaaaaatgctagagctacgtaccagagactagcgaacaaaatgtttaaaaaccagatcgaacgaaatatggaagtacatgtggatgatatgctcgtcaaatacatgaaggctagggggcatataaaggatctgcatgaatgcttcaaaatcctccaaaaataaaacatgaaactcaatcccttaaagtgctcctttcgggccagcacgggtaagtttcttgggtttattgtcaatgcttggggaatagaaggtaatccagagaaaatacaagccc

SEQ ID NO: 336547 - DNA, 656 bp, Cannabis indica
cagcaggcaggtgagttccatctttaagaataacggctgtgacctgtaaatggcaatcgacatattaaaaatctaacctgtatatatcaattctaaagcctcttaaaattattgtacgataattcaattagagttggaaatcaccaagtgtccaagtatttatattcacaaatataaaaactaggcctctttacaagccttagaagatttaccttcccatcggtgtcaatttcaaatgatgacaagacagttcctttgacaaaatttactcctttggacttgtaatactcttcatagtaatttgctattttcggtgtaaacaaacgggccactgaaaagagagggaagagagacaaaaaattaaagagaaatgaaattaattagtagcacttcaaagaaaattatacgatcaatattctgttgttccattaactaagatgctcttgagagataatgcactgcagcaccaaaacagttatgttagaaaaagagttgtcagagtaggagtacttactgcaatgtgcttcagggaaaaccattgttacacttattttattgataaccaaagatgagaagaagtaaatacaattaatggatatggaaaactactgcagctattaccatatatatatatatttgtttaatagtttgatata

SEQ ID NO: 336548 - DNA, 1045 bp, Cannabis indica
ctgacaggggtacttttggccaaaaatgatcgaaaactcgacggactatgtcaaaaaatataacaagtgtcagagattttcaaaaatcctaagagctccacccttagagctcatgatgatgcagtctccttggcccttcgcaatgtgggggatagacctaattggtcaactcccaaagggaaaacgaggcctatagcatgttgttgtcgcagtagactacttcacgaaatggacataagctaaacccctggcaataattacctccaagaaggtccttaactttgtcgtaaggaacatcatttgctgaggacttcctcagaagattgtgtcagacaatggcaatcagtttaacagtgacatgttcattgatttttgcaacagacatggaaacatcaagaacttctctgtcgtgcccatcctcaagaaaatgagaaagtagaagcttttaacaaaaccctcaaggacactctgaaaaaatgccttaaggaagcaaaaggcaaccaacctgagttgctcccataggtcctatggtcacacgggactacaaagaagacgaccactgggaaaactccatttgctctaggttatggctacgaggtgatgttgcctatagagctagtgccactgtctcacaagagaataacctatgactaacaaatgaacaacaccctactggaagagagtcccttaacgaagtagaagaaagatgagaataagccaacctaaagctataagcctactagccaaaggtagcaaggcacttcagcaggaggagtgttcggacctaacaaggaaggctcctatcaagttacagagataacttataagggagcctacaagctgggaaggtacaacgagaacataaagctcgttctcctactaagatgctggaatggagtgcatcttcacaaatactacaagtaactaggttacagaactattcaaaagtagcattatacttactcaacattcgagtacaaaagcgctagtacccataaccattttggcgtggtcaaaaatcaatttaatgatctttgaactgcat

SEQ ID NO: 336549 - DNA, 757 bp, Cannabis indica
aaaattccctattttgctgatggccttgttgtccatctcgctcaaccacttgaaggctggctgagagaagtaaaattaccccgacctgccttgcttgggggtagactttaggtcgaagaaccaagtgacctcgtggggagaaggagcgccccatccctgggaagcgtagaggacgaagagagcggacaaatacttaatgcccttgggagtaatctgggctgggcagaggtcgaagaagtccgccacatcccggaagtacttgtgcaagggcatcagcgccccttgctggccgtgagccacggaccaggcgcacatccccttatcagggtttgaggcgcgattttcgtgggcgagaatgaaggagtacagctcgcccaggtacccatcctggtcgagagtgcggaggcgtgtctccgaaatcttggacagaggactcacccatctagtgcccaaggcaccctgcctcctatgaggaaccgcctcagcaagctcctcggtgacgtagtcgacgctcgccaccaggacatccccgttacgcatcaaactggttgcccaacctccattgtactccccactaacttagggggttcgaatctcctcctctccctcaacagctgaaggcctgcccgaacgcgcttcgtccagttcctcaatttcttggacttcagcatccccctcacggtcctcctcccattgggaccgccaaaatcctattcggctcgggcaggttggcaagccgagccacctggggatcaga

SEQ ID NO: 336550 - DNA, 481 bp, Cannabis indica
acactctaggcttttacaaataaaacactcttctcgcaaagaaagatatgaaaatatgagactagaagagataaaatcgtttagctactctctaggtcctatttatagaatagcaatcctagagtcaaccataaaaatgattttccaactgtacaaaactttcttaagaaaattcttgatttacagcattagaatcgggttttgcagcagcagattaggtccagaaatggaactttccaaattgaaccaacatcacgaatttggacttcaaacttgccaaataaagtttatttgatttgttctaataaagacaaaaccgaaatcatctattagaaaaagggaaagtcaagttttccaaagttagatttccataaaagaattcattctcttacaagaaatttcctaaatcaaaaagagactagttgaaaaagaatctttccttagaagaaaagagtaactaaatgcacaaaatcaatgtaat

SEQ ID NO: 336551 - DNA, 599 bp, Cannabis indica
agaggaagagggagagagaggtagctttctaggtttttctcttaatttctttctaacttaagataaaaggttcttttttttttaaattataaaacttataatcagctttaatataactcaaataagacaaaagaagtctttgccaaaagaccttttagcccctctaactaattaaaatagctacaaactcccaagggtaaattggtcatttttcaaaccccaaaaattccaacacctccaatacccaacaatgataccccgataataatattctaaacatataaatgcgactctctaagggcccaacgtcgcttcccactgcttccaaacacaacagagcaatgaggaatatatacagaatagcataactaattatatcaaactcaaacaaattttcacaatatgcataatataaataaaatttaaatcttataattaaatcctaattatttaataatccatactgttaatcttaggcggtctttactaatgcgatttttatttagaatccacacagctgtgagtatcctacttttattgggtcgagatgaacgcataattaaggatatacgataagccttatttcatggggatgcctc

SEQ ID NO: 336552 - DNA, 539 bp, Cannabis indica
atataaaaattaaataaattattcaactatttatatataataaaacttcttagttttttttgagtagcctctcaattactttattcatttttttttttttgaaaaagaaaataatctcttaagtgaaaaaactacaccatcaattacaagctcagtttattaaacttataaacttataatttggtattttgaaaatacttaattatgtatccaataacttaaaaatgttactttgtttaaaaaatacatataaaaatgtattatttttgattatatcacaattagtaaaaaaaaaatcaaattttaaaagaattacaaaaatttagcaacacgcacaaagcacggcttaattctgtagttcattaataaagtgatgatttttatttaaaaagagtgatttttaacacaacaattagcttacaaacacccccataatgtatttttcaacaccttatagtagaaaattcctactattatggaagaggttttaatggttacatttttattgtaaccatcatggttacatttttttaagccat

SEQ ID NO: 336553 - DNA, 751 bp, Cannabis indica
agaaatagggcagacctatttataaaaccgagtcagttcgagtaaaacatgacacgaaaatgtacctttttaaagtattggcacgacatagtacaatacgacctatatttatgggtcaacacgacacaactatattattacagattttttaaaatatggatcagactaatgcgacgcacgtatttagaactataattaatgtgatgtcatttatcatctcaatatattacttaaaatatacacaatccgaagaaagtaaaaaagaaagaattaaaacaatttaaaactcttcaatgctacttcaatttgctttattggtccatcgaaatcatatctcttttcaaattgtctttttctcagtctcttctccctttattctggttgttcataggcatgttatatgtccaaaattgactgtgagtcgaattagagttaaaaacatgttttatttatttatttatttattatttccatcaccatttttcttgtttttttattatgagttttttataacttaatttaactatttttttttttttcatttgcactcaacctttcaaaaatttaaattttgtaaatgaaaaattgtttccaaatatgtgattggttgtagtgtgatttaatgtttttaagttttaaagaattgaatatgtgattggttaaaaatctcaaaataaaaaagtacgtaagagaataattagagagttattaaattttatgatttaaaaacataaaaatagtattttcattt

SEQ ID NO: 336554 - DNA, 815 bp, Cannabis indica
aacaattattttactggaaaatagcttataaacaactgtttatatattaaaactctgtagcatctaattatatgcattaatatttttttttgatgcaatctgttgttgattttttgttcaaatttatcaaatttccttatcatttcctgtttttctcaatttataacacattctcaattatgtagaataaaagataggaagaggttcatgaagaaattgtattaccttaattctttctcttattcgattgtgggtgagtttcaataatgtccagatgtccttatcttcgattcctctcctctgaacgcggtgagtttttgattgtaggttgtttttgcattttttgtacaacaatggaggttgattacctttttttttcctttttgtatttagattttttgggttttgattggtttttcgttgagatccacatcttgttcagatctgatttccctagtttttgaaagaaaatggtggagatttagttgattggggtttctcggctaggtcacgaagaaggaggtctatcctccgttttttatgggttggccggtatttttgtaaatagaaatttttattttctatttatgtttatttttccttgttaggttataaatgtaaattgtttccctttttagtttattatagaaaaaatcccatatataaataccatgactcttttttttttacttgtaccagaaggcttcgtgtatatatgtataattcctttgctttatgccataattatatatatatatatatatatacatatttactcactttctaattttaactggacacaaaggcttcatgat

SEQ ID NO: 336555 - DNA, 812 bp, Cannabis indica
ctgatttagagatctagggaggaagacttagttgatagtattgcactatcaaagtggagtaactgctgtggatcaaacagagataattgctatggatcaatcaggtacgcatacctaattattatatattattattgtattctatgttatatacaaatagatcttgggtttattattaatttttctaacacattatccatggggattcattcatcaaaatagatgaaaatggtagtggcagaacccacctagcacccagagccactcacaaacaactctcttccccacataacacttttacaaagataagaaaaattacacgacatctttgcaatagacaaatcacatgtggcatatatatgaagagaatgctgacatggagtgtgactcagctactcatgccaattcagcaaaggataaggtctccaaaacttgatgaaatggtccctgcacaaattcaaaatcagtagcatatatatttgcctttttgttttactatattgtgttggatgaaattgtataatgttttgtaaattatggagctgtccttgcaaggccattctggtgcaaaacaatttcgaatattctctattaagaatagtcataaaaaatgtgtatatttaatatagcctatcgtagcatagcatttatccagttttgtttttatatctatacttatggttcgtttggtacaccgtattgtattgtactatatttaattgtattttataccatatttttatgtaaaactataagtggtattaacttttataggtacttaaatatataatattttagtataaattaaagtt

SEQ ID NO: 336556 - DNA, 571 bp, Cannabis indica
ctttctgtagtagagaaattagatctgaacctagatcttctctccttcagtttggttaaccacaatcttatacactatgattgagtacttaacttgctatgagtgggcatggtactctatcactaaaggctcaaaatttatgaagaacaatagaaggaatacaaaatcactatagaaggagctctcatttactagttgtccgacaaagaatgaaaactaggtttagataggttggaggagaatgagagcatcttattccttttatagtatttcaaccagggtttaaaatttaattatatggattagaaaaagataaaataataggcaaaataacactaagtggccggccacataagtgtccctcactagttacaattttgtcactttatttcataattcatctttcctttcaataatgccatattttccaattttaatcctatgaatatcaaaactatttatttaataattataattaattatcaaataaaatttgcatttaccttatttattaattagaccttacaaagtctctctattgacaaataaactctaaaacctcttttcttca

SEQ ID NO: 336557 - DNA, 730 bp, Cannabis indica
ctcccagctgcaaaacaaaaaaaagaataagcgagcaaatagtactacttatgataaggtgattcaagattagtgagcagaaatagtcaccatcttgaggagggatattagagaacattgtccaacatggattaaatgtaaaagtattgagtaatatataagaacatgagctactccactcatcaccaattggttttgagatgaaaccccatgattctcaacacctctctagttttgttttttttgtttttttttttattaggttactaatagtgtagctcactcattaacaaaattagctttttctttgaataatcattgtttgtggtctgactatcttagttgtattaatgcctctttgcaagctgactctcttactgattattgacattgtttaagcactctttttcctcttgcggtttcttcacttttcctcttgagatttctcccagtaggtttactaaaaatattttaatagggatgttcatcaaatcaaaaacccgcagtttaaatccagactgtgacaatccaaatcgttgtagatggtaactaaaaaaattattttttgtggtccgggtaatttggaccgtttaccgtataatggttcggttgcggttcgtaataaataattaacggttaaactaaactagaccgtttataataaataaatgatttatatttatacatatattttttatatatgactattgttggattttatgccttaaat

SEQ ID NO: 336558 - DNA, 1225 bp, Cannabis indica
aaaattatttttgaaaattaaaaactacattttgatgttttctattttctagtttttaaaaatttggccaaacgactcctattagtatttaaaaattattttctaattttaaaagtcaaaaacaacttttaagttatgaagccaaacaaccccatagtgttcaggaattcagtctaatttctcaaatcaagcttctatttatataagttaaaaccctttaattaaatcacatttaattatttaaataaataaacatctataatcgaattcgattactgatatttatgagagaatctctcaactacttgagagaatatctcaacaactttaaaatatttgtaatcacttttcaaattagatattcatctaattgaattaattaattaacccaaaaaagaaaaaatctatagggacgcgcctacccttgtctatttaggacaatgatggtgtattttgtcttgacaacttttatctcaacaaaacttgtcttaacaaattatatcttaataatttttgtcttttccttatttaattaatttgtaaaaattatttatttattacaaaatcaaatatttactataattctttatccctacccttgacagtattttaaagtggcgattcatggaccatgaatctataattctaagctccaataaactagattatttattaagctcattaatcaaataatctttgtttattaattacatgattactccattaaaaatatagaattgaactcttagtaattataaaattatatttattgagttttattgcagtatccattgatataataaattctagtgattagccttccatgtgttggttcataattagtttcgatcaaattactgttttacccttttaattactttttttatcctttagtaccattaatttactagtggaagcataatttaaatcccatctaaattgtacacaacattccagttctagattaacacttaaaaggaaccaacatttgatttgttaggaaagttaagattctataattgtaaatcatgttctcagtcatccacattattagctttccaaaaaaaaagttgtaagaatcatttctttgagaaacattaacgagtgaatcaaagaaactaataacatgaacaagagtttatgattacacaggatttagaccgatctactattgaccattgttatgatatgaattaggttttatgataaacgatatgttaataaa

SEQ ID NO: 336559 - DNA, 1042 bp, Cannabis indica
tacttactaatttgaagcttttgtatctgctcggatgggtgctaacgagagtattttggaaattcttcaaagaaattgagagtgaaaaagttctttgctctagttcttcaagaatgagaataaataaagtgagtaattagggttttcaatcctatttataagcagatcgaaagggaggagtaatcatttcaaattttaaatatctcgaattccccccaaaagtgtacattatatactaacactactggtaggaaaacagtcttcacacgagaaccttaagacgcaattcgaggtaaaactatcaatcaacattaatgtgctgaaattgaagagacccttggttagggtcacatcgattcatcaatcgacacctaggaaacgcgtcacctatcctaataagactcttcatcgagtgaagtccacgtgcgactaggcaggtcccgcgtcgactttgggggcaaatgttatctagctttttgcacattgacgtggcaagaggaccgagcaacacatgtctcagatttttgatacctgggcagaggtaaatgtcccaaacaacctgcatattatacatcagcatctacaattgtcgattacctaaccagggtggaagacagaacatctgaccaggtagaagtctgcgatgcactacttaaaaggagttaattacttcaggatgatctggtaatgcccagacacgaagacaatccctacaatcgtgggattgaatcagagaaatatgggaacttgttctagtttcatattttgtgtattgtaattatgtaatctttgtaatatcctattttacgcattgtaagaaaaagggaaaccatccctcacgcattaagttcctataaatagtggcctagcctcaccatgaaagggatcgaaggaattgcttcaaggggagattctagagagaaaatagtgatctaagagaattactcagagatcaattgtaagagcttttagagaggaaaacactgttggaaattattttacctggatctagatttactaacaagtatgttggattaacaac

SEQ ID NO: 336560 - DNA, 1358 bp, Cannabis indica
tacatcttggtggtacctgaatgtaatgaatcgggtggtatgagcttcatccagaatctcctttctaaattccacattatttaggacacaaactcaggttttgtaaagtaacaccccgttagctgatactgagaagtctatagcttggctagctaagacttcttcttaaacccttaccaattttggatccaccaactaagcagctttaattttttctaacaagtctgattgtaatgtcaaattactaagttttccaaccacaaattcaatacctgatttgaccatgtcatctgccaactggggtgagatgataatcgtgctaaatatctgctcgagatctttcctgcttagggcatctgccaccatattggccttcccgagatgataaagaatctcacagccataatctttagctagttccaaccaccgcctctatctcatattcaaatctttttgagtaaaggaatatttgaggctcttgtgatcggcataaattttacacttttctccgtctaaagatagtgtcgccaaatcttcaacgcgaaaatcactgcaacaagctctaaatcatgagttgggtatcactgctgatactccttcaactagtgagaagcataagcaataaccctatcagattacatcagaatgcatcccagaccttgtttggatgcatcacaataaactataaacttttcctaatctgacagtaatgctaatactggagttgtgatcaatcgctgcttcaactcttggaaactagattcacacttgtccatccatacaaaccgctgattctctttagttaattatgtcaagtgcattgatatcttggagaacctttctaagaatcatcggtagtacccagctaaatctagaaagcttctgacctcggtaactgtttttggccttggccaatctctgatgaattcaatctttcctggatcaaccatgatcccatccttactaataatgtgccttaaaaaggacactcgggatagccaaaattcacacttcttaaatttggcgtaaagtttatgttcccataatcactgtaaaaccattcatagatgttgctcatgttctacttctaactgagagtacacaagaatatcatcgataaatactataatatagatatcgaggaaatccgtaaataccctattcatcaaattcataaaagctactggcgcatcggttagtccaaaagacataacagaaaatctaacaatctcaatagttcaggaaaaatttttaacggccaaaaaagttcagggggcatgatttggtacatgtcaaagttcggaggaaaaaaatcttaattagccaatatttaaaattccgtaaaactatatttttgt

SEQ ID NO: 336561 - DNA, 675 bp, Cannabis indica
ctgcatcaggatatcgttttggccatggacctacatttgtcactaagttactcctctaatagagcctaattatgcacatatgcaagcaattagtatatgaattatatatactaactcattagtagtactcaattaaggattaatatatacttactatcttttcggcaatttccttgttgtaatcagtgacaagttttgttctcttggtctgagatttgatccaaacacggtggcgtggcggatcttgaacatcgaggtcctttttttacattactttataaaagttaaatgagcacaattacattttaaagcacattattagaaatcattgattacttaccatatcttcccttgcgttcattattccactctgaccactttgatgtttggattggatttttgtcgaacgttccctttgcaccttactcaattcctacaatgccgaaaaaatacattagaaacatgcacttgtttttaaaagttatcttagtacaaatataattagcgtacttgaaattcaggacttagtcgaatttcaacaaatttcaaccaatcagtaaagtcaattttcgaaagcttttcagggacttgtgccagtcgttgcacatctttttcttctaatgtgggcattataacatcttttatcattctattcttgaagtctttcattaactt

SEQ ID NO: 336562 - DNA, 1782 bp, Cannabis indica
agctgtgcaatcccacatcgcctggggaaggtcaagtgtgatgattctgaggctgtgttgaccgacaccattaacctggttggaattgttgggtatgacttctcctaatgaattactagaaagggtctgcccataggcggaacctgtgatcggggatttggcggctgaccatttatagtgtgagaggtattcatcgctggatctttgtctgttttgccccaaggaatgacattcgcgggttgatgcccgaaaatttgataggcttttcatatcaacacagtggcttgccgactacgattgtcagtgactgcatgctgagcccttaacgcttccatctctttgtccttccattcggaaatcatgcgcctttgctcttcaaatgtgaggtttactacagcacggagttcctcctgatcatgatgtagggtgttggtatgaccctgcatgtgtccaagagcagcatggaggttctggatctcagtgtcactccaagagttgtttgaacattgatagcaggcggaacgacttagctatgaatcccctggtgagctgctgaacttgtattcccagtctcttgtacaccaggcgcgatttcatctataggagtcatcacaacgtgacccgcagttgatggttatccgggatttacggctggtggaacccttgtgttccctttgttctgcagtgcaggatccaccgcctgtcgatttgttggatcaaccacgcccctaggagtctgcaccaccatcgtacttgtgattaagtttggaataaagagcgattcttgagttcaactctcaatgaaaacactaaaatgttgacctcgcttttagccaacgacagtgagtttaattctataagcgtcaagtagtttaatacgactgaaatatagtaaatcaataaagacacaagaattttatagaggttcagcctcggacagttcagtaatagccaaatcctcgttatttgtattgacttaagaacaagtagaataattccttttcttagagctcttacaacagtatctctaaataagaattcttagacaaaatctttcgaccttttgcccagtgaacatgagtcactatttatagggctataagcttggagaggaagtatttcccttctcattacaattgatataagcagaaagattacatagtaaatacagattacactgatcgtgggatttggacagcttgccatatctctgtaatcacatcccaaagttatagggatttccttgatgactcacgatgcgaaagctgaatttgctaagtgttggcgttctgtgcggattgctcactgctcggcttagaggacttcgtctgcccaaatgtgtgaggtgtcctgctgggctcgtgtcttgtgagcagatacccggagtcgattccacgtgtcaccatcgagtgatgccacgtcagagtgcaaaaattgggatagcagtaatcattcctttacatttgtttacttacattattaaaattaggaaagggacaacttgattaaataagggagaaaagaaagggataacttccttcacctattttgtaaggaatgtcatcaagggtaatgaattttaattatttttatttgattttttaatattaaatatataatgacaattttgttctttaaaatatatcttacaaaattactaccatataatatagtttaactcaaaagggcaatttcgtcaatttaaccattccgattacgtttcttaataaagtaaacaaaataaatcacaactattccatttctaaaaaaatttagtaaaca

SEQ ID NO: 336563 - DNA, 1214 bp, Cannabis indica
tcccataacatagcttaattatgtgccgaagcctaataagaaacttgtactagagacaactaattatgtcgctatatttattaattattggaaaatttgaatttatatgcatacaattggttgatattaaatttttgaacaaaagcttaaccaaaattaaaaaataatgcacactttatattaatactcataatacccttctcccgtctcttctcttctaacctcaccatccatactcactatttccatccatagtgatggtggtccgatgggtgttcgatggtggcccgatgccaccgtttttttttttttttttgtaaatttttatatgttttcgtacataaaaaatggtaacatcaggccaccattctacatttagagatgttaagctccatttattaagctcgcttggaagacatcgggccatcatcagaccatatcattgggccactatcggaccaccatcagactttcgtttacaacttttaatcattttaacaataggaaggcatcgggctaccatcagaccaccatcgcactatcatcgaacgatatcatcgggccaccatcggaccttcgtcttcaatctttactcattttaacaacaggaaggcaccgagcaaccattagaccaccatcgggcttggcagaaaaagtaattttttgcccaaaactcagatccggccgtttttgaccctaaatctaacatctactcacagataacaaacattaatcacataatttattcctttgacaaaattgtcaatgaagaaaccgtggttgatggagaagtcgttggatatgcgttagtgagtcattgggtttgtggtcgtggagagaaagaattgagattgtgagtggtgggttgtgggtcgagtccttaaggtgagttcgagaacgagagagagaagggaagaatagagagaatcaagatctcctaataaaaagttgtgtgtcatactgtgttaaaccaatctaagtttgacatgtcaattaatttttcatttattaaaaaattaaccatctatacaacttttttttttctttaaaatgctcaaattaattgatgtgttacaatgagattggtttgatacactatgaaatacaatcttttaccttaagatcttgatttgaatagagagggtaggcgtttggttgggaggaatgaaaatataagaattggaatgggaatgggaataggaatggaatggaat

SEQ ID NO: 336564 - DNA, 728 bp, Cannabis indica
taagaaaagaagaaagtttgaaatagagttttctcttggaaattctctctctttctttcggctgagacaaagcaagggcaaggaccaacttttctcttccatttctctgggatttagcaaggattcaaggtttttgcaagtaaggtaaaccctagaaacccttatgtcttgagtttatgagttttagttgagttttcttttgtttcaagctatgattttgcttgtaaggggctgttaggtttaggtttgcttagggtttgaattctagacttaatttgagttggttaagagtcctagcagctggttttagtgtgtggtgttgattttatgcaattttaagctttgagttcaaagctttggtctttaatggcaagttgagtttcaatggtttgttctgtgattttctggctggaatgtattgtgtatatccttattaggtactatggaaagttttattgcatttggtggagaattgagcaaggaatgagaggctttgggaactctggtgcaaaccggctagccggcttgcagagcctaaaaaaccggctagccggttttggcagggttccctgggcctttcattttctcaatttttgtctttgcagtgccttggttgggtgtttccccattcccagagttagaataacctatagatagtataacagaacctagggttaaggtttcgggtttcccgggattagggtttaatcatgtaacttacccgattt

SEQ ID NO: 336565 - DNA, 528 bp, Cannabis indica
gttctcatactaatatgaaaattctatgggtaacgagttactagtacgtttcacatgcagatagttataatttcaaattctacttgtagagtggagttatttaattggaattattcacaaatattcaaatatcacaaaaagttttaagaaaataatgatttctaatatttttaattttattacgaaattctctagaaaagaatttttattttcacaatagtacttttggtaacacttttatttttaaactttttaatcacaacaataaaagtaaaatttttgtttttaaaattttgatttttttttaaaaaaatgtgccatcacttttatttttcaattttaaaaacaaaaaacaaaaatgtgttttgtgaatttcattttcatcttcatttgttgattttatttaagttgggtttgggtccgaagttaggattgggggtgagtctggattcggggtcgggatcaggtcggagtctgggttctaaggtctagattggagttagagttcaaaatattgattaagaaaaa

SEQ ID NO: 336566 - DNA, 625 bp, Cannabis indica
tcttactgaaatcggttggcacaatttccaaggccaactttgccaaccgatcaaattgtgtagtgtattccgtcacactcatattctctctctcggtcagttgtgcgaacgcttttctcttggcacttctaacggcctcattgtaatatttcgctttgaagagttcctggaacctttaccaggtcatagttgtgacgtcgtgaatctgggacaccatgtcccaccagagtaaggcatcttcttgaaactggaaggtggcacacaccaccctttcattcccggtgacacccataaagttcaatattttggtgatcaccgttagccactgttcggctttcatgacatccggacctcccagaaaaatcggaggtgcctgcttctggaacctttcatagaggggttccattctgttcgccgctaccactatctcggcctgagcaataagggcaggtgccactggaacttctggcaccggcattgcaggagcaccctgctacctcaatctctgaatttcctgatcttgctcctctattctggcttgcatttcagcaaacctagtctcgcaattctgggcttcttgattggctttggcagcctggtcagcctgtggcgggttatcatcacc

SEQ ID NO: 336567 - DNA, 846 bp, Cannabis indica
atctggtctcgcatttgaacaacttcaacacaataatgtgagctagtaatgtgacaaacaatttacgctgtatcttgtttcccacctcgctagttagagcagcaagcaactgcttcaacaagtttaatcaccattcaataacttcctgggaacaactgtccagggatttcaagaaatagttccaggctgcaagggatagacaacccgaagtggcctcgctaaccaatataaagcaacagcccagcgagacacttagggcatacttaagtcattttagcacagctgctgcaagggttagaaatttggatgatagtacacaacttacagtcctttaggcgggaatctctactgattcatgaaccactgggggcgagcagtgggacgacttacaaggtcttccagtgagaaacatcactgagttcaacgaaagggctcaggtgttcgttcgaaaagaggaagctcgaaaagaaatgaatttgttgaaaacaagctcgggaggcaaacccagcaatgtttcgacaagtattgtctcaacgagagttgataactcgggggcttctagctcgaagagaaaggacggttctaaggaaccgtcaaaggataaaaagaaacagaagaagcacgataagtacatgctagtgtatactatttataccgagcttaatgaaacttgggagaatatttacctcgcacatgagcaaaaggttgccttcggcaagcctgagcccatgaggcatgcgaggaacaaaagagatcctaacatgtattataaataccataaggacattgggcacacgaccgacgaatgccgctagctgaaagatgagatagaaagtctcatcgctc

SEQ ID NO: 336568 - DNA, 644 bp, Cannabis indica
atgttagaatttattggggtcacaattgtatatataaaatgtgtgttgggtcatcaaataaataagtcaaatttatgtggtctattttggaataaagtttatgacttaagggcatgattgttatgattttaatatgtggataccataaggacaatttctaatttgatgaggggccaaataaaattgtcaataattattaccaacagttttgtctgttggtaatataaacggtaatggtccccaatttgcagtatcgtatcttttcattttcttgaaaccccatcatcaagagacaaagtttacagagaaagaactcactgcaaattggaagatcataccaattaaagatcatttaaaggtcgattctatggactccggtacgcttccgctattccttaatcttattgtttaattctcatgaattaattagggctatatacagatttacgatatttttaacaggggtctttgacctgttttaaaattcaaaaattttccgacgtgtacactaacaaattcctaatatttggccttgtagaattcttttaaatgtcacgttcggctctgtgatctcttaaaggtccttcgttatatctatattttttaggcccaaacgtgaagatggtgtattagagttagtctca

SEQ ID NO: 336569 - DNA, 1072 bp, Cannabis indica
agggtctcaatggcttggctcgaggaagcattagcgggggtcgcctcggggcgaggagcattgccgtcgggaatagctagaagaggaacttgctctttgatctcgttgtccgaaaccttgagatcgatgggctcgaccagtggtttcttcttacggacggtggttttcctttgcctcttgggaggaattacctcgacaggagtaggaactccagggttggatgtccttttcttccgcttactgtccatgatgtcttcaaaacccatgtctacaaaacaagacgaggcattacaataattataaaggccgattaaaaaagggagaggagaataattttcctcctaagggatttaccaaaataactagaaggcgagttgtcactagaagaaggggtagaaggaccataatattcgctaaaatccgtacaccatgtaatttttaatatatcataaggctcgattggctctaaatcccagctcgcatatatgtcacctaccctatcttccattgtaccgtatttctcggctataccataaaatgacttgtgacagctaatctggatgtggaatctaggatattaactgtcaaacttatgagcaatgcggtccacaagaatgaaattccaaatataataattaagacatgagtcctggacggtaactaatgtattacgctgagccctaagtactgtaggagaccagccacattggttacctcgggatgctccttcaccagattcccgaggggcagtcatttgaaggtattgttcttgggccaagcgatcccaggccttgtcctcagctggaacaattatttgctgccaagaataatacttgggaaacttgtaatcgcaagtatattcatgatcagcgagaaggcccacggatcgcaagttaacttcgttcaatatgtagttgcatgaccgaaggccgtagggaagagttaacaagcgcctgttcctactaagtataccgggtgtaggagtaggtctcatcaaaagagctgtttagacaaacaacacagtagtcaaaaaacttgaaaaaggagactgatgtaaacaagtaagaagaga

SEQ ID NO: 336570 - DNA, 1428 bp, Cannabis indica
ggtagttgttatacccaaaattcggttgtactttagaaggtgacacttgttaatctcagagaatatgaatcaagaaatataatggtaattgtatctgttgacctcacttttagccaacggctgtgagtctaatttagtaagcgacaagtagtttataacaattgaaagataataaagcaataaaaagacacaagaattttatagaggttcagtcccgaacagttcggtaatagcctaatcctcattatttgtattgactaaagaacaaggagaaaggttccttttcttatagctcttacaacaatatctctgaatatgaattcttagataatatcacaccagtaaaatctttcaacccttttcccagtgaacatacatcactatttatagggctatgagcttggagaggaagtatttcccttctcgttacaatggatataagtagaaagattgcataataaatacaaaatatactgatcatgggatttagacagcttgtcatatctctgcaatctgatccttaagttatagggacttctttgatgactcacgatgcgaaagctgaatttgctaagtgttggttgctctgtgcggattggtgattgctctgcctcgagcatacataagaggtaccccgttcggactatatcttgtaggtagatactcagagtcgattccacgtgtcaacatcatgtgatgccacgtcagagtgcaaaaattgggttaacattttccccccaagcttgtacgagattttcgaggttgcgtatagacttcatccaagctgcttttgcatttggatgtgtgacacgtgtcaagcacgtctgttcgcgactcgatgtgaaactgactgggcgtcccttcagttttccgctaataaatgctctgacaattaatatttcaaaatttgattttctctcaccacgattgacagctacacttgattacttttgatttcccatattcacttttagggcagaaccgaggcgtccaaggtttttttgaaatgattaccccttttcgttatttgcctataaataacagtgagcatttgtccacaaactcattttcaccaaccttgctaagtaagaactctgcgatttttggcttcaagcttgctgaagtgctttcatcaaaactgctcttttggcttgacgaaacttgaaactagacgcttgattcgttgagtaagttctcgatttcctttatgttagctatgcacaattactttcttaatgcactttcaatttcgctgtagaagagatgtagaaaacgtaagtttaggaactctgcgattttccttagtcacggttcatgcaatttcatcgtccgtgctgcttatcttttgaactgcataatgcctgtctttcatcctgctaattctaagcttcatgagattttcttgccctaactcgcgaaaatttcaaa

SEQ ID NO: 336571 - DNA, 759 bp, Cannabis indica
tttgcgctaaagatttggcggctttacctatattgacgtgaaatgtgagatatacactaatcataaaagtctgaaatacttctttacccagagagatttgaatatgagacagaggccctggctagagttggtgaaggattatgattgggagatcctttatcaacctggtaaagccaacgtggttgctgatgccttgagcaggaagggtcagagtcggataaatactatgaaacaaatctcccaacagctagcagatgagatgactcgagctaaaattgagttggttgtaaggcttttggctaatattaccctgcaaactactcttttagagcgaatcaaagaagtacaaatgcaagacccggagttggtaaaaacccgagatagggtttcgactggaaaggctagtgatttctcagtggatgaaatgggaattgcgattcgggaatcgtatttgtgtgcctatggatgatcgtatcaaaagagagattatggatgagtctcatacgactccttactcatatcatccagggtcacgtggccaggcatgtagaatgacattcctgagtatgttgcaaaatgtcttacttgtcagcaagttaacgctgaacgtcagaggcttgcagggttgttgtagccactgaacataccagagtggaaatgggaagatattgctatggacttcgtggtaggttttcctagaaccacggcacagtttgactttgtgtgggtcatagtggacaggtttacaaagtcagcgca

SEQ ID NO: 336572 - DNA, 593 bp, Cannabis indica
gtatgacatggtttctttgtttttctggttacatgtttctcttttaatggtcaggtgttagggttgtttgtgttaggcaggcggtttcttgtttgtcgggttcttgggggttgggttcttggttgtcgggttcttggttgttggagttttggttgacgagtttttttgttttcttggttgtggaggggctattttttgtggctggccggttattgtgggtgtggtgtgggggttgtgtgtgttggttcttggttcataaatatggcatcgacaagttggcacaatggcgatacagaggaagacatattgcagtttcagattgaggaggaggatcttgaggaggttgccgtgattacagggggaggagatgatggaattgatgacagatggtgtttggttggaaggtttttgtctaatcgggtgattgattttgagaagatgcaaaatattttggcttcattatggcagccaggtatgggcatgtttgtcaaacagttggagaataataagtttcttttccaattttatcatgaagtagatattcaaagggtcatcaatgggagtcccttgtaacaccctaactatcttaggcg

SEQ ID NO: 336573 - DNA, 571 bp, Cannabis indica
ataatatcatatagtttggtgttgcgaaattcactcgacaacatttggcgccgtctgtgggaaacgagaactaagatcttattcatttcaagaaaaataccatcatggctggaaatcaaacaaatggaggagctaacaacgggtccatcaacattgggatgatgaacgtaccattatccggagctggaatgccgcttgtggacgtcgttaatggcggagtagggaggagcaacatcagacctctcaacctgttcccagaaacaactgaccctcaagtcggggatacatccacaccaccagcaaccatgcattttccccccgtcactccggcagtggtatccaagggaatcatccagctcaccactgatcaatatactgcgattcaggaccaactgcgtgcactacaggccgaagtggatggacagaaccgggcccgatgaccccctcgagtctctactactcgcacggacaaccctcaggtaacaaattctagacgtcatactaaccgtgtacgcagggaacgaagaaccaaccccgaaagttttgacctgaaccatccaacatcgaggga

SEQ ID NO: 336574 - DNA, 626 bp, Cannabis indica
ttttcttaagagattccatctcttcatccattgctcctttccatttcctgaaatttggtcctttaatggcctcttcataagactgaggttcattattgaccatttccaattcactcataaaggcatatgcaatgtcttcatccaagatattaaaactgtacttaggattaggctttggtacccttctgcctttgtccctgaccaattggtaatcccccaagtcttcttgagtccctttatcaataaggccagtgttatcatcatcaggttccacctgaacctggtccccaggttccacctgaacctgctcttcctgattctgtccatcaggtgtgttctctgtgttgttccacctgaatagatccagttctgtcctcagtattgctacctgcattgttagtctcttttgtacctgcactagggttagatgtaataggcaaacaaggaaaaacatcttccctaaatattacatccctgctattaatagttttgaaacctctttgttccgaaacccaaagcctataacctttaactccctcaggataccctagaaaaacacatttcatagctctaggttctaatttcccaacattttggtgtgtatatgctgcacaaccaaatactct

SEQ ID NO: 336575 - DNA, 893 bp, Cannabis indica
tacaatcccttgttctatggggggcgggatgttggaagagctttatgtgatttgggtgcaagcatcaacctcatgcctatgtcgatttttaagaagttgggtattggtgaagcacgtcctacaactattacattgcaacttgctgacaggtccatggcccatccgaaaggaaaaatagaagatgttctagtacaggttgacaagttcatttttacagctgatttcatcatcctagactatgaagctgatttcatcatccgttatttgcacgcacaagatacttttagaagctggttgagcaattctgttgagcatcagcgaagattgaatcccgtcatgaaagaagtggtgcgaaaagaagtgatcaagtggctagattatggtattgtgtacccaatttcggatagctcatgggttagtcctgttcaatgtgtgcccaagaaaggaggagtcacggtggtggctaatgcaaacaatgagttgattcctactcgaaccgtgaccggttggagggtgtgtatggactaccggaagctaaacaatgctactcggaaggatcatttcccgctgccatttattgaccaaatgttggatcgtttggcgggaaaagagttttattgctttcttgacggatattcgggttacaatcagatttctatagcaccggaagatcaagagaaaaccaccttcacttgtccatatggtacctttgcctttaggaggatgccatttggattgtgcaatgctcccgcgactttccaaaggtgtatgatggctattttctcggatatggctgaaagtattttggagatattcatggatgacttctctatctacggggattcatttggggtgtgtttggagaatttggaaagagtgttagcaagatgtga

SEQ ID NO: 336576 - DNA, 608 bp, Cannabis indica
gttttgagattttgggatgcgaacctttatttctacctgaattgatatcagactgacgagattttgcagatcgattcatggcccaatcttctttcactcttcctctggttggtgacggtgctatggaacgtttacgctcacgcaaacagaagactaggacgactcctagtgttgagaaggaggctgttactactgctgctccttcttgtccttctgtgagggctcagaaagaagaataacaagagaccgtctccggttgagtcgaccgattagttgagtaatacagttgatctttcttttccatcttcagcggctgcgcattctgagtttggcctacaccttggtgaggccagtaagctattatttccagaggatcgagctcgttttgagaacatcggagaaatagcttccatggagctgtccatctctcgctcctttcaggtatgcatgcattcccatgttacaatttatgtgtggacaaactcgcgatattattgtgtctgactattatggtactttatattgcatgacagggtatgcaagggcttatgtacgccttggataagatcaagaacatgaaggagcaaatgaaggacatgaggactgag

SEQ ID NO: 336577 - DNA, 1065 bp, Cannabis indica
gtattttatccttaaaacttttagctacctataaatgatactttagtaaactaatataattattgaaatgaggcctcaatcatttatctctattcagccaagctcaaaagaaatcatcgtttcacttctaaatacttataaaagctatagattctatatctatgatcaacgctcccactcaattgaactaccatgttctcaagatgtaaatatacgccagaaccatatgttagtttccacgaacaacttgaagaacataaatatcatgccaaaaatttagctggtacttcaaaggatgacatgtgtcaaccttggagaatgcaaatcaacaaatatattggcaattatattaaagaatactaaatggaataactcattaaatgcaaagtcaatacggtatgtttataactcgtagattgcacagtctttagcgagacaagaatatatgaactattgattcacgtattgaggaaaaaccattttgcgtcaaaggacacagttgtaaggaggacatccataatacgtagcgagacatctacctcgcgatacgtagagaagtgatggcgagatgtgttggctgttagaacacttagcgtataatatacattatactaactaagtgtaacaacctgaagacatgaatagagattagcgagacatccatcttgctatgggaagggatactcctggtacgttcaccaatcaactccagacatctttcattgggctccactgctccgtcacatcagctctctcataagaaagctgacattcaaatgatgttggctactaaagtccatcttggcaccaagaactatgattttcagatggagcgttatgttttcaacctcaaaaagacatgagaagagctttagctcgctgccagggttattgttgctattgagtgttcaagcacctagcgagatgccccgacgagatacactttgcaacgtgtcttaaaccacgtcaatgtctactcattaaaagcggtttaaatcggagctttgtgattttcaaataataaactgcatttatttacatggagcgtaattaaggcccacaatt

SEQ ID NO: 336578 - DNA, 602 bp, Cannabis indica
gtaatgggttttatttagggcacaaaacccaacaatatatttggaatggatttgttgtccaactactcagctagtattgattgtaaatggaagatggtgattttctaactcgagggcgaggaatcgtttgtatttgtgggatcagtttagggatcttggattatagtgatctcggtattaaaagctagagatttgttataagaaggatgcttagggattctagcagtgttattggataccatacgacctgagacagtttggccagaggatatcggggtggtttaggaatttttagatatttttcttgatgaacttccaagtttaccactgcagcgagatatagatcttgttattgatttagcacctggagcagaaccagtttttaaggtattgtacagaatggctccagctgagcttaaggaattgaacattcaacttcaatgaatgcgtggcctagggttttcacgacctagtgggtcaccctgggtagctcccgtgttatttgttaagaagaaagacggatcccaacgcatgtgaattgactaacaagaactaaataaattgactattaaaaataaatatcctttacctaggatcgacga

SEQ ID NO: 336579 - DNA, 772 bp, Cannabis indica
ttaatacactttttaggggtcggaaggaatgaggactgttagtccctcctccattcgagaatcgaaactccctttctaagaaactgattggctgggaagaaaattctaaagttccattacggattttcccggaatattttagctggagagagaaagtacacaacttaaagaaccagactctggaatttttttttttttttaaaaaaaaatgtatttttctattatttttttgtttttatttttgagaaactaattagattaatcaatctttactggccaaaactaagatcaaatcctcaatctcagcttctatgtacaaatactaatttagtgataaagaagaaagagtactgaaattattaatattattattatttacataataataattttcaaaacaaaaataaataaagaaatttttttaatttaaatggttatagttataaatctcagacttttatgaacaataatactaaactaatggatggagtaagaagagaattccatctagtatatattatacaagtgtatactgtagatatttaataaattttgagaaatttaaaattatttacaatataaaattcagctttcaaaaatttatttcacgcgcttataaaataaaaaagttaagcgtgcaataaattctttaaattttattttcgacacattaaaagcatatttggtattattttttatttttttgtttttaaaaagtatttttaaaaatgtagaataaaaattatttatgaagttttcaaaatacaagtca

SEQ ID NO: 336580 - DNA, 526 bp, Cannabis indica
ctatcgtgggttgcgatctcctccatgattctttgttctcctccgatttctttgcttctcttctggtgtgattatcattcttcatcttattcttcatgttcctaatgtcgatgaagaaaatcaataaaatctgaagtcaaaatagacaaaagtaagaaactattgattttgattacattcttaacgtagttaacatgttctttggggaaaatgataaggaaatttaattttaggttttcattttagttctcatagtaatgtgttgtgctaattgtaatttttaacaaaaaactctcatatcttgaaaaagttcaccttgtagttcaatcttagggttttatattgcttctgaaagtaacttaataccttacatttgaatatggcctgataccttacatttgaatatggttgtatttgttttgttgtggctacaatttataacaaaaaaattgtcttcaaaaaatcacctgttagttcaatcttagggttttatattgcttcagaaagtaacctggtactttacttt

SEQ ID NO: 336581 - DNA, 776 bp, Cannabis indica
ccatagagataatgccgccaaaatgatgtgaggtatatgcgatgactcgatcggcctgcatcagtacacaccccagacgatatctggatgtatcacaataaactacaaacttttcttcatcagaaggtagggctaacactaaagctgtgattaatctctgttttagctcctgaaagcttgcttcacacttgtccgtccacacaaactgctaattctttatagtaagctcggttaagggtgttgaaatcttagagaacccctctacatattgacgataataacaagccagacctaagaaacttctaacttctgtaactgttttcggtattggccaatctctgatggattcaatcttcccttgatccaccttgatcccatctttagtaacaatgagttctagaaaagacacctgagatagccaaaacttgcatttctggaatttggcatacaacttatgttctcgaagtcgctgtagaaccatccaaagatgttgctcatgctcctcttctgattgacagtacacaaggatgtcgttgataaatacaataacacaaatatcaaggaaatcattaaataccctattcatcaggtgcataaaagatgcgggagtattggttagtacaatagatataaccagaaattcataatgcccatacctagtgcggaaaactacctttgggatgtcctcctctcggattctcaactaatgataaccccgatcggagatcaatctttgaaaagattgtcttcccctaaagctgatcgaaaagatcatc

SEQ ID NO: 336582 - DNA, 760 bp, Cannabis indica
ttcctatagcactctggaagctacttattgtaggagaattcaattaaaggcaagtacttactccatgaaccctcaaagtccatgacacaggctcgcagtaaatcttctaaaatctgaatagttctttctgactgaccatcagtctgagggtgaaaggctgtgctaaactttaacttggtacccatagccttctgaagactcacccaaaactttgatgtgaactttggattcctgtctgacacaataaatttaggggctttatggaaataaacgatccccttgcatacaactcagcctactaatccactgaatatgtagctttcactagtagaaagtgagctgattctgcaaatccgtccactatgccccttactgaatcatacattcccgtagttctaggtattccaattataaaatccattgcaatgtcctcccacttccactcaggaaggactaaagattgcaataaccctgccggcctcaggtgttcagctttagttgctggcaggttaaacacttgaacacataatccaccacttttcttttcatctcataccaccaaaaataggattttaaatcctgacacattttggtggttcctggatgcaatggataaggtgtggcatgaacttcttcaagcaccttcttcttgacctcttcaacattagaagcacaaactcaaactttaaatatcaacattccactgttcgaaactaaaaagtctttaagtcaaccgaccattacatggtctcgaacttca

SEQ ID NO: 336583 - DNA, 1337 bp, Cannabis indica
ggaccttgcagaatgctttgaaatattaaagaagtataatatgaagcttaacccaaaaaaatgttcctatggagtttcctcaggaaaatttctaggatttatagtcaacgcgaggggcattgaagcaaatcctgagaaaatcaaggctttgatatatatgccatcaccaacaaagcctaaggaattccaagccctaacaggaaggatggctgcaattaatagattcattttgaagtcgactagtcagtgtttgctatttttcaatgtattgcgaggcaacaagaaattcgagtggatagaagaatgcgaggaggccttttagaacattaaaaggcatttggtgatgcctccagttttagcgaaatcagtaactggagaaacgttactcctctatatggcaatctcggaagacgcaattagtgtagctatagtgcgagaagagggaaagcaccagcaacctatttactatgtcagtaaaaggttactggggacagagtcaagatatccgcctcttgaaaacttgctttatgccttatccacgcatctctcaagttacggccttacttccaagcacacccaataaaatttttaattgatcaacccttgagacaagttttatcaaaaccagatgcttctggaagattgataaaatggtcaattaagctagggcagtttcacataacttatcactctcgaacatccatcaagggcaaagctttggcaaacttcttaatagaaggaataactccagaggaaaatctacttgctcaccgagacgcggacatttggaagttattcgtagatggtgcatttaatgagcagggctcaggtgcaggggtaatattaatttcgccagaaggctttaagtttcattatgctttgagattttaatttgatgcatcaacaacgaggccaaatatgaagccttgatcgctggcttgaagatagccgaggcattgaaggtcaagaatctcatatgtcatagtgattcctaactgattgtaaatcaggttctgggggaataccaggctaagggcctaaaaatggataagtacttagagaaggttggaaagaacttggaaaatttcaattactttaaaattgagcaaatcccaagagaacaaaactctaatgctaatgccttagcaaaactggcctcgcggagtgatttagatgaattaaaatttgttccggtagaggtgctaaacgagccaagtatatgtgaaaaagaagatgtcgatatgatagatagctcacctacttggatgactcctataatcaactatgtgttgggttttattccctaaataaaactctttacaatctgattagttatc

SEQ ID NO: 336584 - DNA, 1004 bp, Cannabis indica
tcatattttgggggtctcgggacctcaaaacctcatttcaatacccaaaaccctaacgggggaccactaccaccagttggggctagaatagtggtagtggtcggccatggcttatgggaaaccatgaatggtttttcttgcttatttcagttatatggatgctagaaaaccattttggtccattagttcttggccaatttcttaggagagcactgccaccatttttgccaaaaagtggcagtggttgcataaggggtttatgaagccttgtgtaacttttctcacttgtatttgatacatggatgttggaaatacaatttggccaatgaatactcctcctcctatgtggtggccgaccactgccaccaattgtcccaaaagtctgaccgtggtcagccaagtggtttccacaccacttggtggcttctttcacttggttttgacatattattagtgaaaatgtatttttggctagaagtctcattcccctcttcatggccgaccaccgccactcattgtgccacaaagatggcagtggtcggctaggcttgtttcttggtagaaaatggtttcttttacttgtgttgcactcattggtgtcgagggaacacatttgaacaatttccccttagtgctttgtatgtggcgactactgccattctcttgtggcagtgctctccaaaaattagagagcattgatatttccatatggcagtgggcgcataggttttattccatggaggtttcatgccactttgactttatgcacaaatttaagccatttcatgcctaaatgagtcaagtccttattcgtttccctggtgattagggtctctagggtgaaaacgctcgtgcgagcccatatgaatcctagtttgggcatacttgggtgtgtgagtcctagtaccaaatggttggttaatattttcgagtcttgtaaaggtggcatggagccatcaagaaggatgtcttaactcatttgacatttataagtcttggtcaaa

SEQ ID NO: 336585 - DNA, 969 bp, Cannabis indica
attgaaaaaacactgtagcgtgccttagcattagggcgttacaaatagtgtctaagagattctaacgtctaactttggtgacaattttgatgtctaactcttgtgataactctgatatctaactctagtgacttttcagtaacaacaacaactctaacgaattctttgataatttttttgacgataataataatttttaggaatattcttattctattttctttttctgagactaatattttgttttagcatatatgctccatttaagaacatatatacccaatgatttgtgttagacagtttggttgctggtcaagaattattggtaagagctcaactattattaaagtattacacatatatcgtcatcatcatattatcacacaatcaacatttttattcaaccaaactagcttgtgtggttaataatctatatatttatattattatgttgttttttattggtttattaaaataaataataataattaaagattgctgaaattaattaaaactatttatacataatgagaaatagaataaactaatattacaaatcaaaccaaaaaaaagatatacgtagacattcataaaaaataatagagctaattaaaatttttgtcctctaaactttaacatgtatcaaattatatccctaaacttttttgaccgttaaaaattatccctaaactattgaaattatcgaatttaaagacttctgtctaattttattcaattttactaatttagtgattatttatgtattaaatcatgcttctcaaactttaatatttaccaaatcacaccccttgtactttgatatgtgccaaatcatgtctctgaactttcattcatgttaattttttcttactaaaattagataaaagtccttaaatccaacaatctccataattcaaggaatttttaacaactaaaaaagtttgagaaacataatttgatacatatcaa

SEQ ID NO: 336586 - DNA, 625 bp, Cannabis indica
tgaaatgggacaactggaatggggcaattccaaggttgtttaggaagttcttgtagtagtctcgcagggggataattgctccaaccctgatgtgttcgaggctccaagcgcgtattcctgtcaagccactcgtattggcctcgccactggtcccctcagatgcttcagcagtaagttgttctggtgggtaacagctgaactcgccaatagcgactgatctaactcagcagtctttcttatatttaataccacaagtccctacggtactacctacgtaatctcaaattgttcgcactgttggaatatattttaccaggatctagatttacaaacaagtatatttttaacatcctaatatgaatttctaaaacgatgaaaataaacacataaaagctacgagaaacattacagtggttgcagcggaattaaatgactcctcccactcagatctctaacccttgtatcctttttgtaggagagtatcaccaagatctgagcccgattctccttcttggtgattggattcttcatagtcttacatactatgattgaggactcacttgatatatgtgagcatgcactcaatcactaatggctgaatttggtttgtgaagaataggctatg

SEQ ID NO: 336587 - DNA, 519 bp, Cannabis indica
acgtttcagatttcttttgcattaggtaaaggaaactatatctagagtaatcatcaaggaaagtgacaaagtacttataacatcctctggattttacatttagaggtccacaaacatctgaatgaactaaccctaaaggttctttgacatgctctccctttacagagaaagaacgcttagtcattttaccttctaggcaagattcacaaacaggtaattcacctaaggttacttttttcaatagaccatctttggttaacctgtgaagtctatcatagcctatatgacttagtcgtaaatgccatagatatgtttcatcatcattattaatctctttccttttatggtttctaggtttagctatgttgaaaagttcgttattaagcgcaattggtatatccgatcttaaaacataaagcccttgttccatgtgagcaacacataattgaatgccattacaaaaaatagtgcaaatagagctcgaaaaattcaattgataaaattgtgtttataaacatg

SEQ ID NO: 336588 - DNA, 661 bp, Cannabis indica
ttggcttagttgtgatggcatccccaccaatgccctgatcttcacggggttttcctctattccttgttgattaaccatgaattcgaaggaatttcccggaaccaactccaaagacgcactttagagggtttagtcgcaatttatatcgccgcagtatatcaaacattgcatgtaaatgggtgacatggtcttttgcatgttgagatttcacgagcatattgtcaacatatacttccatggtgttcccaataagatctgcgaacatcatatttacaagcctttgatatgtcgcacctgcgtttatcaaaccaaaaggcattactttataacaatacaagcctcgatctgtaatgaacgaggtatgttcctggtctggttcatacatcgggatttgattaaatctcgagtacgcgtccataaagctaagaagtttgtgacctgcagtggcatcaacaagttggtcaatgctaggaagtgggaagctgtctttgggacaggctttatttaaatctgtaaagtcaacgcatgtgcgccatgagccgttaagctttggcacgagtacgggatttgctaaccaattggggtagaacgactcccgtataaagccgcaggctaggaagcggtcgacttcttcttttagcgcttggtacctcgcagggtc

SEQ ID NO: 336589 - DNA, 502 bp, Cannabis indica
gaatattgaatttgtggtgtgtcgagatgataatggaatggtgcatgcatttcacaacgtttgccgtcatcatgcctcaattcttgcatatggaactggcaaaaagtcttgttttgtttgcccttatcatgtatgtatgtatttaattatgaattttttctacggtcttttttatttttacactttaaaatagtttttcttttttatatttttacgaaattctatatagaaactcctattgtaactagcgctgcaacttaaactgcaacaaaaaatcttatagaaacccctattgcaactagagttgcaaccactttaaaaactcaaacggtaaatttgaaataaaagttaaaaaaatagtatattgggtaattttctttttttttactatagtttgaaatatttgcactataaaaaactgttacttttagtgataattttttacttacaacatattttttttgtgactaaatgtgacttttagtcacaacaaaatgttatt

SEQ ID NO: 336590 - DNA, 498 bp, Cannabis indica
tcctttcgattctgatttcactctgttccttcttgccgtgttctctatcttcttctccagtaaagatcaccgtccgtattgatgaattcccttcttccttgaattcttcatcgacatccttccttcctttcttttctgttcttcttttgttctccttcaatgtcgaataataaccaagaaaccagaattgatgatggagcttcaatccagtccaacaatggcgaaaatcaaagtcagttggcagatataggaggtaacgctcaactaaccagatcgagaagtcagattgaagacccctcggatccgtattttctgcaccatggtgataatccaggaaatatcttggtgtctcagctgctgaccggtcaagacaactatgttgcttggagtcgtgtgatggaattagccatttctgtcaagaacaagcttggcttcctaaacggttctattcctaagccccatatatctaaccatattctttacaacgcttggattcga

SEQ ID NO: 336591 - DNA, 631 bp, Cannabis indica
catcaaaagaaatccctataatttggggatcagattgcagagatatggcaagctgtccaaatcccacgatcagtgtattatgtatttaatatgcaatctttctgcttatatccattgtaacgagaaggaaaatacttcctctccaagctcatagctctataaatactgatgcatgttcactgggcaaagtgtcgaaaatattctggtcgagagattttacttatgagatattatctaagaattcgtattcagagatattgttgtaagagctataagaaatggaacctttctccttattcttgagtcaatacaaataccgaggattaggctattaccgaactgctcggggctgaacttctataaaattcctgtgtcttttatattactttatcatatatcaatcgttataaactacttatcgtttacaaaattagactcactgtcgttggctaaaagcgaggtcgatcaacaatatttttattgataattatttttctaatataatttattttaatataaatgattttatttatttatctaaaaaataaatatatattaaattatttttgaagaaaatatttaaattatattttttttaacaatcttgagccattgttagatttttattgca

SEQ ID NO: 336592 - DNA, 1086 bp, Cannabis indica
tctcaacacgctccaatcttgccaatatggcagaagatattggttcctgaggctgtgaagtactgggaatagatgccgactcaagcatagatgcagaatgaggcattaatgcaggaggtggaacagaacggacccatgatggtggaaagtgtggtggtgtatcagctctgaagattctagcttcctccgctcgttgttctagcgtctgtgtaagcttcgaagcctggctgcgcaaactatccttagtaggctctccatcacttccaataaccaattcttccatatctacaaatagaggcgcctcacctctagtgacgttgctcaaaaactcggcctcatgagctcgcggacataaaacggagtacactgtcaactgcaaataagaacaaaaagattattagacttggattaaattgaaataaataaataaacctgaacaaataaaatgaattaaaaaacttacgtttcttgcaaacaatctaatgacttcctctttgccgagtggcaccttcttactctcccagttcaccattctaggaaagttgtgcgattttctgatcgcaaatttcttagcaagctccaagatggactcatatgcccaatattgcaatgctacagcatatccataggcagagtactttgactccttctgagtcgttcccttttcaatcttcttatccatatacttcttcttttctacgaagtccttactcaacaagttgaaagaaattttctaccacgggtactcgtagaaaaaaaggaagctcgtcagccattctcatgataaatggcggaactagggtcttctcctctttcccagtcaaaacacccatcacaaacagaaccaaacccaacttgtaaacatcatccttctcagtgcaactctcaaagacactgtgcagtcgaccaatgctgatggatcgatccccattaaagtattctactatcaaacggtctgactttgccttctcttcaacctcagcctcagtaggtccacgtaacaggttaagcccagtcaccagggcaaactcagcgcgagcgaatcgacatatcttctttgcaatgtaaaaatgcacctcatcatcc

SEQ ID NO: 336593 - DNA, 731 bp, Cannabis indica
gtcctggtctgagtttgggttcgggtgcaaatttcagtctaggtccagatcaggcgccgagtgtgggttcacgtcttgggtcttggtctgggttgggtccgggtcccaagttcaaatcccgatctgagtctgtattttgtttttggtctaattccttgttcctgatcttgttttgggtttgagtttttgtccgggtccgggtctagctttgggtctgattctaggtgtgggtgtttgagttcgggtacaagtctatgtccgagtttgtgtcccagtatagaccccgatctgggtctaggttcaggtccaggtccaagtttgggtctctagtgctggtccaagtttgggtcagcgtcaggatctcggtctagatctaggtcaagcatttcgatcccgatctgggtcttggtccgagtccaggtttgtatctggatctctatctaggtcgaagtctgtatttgggagtgggtccccgatttaggtccaggttcgggtctcagttccggtctgggtaaacgaccttgtccgggctagagttccagtctcagttgggtctgaggctaggtctgtgtttgggtctacgtatgggtccgggtgctagtcacggtcctagtgttgatctagggtctttggtcggcaattcttgttcaggttctaattttttgtcccaggtctaggtcatggttcgggtttggttctccgtctgggttctggtcctagtctgagtccca

SEQ ID NO: 336594 - DNA, 348 bp, Cannabis indica
gggcataaaacctaacagttagaccccgtaaggggggtgattgtgacagtcagtagtcccatgatctgtaaggggaaataccaggtaagttgtgcagtcccaaattaaagagggcttaaatagattgattggtactacctatatcaacaaggtgcatcttatttgtcggtagcccatcacgaaataactccatagtttagcgtgcttgacctagggtaatatttggatgggtaatttcctggaaagttttcttaagaagtgtgtgagtgaggataaagcacactaaagacactcgtgttggtttgtagggttagtcatcatttcgtaaagtaaccaaagtgacgtact

SEQ ID NO: 336595 - DNA, 619 bp, Cannabis indica
aaataaaaggtaattaatatttttctctcttatctttcttttgaaattttaaatttaaaatgactctgtattgacttaggagtaaggaatctaattggtataaattgaagactccttcaattttttttctcactagcttcatacgcctatagagagtaatataaagccagagtcttctgctttcaagtgttcttttgctttttaaggtatttttcaattttttttaaaaaaaaatcaattttttattcttctcccttcttgtagagctcaaattaaggattctagatttagttgtaaatccttaacttcattgttcgggccttagaaaattaaaattacaattttcatatgagtcgtggagttgaaattctcctttcttccaatatgcagtttgtctaattttttcataacaaagttgaaaggagctgttttgagttgaattaagttctgattcagctgatatgaatcgtgtaggcttgcatttgaagcaacagtgtctcgtatgtgaagaactagaaaaagacctcatgaatatgatccacaggtggcccaatttatttttgcaaagctcacaacgcccaagtctaagaatctagacaaggtgttaactcaaactttt

SEQ ID NO: 336596 - DNA, 1147 bp, Cannabis indica
ccgaattttctagaaaataaaaggaatatgttcttttgttatgcttattatttgcctgttttggttatactgatgagagccatattattcatgttcggtgcatattgttgtttcacgacctagtctctgtgtcataataggtagatcaggtgtgcactcacctgtaggtgaaagatctagaatctgtacacggagtgaattaaacctgagccccggtattatagtggatatcagatgcgactacccagttttggatgtcgtcttctatgattggtattgagagcaaggggtctagtggacaatgtgatatgcatttgacgtttgatttgtgattatttgtggtctctctactttattcgtacatattcatactgttgatgagatattttatttttacaaagctaaccatgaaggaattttactaaaccaagggtcctttgacgctggtggaagaggatggtaccattgggaaaagaattcgttattagtttagtcttattctactctttaatcttctaatgaaactgattttgtatttaagttgaaatggatggtctggatgacttaaattagctatgtactagttagaaatgaggaatgatggatgctaggtattattttggtattttattgacttattaaatcaatctatttggtgattacataactgtggggatattatttttcttttatattgatgagtggtcctgattttgttactaatattttcctattaatataggagttaatccattacttttaagttagtattttgtgatataaattaaaggatcatttataagctttatctttcaacaagggtcaaagtgtgacctttgaccacccaagttatggatattacatatctgccacggcctagggctcgggtcgtgacagaaaaatggtatcagagcaccgggtttaattacctcggagtgtgtcaccaaatagtttagatttattttaaataataatagtaataagtatcttggtatttatatgtataaggcatatttatattattagcatccaatcctcactaactgattagcttttggttctcagacctaagaaaatgcctccaaaaggaaggaagacaaggagaacggttggagaagacgcccctcaagctaatgtccaacctcca

SEQ ID NO: 336597 - DNA, 1665 bp, Cannabis indica
ttccaagttctttcaaaccttctataggtatttttccatttttaggcccttagcctggtattcccctaaaacttgatttacaatcaattgcaaatcactatggcatataagatttttaaccttcaacacctcagctatcttcaaactagcgatcaaggcttcatactcagccttgttgtttgaagtgtcaaattaaaatcttaaggcatagtgaaactagaagccttctggtgaaattagtattacccatgctctcgagccatgctcattggatgctccatccacgcacagtttccaagtatccgcatctcgctaaacaagcgtattttcctctagagctattcattctatcaagaaatctgccaaagcctggcccttgatggatgtttttgggtgataagttatgtcgaagtgccccagttctattgacaattttatcaatcttccaaaagcatttggttttgataaaacctgtctcaggggttgatcagtcaacaccttaatcggatgtgcctagaagtaaggccgtaacttgcgagacatgtagattaggcataaggaaagtttttcaagaaggggatacctcgattctgcccccaataaccttttactaatatagtaaataggttgctggtgctttgcttcttctagcactattgctgcactaatcgcattgtccgagatagctaggtagagtagagtttctccagttattggttttgccaaaactggaggtgttgacaaattcctttttatgctcttaagggcctcctcgcattcttctgtccattcgaaatttttgtttcctcgcaatacattgaaaaatgataggcacttatcagttgacttcgaaatgaatctgttaaggtctcccattcttcctgttaaggcctgaacttccttcagtgtagttggtgatggaatatctatcaaagccttgatcttctcaggatttgcttcaatgtccctcacgttgactatgaatcccagaaattttcctgaggaaactccaaaggaaaacttttttgggttaagtttcatattgtactttttcaatatctcaaagcactctgcgagttctattgtgtgatcttcactcttcatcgatttcaccaacatatcatcgacgtagactttcatgtttcttcctgtttgtctcgcaaacatttcattcactagtcgctaatatgttgccccaacatttttcaaaccaaatggcatgactttataacaataaagtcccatgttggttacgaagcttgtatgcttttggtcagggacatgcatttttatctagttatatccagaatatgcgtctatgaacgacataagctcgtgtccagcagttgcatcaactaactggtcaatccttggtagtggaaagcaatccgttggacatgacttatttaagtctgaaaggtcgatacaagttctccaagttctatttggttttgggacaagacagggttggatatccacgagggacaaaatgcctcgagtatgaagttgttaactaacaacttatccacttcctgcttgagtgccccttgtctctcagacccaggtcgcttttttgtctctggctgggtattggtcgcattcaagtggtggcatattatcttaggggtcaaatccctatcatatctgagtggctccaggcgaact

SEQ ID NO: 336598 - DNA, 835 bp, Cannabis indica
atagatatcaaaataaaaatacagttttaaaataatgagctttagttttaggatatttgatctctattgttggttttacatagttcttgttttaatgagattcattcctaataaattttcattcattggcaatttaacaccatagaatctcgaaagataagtattattataaatcttttattcttaataacgatcaccctaacagtgactactcagaataaggtttacaaagtatgaaactgttggaatatattttatcacgatctagatttactaacaagtatatttttaacatcctaatatgaatttctaaaacgatgaaaattataaacacttagaaggtatgagaaaccttacagtggttgtagcagaattaaatgactcattctgctcagatctctaacccttgtatcatttttgtcgcagagtatcaccaagatctgagcccgattttccttcttgttgtttggattcgtcacagtcttacatactatgattgaggactcacttgatatatgtgggcatgtactcaatcactaatgactaaattttgttttgtgaagaaaggctaaggatttcgaaaatcaagagaagaaaggaagaagaaaaagtcacaaaacctagagagaaagaaagctaggttttcttgcctttgaagcattagttggataatgagactttcttttcgttttatactacttctcttagggttagggttgatttattaaaataaaaaatgataaaaaaacggaccaaaattaccacctagtggccggccatgaatgggcccaacattagttagatttttgccattttctcaaccatttgtctattt

SEQ ID NO: 336599 - DNA, 509 bp, Cannabis indica
ttgttccataacctttgatctcttatgctttgttgtcctaagaagaattgtgcccccatgactctctgaaagaatcttaaacagtactttatttggtgtcatatgaaatgaacaccttgaatctagaatctaatctccacctaaatctgatctagacatcacaagtacaccagatgacactacaagtgaaccagatgacccatagccatcaataactccatgcttcctagacttgtgatgattttccctcttcagtttagccttcaaagccaaacaatcatctctaaagtggccctccttcttacaatattaacattgctttcctgcaactccattagtgcttggccctcctatgaagtttctagaattgaatctttaatggttatctttgtagccatttgagttctgatttcccttgtattccgtcttggggaattttcccttaacaatgagtaatccttccccattggtctcatctttctcatctcctttcttttgaatttctttag

SEQ ID NO: 336600 - DNA, 508 bp, Cannabis indica
atgggggcgccccttgccactttaatacccgaaatgcgatgacaaagttgataatccttcaacagagaagagaatccttcggcaaaaattagaaaaagataaggggacaatggatctccttgtctcatccctcttccaggggtaataggtcccatgcaatggccaccatgagtgaccttatacctcaccgtactgacacaaaacatgatcaaagaaaccacccttctatcaaagcccatacgcagcaacaccgattcaataaaaggccattcgactctgtcataagccttactcatatcaagtttgagagccatatagccatccttccccattctttcctcttcagataatgcataatctcaaaagaaaccatgatattatctgatatcaatcgaccaggcaaaaacgcactctgagtttcagagataacatcaggcaacacatgtttcaatctatttgccaacactttggaaatgattttatacaagacattacaaagtgaaatagg

SEQ ID NO: 336601 - DNA, 781 bp, Cannabis indica
agccttgtggataggtgtataggcgcctagatacaagtcggtattatattgtatgttatgtgcttttttactgaatccgttgactcacagatattatttccgcgtgtaggtaaaagaaaggagaaagatgaacaagagtgagtttcgagctcgagtgatgattgtacatgtcgagacgacgcgacctggagtgttcggtcacaggacgacttgggctatattttgtagttgttgtgcgacatgtttgtaaaagtttaatcatgggattccagtttatgtaaatatatatatgttataaagtttagtagtttaaatcaaaaatttattttgggacgattttcaaggaaacccctttgattagtaaaggtgacacgttaattaaaaaatcactgtagcgcctaagtatcacggcgttacacaaggggtcatgtcctataggctcggtctggctcttgggttggttgtgttgatacaggttttgtcgagattctaggcgtgaaggatgtccttagctggatcaagatgtcaaatgtctttaatgtaattgttaaaacgaatagtctcatcactgttcaagttgttagaagctcggtgactatgatcttcccttttggtagttgtattaaagattgcaagtctcttttctatggtttagggcccatttgtttggtcttaatagaccccttgatctgattcggtcagatctggtatcattaagtggttttatttttttatttttttaatcactttctgccacttaatacctcttaccgaaatagat

SEQ ID NO: 336602 - DNA, 1068 bp, Cannabis indica
acatttagttacaacaaattgtgaatgtgactaatacctttagtcacagatcttttagtcacaacatctaagaatgatgatttataattagtcacaaatatattttgttgtgactaaaaataaatttttttatagtagttgagttatcatatttacactctaaaaaattatatatttacattgtaataagttactaagattatatcacaattgagaatttatataggaaaattaagttgatttgagaataggatatatgttacttactagagcaaatgtaattaagcttcagtctttgtgatctgcaagagaattattaaagtaattaggactcaatatcattaatgaagaagagaatttgtgaagtagtagtgtatttataaattaagaataataattgttaatttttcacttttatacttttttgttgctagttaataagaagaaggaaagaataaaataaagcaattgtgtatacttaatttgtttttgaactgtgtactttaacagctgttacattccacttccatttaaataataagataattaactaagatttaatacattaggtattagtaacctatacaatgcatgtatacatatacaatatgttagggtctttattcattgatttaagtctataaatctcgaatcaaaatttgaagacaagctcatgttattaatttcttacatattttttgctgatgataattatatctttgagtgtcatttgtgcttggtgtggccaaataattatctcaaacgtactggcaggcatggatttctacaaagagagcatagtttactttctgatattgcagtagctgcttgtgccacaacaatttattttatctagtagaatcaaaatacttataattaatggccttaaaactagattgttgcttgttaataaaaggaaaaatgtttatgattttgcttgtaatatatatatgtaagtgttcttattattaacttgtaatcagtggatccaggatttttactttgtggggacttatttatcataaaaaaaaatatttataactacattataatcactcttattaaatt

SEQ ID NO: 336603 - DNA, 1014 bp, Cannabis indica
tatatatatatatatattataaggaaatgtaagtaaatattgatgtgttgtaattaaatttgtttttaattgaataaggttaatttatttttttttttgtaagaaaaataaatctttgtatataggactcacttatgttttcctaatgatgttattttctttattttatggagattttaagtcgatttatatgatgatacgaggtttcaagctttttgctaagattttggggtgacacttattttttcgcccaaattagtgcttggaaaaagagttttcaagaggattaatgcaatatgtagagccttcattcaaaaggaagcaactaattttgatattatatagtaatatcttgagctttatattgctgaaaatttctttagggatagggtttggattagattagaaattcgaccatcattgtatttgaggattaagaagagaaagtttagaattaaggtaaaaaaatattaactaaaatcaaccttaatgtattgttatgttctctcacgagttcttgccattcaaaaatgaaaaagagaagaagttaaaagaagaagatttgacaaatcaatataatgaaaaacatggtgaagaaaaagtgtacctaatagaattttggataaaatatatatttttttttacaaaaataaaaatatagattcttagaatttataaatcactccagaaatatatattatatatctaaatatattcttaaaatattttaatatacaaaatcttaaattataaatctatagaatctttgttaaattaaagaagaataaaataagagatgaacagaaatactaacctgaaactatattgttagagattgcatagaaggttatgatctttcaagaagacactatctttctaaagtattttttctgatgggaaaagagagaatacagaaaccctagtgtttcttgggatcactacttatttataactcattatataatgagtttttgatatttataatttggctcctcaacaaattataaattaact

SEQ ID NO: 336604 - DNA, 601 bp, Cannabis indica
gtcgggtgggtcatcctcctctcctaggggaatgacgttcggcgtttgttgacctacagcttgccgactacgatcttggatctgtggatggtgagcccttaatgcctccatctctttgtctctccattcagggaacatacacctttgttcgtcaaacgcgagatttactgcggcacgcagttcatcctgatcatgatgtagagtgttgctatgactctgcatgagtccgagcgcggcacagagattttgcaattcagttgcatctctgatggtcgtctggacgttggttccaggcagaacagtcgtgttatgaatgccatggctgtgtgcggaactgttattcccagtcttttgcacaccaggcgcagtttcagtcataggagctgtttcaccgttcaccacgcttctcgtctgtcgaggattgatagcaggtggaacccttgaactccctgggtcctataatgctggatccagcgtctgtgaatttgttgggtcagacacgcctctacgagtttgcaccatcttgttgagtgtcgaaaagagcgatttgtgatccttctctcagtgaaagcaccaaaatgttgactttgcttttagccaa

SEQ ID NO: 336605 - DNA, 625 bp, Cannabis indica
tattgttgtacgagaactccattcgtggcaaatattactccaattacttggaaaatccaacgcacaagctcgtagcatgtcttctagtacttgaatagatcgtttcgattgtccatcagtttgaggatggaatgctgtactcaacttcagttttgtgcccaaagcactttgcacactttcccaaaacttagaggtaaaaactgaacctctatcagatacaatggtctttgggactccatgtagccttacaatttcttttacatacagttcagcatattgctctgcgttgtaattagtgcgcacaggcagaaaatgtgctgatttagtgagtctgtcaataatcacccagacagaatcctgttgtttgctattcttcggtaaccccgtcacaaaatccatagcaatatcttcccatttccactcaggaatatcaagagattgcaacagccctgcaggtctctggtgttcggccttaacttgctggcaggtaaggcattttgctacaaattctgctatatcatttttcatacccggccaccaatacctacctttcagatcattgtacattttggttgatcctgggtgtaaaaaatagggtataatgtgcacctcttgtaagattttt

SEQ ID NO: 336606 - DNA, 893 bp, Cannabis indica
ttttttttctctaaattttggtttttttaaaaaaaattaaatgaataaatgatctttatctaactacataccagccataaaaatcaaataacataaattaaactctcactaaatgacaaaaacccataaggcaaaagaccataatgcccttgcccacactaaaagtcataaaatggcactaaggggtattttgggaaattataaaatcttgactattcccgacattcccaacgtctaaaatattgtcccgttaaattaaaaatactaagatgtgattctaatagccattcaccgcgttccaatgttgccgggcacaaaaatatgcaaaattacgaaatttctatatgtgataaaaatgcatttggaattcaaataaatcatcataaataattaattcaatatgaataaataattttcataataaagccataattatctgctaattcccaaattaaagctaagcggtctttacaattattccccccttaaaaggatttcgtcctcgaaatctaacttgaacaactctggatattgagctctcatgtctgattctaactctaggtggcttcctccaccttgctatttctttagagtactttgactagagctatggtcttgttctgaagaaccttatcctttctgttaaggtgctgaactggttgttcttcataagacatatttggttgcaactcaagattctcggaactaagtacatgagccaggtctgaaacgtattttctcaacatagagacatggaataggttatgaattgttgaaagaactggaggcaaagctaatcggtatgccactagcccaaccttctcgagaatctcgaaaggccctgtaaatctagggcataacttgtctcttttcccgaaacgtttaatcccctt

SEQ ID NO: 336607 - DNA, 405 bp, Cannabis indica
ggtttttggttccgtcagttttgttccaggtgttcggtaggtcagtttgaatggttttttcggttttctgtatttcatgctcagccctacttcatcctttaatttttcatcttcatatatcattgccatgtatcatgggctcacctattcaggtagtggaacacccgtgcagcaccttgacttttcaagccaaggtcagctttccaaccatccgagtaacaatgagctcattttttgcgcgactgtgcccctcgtgcacacttcttcttctcgaacaactcccgtcgagtcatgctcgcaagcatccatgagtgcatccatgcattgaggctctctagccaagatacccgtactatccataggttgccactatgataaggcaaattccaacaccatcgctcacct

SEQ ID NO: 336608 - DNA, 691 bp, Cannabis indica
ttggctagtttaattttagcaaaggaatttatttcctaagccttatgtaattaagaaaaaccaaaggaaatagaaagctctctctttccttccctctctctcttcgaacccagctagaacaagagggtttgctgctgaacttttgtaatttcagcaagggattcaagagaagtcatgccaaagtaagccctagcatctctaccccttagttcttgaagtttttacttggtttaaatatgtgattttgagtattagtggctgttagggttaggttgagttgtagttcgaattgtagggttaatttgagttggctttagcttctaacagctggttttgatgtttggattaggttttcagcaagtttgagctttgagttcaaagctttgatcactaatggcatgttgtgtttcattgggattttctgtgtaatactagttggaaaatgttgtttgtgaattgtttaggaactctggaaggttcggttgttttggtagaggattgagcaagaaatgaaaagtttggggtgaactggtgcaaaccggctagccggttttaccggtacttgtaaaaccgtctagcagggtccccaaatgcttcatttttctcgattctcatccatttcgtgtgccatagttgggtgtttccctatttccagagttagagtaacacgtagagagtgtaacagaacctc

SEQ ID NO: 336609 - DNA, 646 bp, Cannabis indica
aattgcaacaaaaaatcgtatataaacccctattgcaactagcgctgcaaccatgttagaaacccaaactgtaaatttgaaaaaaaaaaaaagttaaaaaaataatatatgtagtaatatacaagaatcaaattatgattaataaaataaagagaattttacatggtacactaacttttgccattttttacaaaaatactgccaggtggtattttttacttttttactgtgtttttttataagtttcatattgcagtatactgtgttaagttttcactggtattctactggtgttttactagtgttctactgttgttttgagttgtactgctttgtgttttactggtgttttataaaaacacagtatttttgaaaagatttccgtgtgacagtatttttgtaaaagttaaccaaaatttcagtatttttataagtttttctaaaataaatggcccaatcaaaaattgtcaactctaggtcaaggtttaagtcatgtcccaagtcttgtttgcgcagggttgggcttgagcaggctcgaccctggacataggcgggctaggcctgtgcctaggtcccacctagccaggagcccaaatttttttttctccctattaaaattatatattttttttttactaattttaaa

SEQ ID NO: 336610 - DNA, 3048 bp, Cannabis indica
tttttttatcatttctttcaagaacccgcaaggattcatatgcatttttttttgtgtaggccaccttcttatcccatgtcgcccaaagtcgggatctccataaagtaaaacaacgagaagctgaacttcgcaaaaccattgagcaatgcgaggctgttgctaaagaatggaacgatgctcaaaaggagatttctcgtctgaataaggaggttgaggagataagaaagactcacaagacgaaactcgaggcatcccggaaggaagccaaggacaaatttgaagcatgccagaaactccaagacgaacttaacacaaccactgcgaagctcgagggcgctgaggccaatgccaaagaacggtgcaacactgttgccaagcgttccatttaccgagcttggatggcaaatcttgagatggacttaagtttcttaggagagggcgccgaggaagtcctagtttattgcgagaaggccaagaaagaagaagaagaagtcgttgagactgaggaagaagaagaaccatccaagtctcctcttctttttttatttaagaaaatggccttttggccgagacaatggttttccccttgtggaaattttttgtaaagataaatttacattgttggatggccaactttgcttttattttatttcttttcatttattgcctcacgtctttatatttgaacttaatatgtttgcttatttgcgtttttaatcacaacttaaacaattatattttggtcaaacttaagatactttaagtaagcacttctattgatctcgtttttcctttaagatagcttaagtagtcattaatctactatgtatgtacatgagtagttatattctgctatgctttctattcgcgagcagttcttatcagttttacttggcgcgagcagttataatctgccatttgtaatttaataagcaaacttaagcgtactttaaataattcatcttatgaattactttgtacattttttgattgcttatatgaatagttagaccttctattcatattttaggataagtattatcttttcaaggcatctcggtacctcattaataatacatgcctacataatgcgagtcgttagatattcagcctcgcatgtagcttaatgtttttttatgagttaaatctcatttacaactgctacttcgagtttcctttttgaaaatgttcaatttttgactttatattgtccatagacagctttaatcaattatttggaaaaaaaaattaaagtggagtgggtttgcaatgtatcatgtatttctagataaattccagttgatcatacacatatatatatgtccctcaagtaattttaaagagtaaaactttgtaattacttgaataatacttcaactttattaataataaaaatttacatcacaaagagaaaatacaacaattacataagtaaattggtaataaggtcacaaatgttcaatattccagtggtttttattagcgagctgttaagctgagctaatttataaaccctggttccaactattgctttgataacataaggaccctcccagtttgggttaaacactccagtagatgcatctctcgtgtttccaaatactcttcctaacaccaaatctccgacattaaagagccttttcttcactcttttgttaaagtatatcgtgattcaatgctgatattagttatttgcgattcagtacatttttcttcaagtagatctaaggacaatttaagaagttcttggttttcttcttgattgtagaaatatcgtctgtgggtcagaatattaacttctactggcagcattgcttccgagctaaatgccaacgagaatggagtgtgccctgttgctcttttctcagtcgttctgtgacccaaagtacttttggtagttcatctacccatctcccttttgtagcatccaacttctttttaatagtatcctttaaggttttattaatagcttctacttatccatttgcttgaggccttgagactgatgagaagttgttcctttcacagaactcagtgaacaattctccatctaactgagttccgttgtcggatactattttaatgggtattccaaatctgcaacttatgttcttaacgacaaaatagagaactttcttgcaagttatggaaactagaggttcagcctttgtccactttgtgaagaagtcgactgctactactgcgtactttgctcctcctagccctgtcggcaatgctccaatcaagttgattccccatattgcaaaggggtatggcgaggtcatcattctcagttttgttggtggtacgcgaggtatatgtgaaaatctctaacatttatcgcacctcttgacaaatttatatgtctttatttattgttggccaatagtatccttgacggattatcttctttgacaagctttgccaaccttcatggtctccacaaaagcatttgtgaatttccttgattatctcgcttgcttctgtggggagcacacaccgtaggagaggcattgaataatccctcctatataatttgccttctactatcatgtagcgaggtattgaatacaagaattttcgtgcttcgttgtccgttgagtagatagttaactatgggcgtcttccatgtgggagaggcatctatcatttcaacttcctccttttcacacatactaagttcatttaaaactttgactggtaccaaattcaatttatcaagctcattttgcgaggccagatttgctaaggcgtcgacatttgagttatgttcacttggaatttgttcaattttaaagtaatcaaacttctccaagttcctctaaaccttctccaaatattttgccatttttaaacccttcacctggtatttgcctagaacttaatttacaattaattgtgagtcactgtagcacataagattcttgacctttaaaatctcagccattttcaaaccagttagtaaagcctcatactcggcctcattgtttgaggtgttaaattggaatcttagggcgtagtgaaacttaaagttatctggcgagatca

SEQ ID NO: 336611 - DNA, 964 bp, Cannabis indica
cttttctagaaaatgtgaaagaagctatgaggttttgaaaatagagaaaaaggacgatagaaacgaaaatgagagggaaaagaagtgaaggatcattttgtatcaggaggtttaaataccattatccctctttaattgggatggagacacgtggcaagagaatgcctaaggtctcaaaatccaacagttatccataaccacgcctacacggactctaaagagttttgatgacgtggcaccccacatgggttaagtataatgattacagccgtctttttgaaaccctcgattagacaaccaatagtcaccatctcgtgaaaacctttcgcctgcctctcgcttatagtttccctcatgacataagatgccagtcgcgaaactaggggcatgtgttatagtgagaatttctcacctagaaactcgagaccaggctcctataaaaatgacacgtggactcactctcctcgaggagggctgagatgtcagcaggagacctcttgagtgaaaacctcgcctgaaccagactcaacaagatgatgtgaccttgacagagtctagtcacattcgtatagttcgcacgaagtaggaccgaagattggttcaagagtcccatataccgagatatatgcgaggactaaaaggatcttcctgcgaggttgtaaagatcaattcttgactctgcaagttggtctggatgacccaacagccttgacaacccgataaggactcacatgtcttaagttgtcgacttattgcaggatgtctgtatatgagactcaaacaggacgcacacatctcatactcgactggtcttccacgcatcttaagcatgcaagcttatgcgagaatatgaacagacaactcatactatagaagtcgcatacgttgttgtatttagtgaattaggtcgaaactgttcttcatttattgtatttacattttttattgatttaaatgttatatt

SEQ ID NO: 336612 - DNA, 431 bp, Cannabis indica
taaaataatttccaacagttgtgccatgaccataagatcgtttctaagatagaaacatccacaactagtgctttttctatcatctgcattacttgcccaattagcattactaaaacaaacaagattagaattagtgtctttagaaagccaaatcccaaaatcagcagtgctatttacatagcgaatgtttcttttccacaacgaaaagatgagatttcttgggatttccctgatatcatgcacaaacaccagcactataacaaatatctggacgactagtagtgagataaagcaacctgcctatcatactttggtacaaagtttgatatacctttactccttgttcatcattggttagtttcaatgttgttctcataggagtattggtatagttggcattctcaagaccaaactttttcaccaagttcttt

SEQ ID NO: 336613 - DNA, 1402 bp, Cannabis indica
tgataaattaaacaatgtaaaaaacaattaaatacaagatcccctataagtcctatccaaaacccatataggtattcttgtcctataatgaaattcaattctatttcacgatagtataattgacattcagttctcaaattttgtatcaaatcataaacaattaattgatggccaagcaatcaaaaagaattaagtacgaattatgaaataaaatacatagaaattgagaggaaattaaatcatattaaaaccaaaaataattgtcaaataatatccatctagtccctaatgaactgtttagctactcatattcatcgtagcaatttcacacatattaatttaagaatagaagaagaaaatagagaaaaaaagaatgctaaaaaccctggtgaaaaagccttgaatatcaattttgctctctaaattcgtactctttgattgcttcttgaaaactattgaagtccattccttttgtagccaaaaaatgataaagaaaaagataaatgatgctgaaaacctattcaaaacttaggattagaaggggcgaggctgcaacatggaaagcctatgcctaggcataaccccctttatttgggcaatgagctttctactgcatcaattgatagtatttagttcataaatctctcgatattgctcaaaatgggacgattcaagatgttccgaaaagaaaaaagagagatttagaatttttatgtttaaactttctcaaaaatatgaacagataatagtctactttaagcttgaagttttagctttattttcttgcacaattttatctattttatagatcatctttttgtgagatttgactaatttatacattccaagtgtcgatgcctgaaattaacgaaaaacaagagtaattatattccaaaaaatgataataaagaagaaaattaactataaaaataacataaataataggttaaaaatatcctaacactattcattgtaaacgatcgacaaaaaattaaaaagaacatagaaggaaagtagaagaaaagaaatcatcaaaaaaagttgttggaaagtcttctaggaatatttttcctcactagtcacaataaattcgtactactaagacgttaatatgaagactcgttttatgtgaaatttggtaaaaatggcccccaaaattcacggtaaattttaacaagtttttcttactattacactcattagtattctttaaaaatctcacactacacatctcaaaaaattataaaatttcacaaggacaaagacaagactgttgtgcatcacttttctattcgtcacattgagagaataagtagttttcaagaacttataatatttttatatcaaaatagtgaaaatctcaaatttctgatagtggtactacccctttgtgaaatgtggc

SEQ ID NO: 336614 - DNA, 1110 bp, Cannabis indica
catttgccttatttaaataataggctaattatactagtttaacctaattaaaattgattagtaagataattaattttaaaataaatgaaactaatttttcattgaattattttaaaaataatttagataaatacacttagtttaatgaaatattctagatagtgatttctagtaactaatttatattttctaatatttaattaagtagaaaaatatatttaagttgaaaattaatttgttaattaattttagaccaacttaaatcagaatttttttttagaacttaagaataaaattaataattaagttgattttatttaagatacttaattatttgtttctattccatgaaatttaattaattagaaaatatatttaagttgaaaattaataatttaattaagtttagaccaacttaaattagaatattttcttagtatttaaattagtattaataattaagttgattttagtcaagatacttaattatttctattttaatgaatttaattaaatataaaattatatttaagttgaaaatttttcaatttcagattaacttaaattagaataattttcaaatatatttcaatttattttaataatcattttcccacctaattttgaattgtatttatttattttaaatgcagatatttcaaaaatttttaattttgaaaattagattaagctggaaattaattttaattaattttagatcaacttaaatcaagtaattttcattaatgattgaattaaaataaatagactaaaatatattatttttaattagtaattagtttatgaattatctagatagatattttctaagtagactttttggtatttttctagatatatttaattaaataagaaagttaatattgttaagtagttaaaaatgtatatttattagtgtcaaaatacaaaataaaattaattctatataatattttcatgaaattaatgtaatatatttttatttaaaaatattaaagtattgagttaattttgtaagaaaataacattttatgacacaaataagagaaataaataaataaaaagaaattaagaaaatacattattttatttaaagaaatacaaattaat

SEQ ID NO: 336615 - DNA, 589 bp, Cannabis indica
gaaatttttctttatctgcctcaaccacctttcaactaccatgggatcttgtccaccctcaaactcaggcacttggatccatttgttgagcgggaactgcttttaaggcttcaagaagggcgttcatagggaattcaacttgtggaggttggacattagtttgaggggagtcttctccaaccgttctccttgtcttccttccttttggaggcaatttcttaggtctaagaaccaaaagctaatcagttagtgaggattggatgctaataatataaatgctgtgttgtggcagggggtgcaagctgacactactcgattgattgaagaggtgaaatggagtctaaggactcgggttcaaagttttttgccaaagaaacttttaagtgtagatagtgaatggttttgtgctctataatcatcatagaattctgttgtaaagcattttgaaaggaaaaaacatacagcagtaaaaagaaatttgtatagattgaggcctctttttttggggtgctcttagattgtaaagttagtttgtgcaatacatatccttgatttatcaaaaaaaaaatataaatatgccttatacata

SEQ ID NO: 336616 - DNA, 522 bp, Cannabis indica
ttgttctcactgccagaaaccactaaccaccaacccccaacccctaatataaacaagattttcactctttcttaaaaccctagcctattctcgacatccgttcaactctcgattccaacgctctttctctcccgcctcccatccaatcatgggacactccaacgtctggaattctcaccccaagagctatggccccagttcacgcacctggtaaggatctaatttcctacaacttcttcattttgattctgattcaagtaattttttttttgggtatttcatagatttgtaaatatcttaaatttatctcctgggtcaattctaaacactgtgattttgactttattttttgtattgtgttggatctttaccattaacgacagccgtgtgtgtggaaacccccatggtttgatcagggagtatggtctcatgtgctacagacagtgcttccgcagcaacgcaaaggagattggcttcatcaactattattttttaattttaggtttttattttatttttaaa

SEQ ID NO: 336617 - DNA, 652 bp, Cannabis indica
gaacaagttcaatgtcccaggttatatcattgacagagaaaagagaactcacagtatgaccaactagacccacatgagtggaagtgacatatggattagtggaatgaggcagccaaggtggtggtaccaatggttcgtcttgccccaaacgaactaaggatgtagcttgccaaatactcctccaaacaaagcttggattccttccaagttcagccgacagataatcatcatgtgggaagtaacgagctttgtagattctagtaaccaaagaattcgggtgcgtcaagaatctccaaccttgtttagcaagcatagcaaggttgaaatcatggagaagacgaaaacccaagccactttcatgttttggttgagagagtggattccaattcatccaaataataccgttgcctttgctaccagtagtcttccaccagaattgagccattaacttttcaatttcatcgcaggattatggaatattcgtaattttcttttatatttttcaaattaacttctaattttaaagcatacatggatttttttttaaagggacaatggattgtttgaacaaacgaatttttaattgttttgttaaaaaaataacttcatagtcactacgattaggaatttaagattttttaatttttttttt

SEQ ID NO: 336618 - DNA, 757 bp, Cannabis indica
ttcttgttgtaactcgttccagaatggagtcccccgtacggatgcctgcttggaggagagcaagctgttgtccgtcatctacttttctttgttttagaggcttcttccatgaacctcttgatgaaattttccagtgtctccgtaggtagctgcttgatgttagtcaaggcgctgacctccagattgactttccttgctgcgacaaactgtctccggaagctggtttgcaacttattccagcaatccacggatcctggctccagtttcttaaactattcctccgcatattcgcttagagtaagcgggaagcacaaacacttggcgtcattgctgaccctcatgactgtgatcacttggattagagttcccagtataagctgccatctctagcatcttaaaatttttggggagctctgcttccaggatatgtctggcacatggctctcggtcctcacaattagagtcggagtcgtcgcctttctgtctcagggagactcgggtgatgtcttttcggagtatggcaagttctgccatgattccttcgttcaacgtccccatggagaacgcaggtccgtatttcttttggtcaagatgatcctggaggtcaccttggttcccgttaatctgatttctcagatcaatgggaggacatttctgcccccttcttcctctccctccgggctcttggtgcacggaaacgctctttcggtcctctcgatcttgagggccaagactccctttttggagttttcccctc

SEQ ID NO: 336619 - DNA, 714 bp, Cannabis indica
aaataatttccaacagcttgtacgtacatcatataacaaactgatagagccaagacatgcgagtctatatatattggtttatcaaggttgttgggtcaatgggaccagctcgcaacatagagagtcgatgtctatgttttcgcaggaggatctgtggggatactcgcatatatcctgatatatgcgggttaaagtcgttccttggtcatacgtaatgtgagtcgtacggatgcgattagacttggttgtattcgcatcatctcgctgagtctggttcaggcgaggttcgtactcgaggggtctctgattggcatctcagctcctcgaggaaagtgagtacaatttatctttatgcttccagcgagggaaagtccctacaacgcttattcctccaacaagtgatacattcgtcgaaacttcagcttttttcgggggtgcgtggaagattcagacagtcttttatgccctcttttagaaaaatctcactataacacatgcccctagtttctcgactgacagatgcggtcatgagggaaactataatcgagagacaggcgaagagatgtcgcgaggtggtgacctttggttgttccatcgagggttttaaaaattgacggctgtaattattatgcttaatcctatttatggtgccacgtcaagaaactctttagattccgtgtaggcgtgcccatggataaccgttagatgggatga

SEQ ID NO: 336620 - DNA, 1015 bp, Cannabis indica
attgatggttgtaggtagacagaagagaaagaggaaaggagagagagtgggtttcttagtgcaagggatgactttgtttatttttctaaggtatattttctgttgttgaaggaatttttacaacaccaaaaataaataataataatagtaataagtaaggaatatacgcgagtactcaacctagaacagcgagtattcaaattaagaacacaaaaatactttgcaaaaactagaaatacaatgaacaaaagagagtatagtggttcaatcagatcacggtctgcttaatccactgttgcaaggattctgtcttatctatttcacggcggatcactcctttatatacaaagcaagtgtcctatcatttacacaaggattgcattcattatcaatccgttcatacattgattactaaaaaacgtaaacataataaaagaagaacaatttccagcttaattcactaaatacagcaacgtatgtgacttttatagcgtgaattggttgttcatattcttgcacaagctcgaaagcttaggatgcattcgagactagtcgagtctaggatgtatgcatccttttaaagtcgcttatacgaacatcatataacaagctaacagagccaagacatgcgagtctatattggtttatcaatgtaatgaccgcatatgattaatactttggattattaaataattagggtttatgcatgagatttaattattctttataatatgcatatcatggagatttatttgagtttgatataattaattaggctattctgtatgaattccccaataagtattttagcgtgtctttcattgagttttgaacgttatggtttagggtcatgtaaaacgtcaagctacgttttcactcaggctgaccggcaacttgagcccggaacgaggtaagatagcataataatgtatatatgaatgtatgcttgtattaattgtttacactactaaaactaattgtttatgtgattgtaagagtgttagtatagtgtagg

SEQ ID NO: 336621 - DNA, 1133 bp, Cannabis indica
actcaattgaactaccatgttcttaatctatgcgtcacgagaagatccattggttgactttaacgaacagattgaagaacacaaataatgcaactgaactagaatctaaccatctcaggatagagatcatttgatctaagatcaactaggtgaaattgaattgaatagttattacggtaagtttatcatatcttatccaagttcaatatcggtcccttctgatgcataatccatacatccaacccaagcttactttaagcaatgccctggatgttggaatatattttaccaggatctagatttactaacaagtatgtttttaacatcctaataggaatttctaaaaagatgaatataaacacataaaaggtattaggaaccttacagtggttgcagcggaattaaatgactctttccgctcaaatctctaacccttgtatcctttctgtcgcagagtatcaccaagatctgggcctgattctccttcttgttgttcggatgcttcacagtcttacatactatgattgaggactcgttatgtgtgggcatgtactcaatcactaatggttgaattttgttttgtgaagaaaggctatggtatttttgaattagaggaagaagaaggaagaggtctcataaacctagagagaaaactaggtttttagctttagaggcattagttggataatgagaccatagccttccttttatactaatttctactagggttaagttgaattatttggaataaaaaattgataaaattagagtaaaataaccacctagtggccggccacatagtgggccctacactagtttggtttttcctatttttctcaactattttatctatttttcataaataccactttttgcaactttaaccctataaatgcaagaaactatttatttaataattaaaataattatcaaataaaattgtcatttataatatttattaattagactccacaaagtctcttaattaaaaaattaaccctaaaataccattttttcacaatcaagccatatcttagtgaaaattcataaactagacatagtctaattttagaattaaaattgatcaactaaaatcaattaactgagtcttacaagcagtttgtctcaactag

SEQ ID NO: 336622 - DNA, 423 bp, Cannabis indica
aggtatctttagatactaaatattatattcatgcgtattttattgagattgactaacattctagaaacatagttaaccaattaggttccaacatactttaatggctatattgattcacataaatcaacctttgattacattcttaagattatcactaagttgtatcgtggagaaccttaattgttatttctattataaaagtcaaatttatatactgtttttgaggatacaactagtatggtatattatagagtttcatactaggcctagagtttagaattatattttaggccattaaaaattttttgtgacaaatgcagctacagtatttatggctaagaactataataagagtgctggtcgaagctagtatatttatattaagaatttaactgtaaagaggcatgataagtgctcattaag

SEQ ID NO: 336623 - DNA, 767 bp, Cannabis indica
gcctatttcacaatcttcatttgtagttaaaaaattaatgtgacaatagacattctctcctaattggtagagctcactagtgctctgtgttcattgctttgatatattccatttgttataatctgcatgcatgcatgcatgcaattaattaatattgtaattattattattattattattattattattattattattatttgtgaagaattaattaaaataactacaaacataaaatatatataggtaaattattataattataaagtaattaataaattaaaagggtacgtagtgttacgtacgtacctctgcgagatctcctaaggtgacaataaaagtattggggagagggttgatagggaccacgtgccatctttcttgacttggaagccatctacttggttcaattgaaggagaaaggtaatgccacattcatcacaatgaggggcaaaacctgtaacttgctctgcttgagagcatggagagtaaaaatatgttatataatcaattttatttttcaattttaaaaataaaaaaacaaaagtgtgttctataactttcaattttatttttattttttaattttatttaagtcagttgtagctcagggtttgaggccggggccgggggccgtggtccgagtctgggactggggccgggactggagtctgggtcccatagtctaggttggggtcggagtctaaaatactgattaagaaaaaaaatatttaagaaaattttgaaagtgatttttttttaaaaaa

SEQ ID NO: 336624 - DNA, 850 bp, Cannabis indica
caaaatggtcattttgtcccataagcttttttcctttagtggacttagtattaggtagttatttgatttattttaagttatgtttgctgaaataagttgattaaatgttatttgctcattttattgaaaaatcaaaaagaaagataaaaaaattccatttttctctcaagccttcctctctctttcgaacccacctagaggcagctaggttttggtgaattttttctgcatttcaagctggtttcaacaaggatttagtgatctcaagttcttggtaagattcttgaagcttcctcttaagtttcttgagtttaagaaaagtgaatttttgcatgcttgatgattttgtggttgtggctgttgtttatgtttgttttttatttctaaagcttaattatgctttaaaatgaagatttaagcaggtttttgtggttgttatttggttttattcaagtttggagttttgaactcaaactttggttttatgagtgaaatgttgtttagcttgttgtagctgctatagttagttgttgttgtgttctgaggtttagatatagataattatgttgttaaatgcatgaattagaggttgtttgaagggttagtcaagttttgagtttttgaactcaatattgaagctttaatggtgaaatttgtttctgtgaatggatgattattttatcacttggaatatgttcattatggtctaaatagcaggtctggagagtctcatgtggtttggggttgttttggttgagaaatgaaatttttagagtttcctgcactgaactggaatttcggttcagagaggcatgtaggaatcgaaattccggttggggaactggtctac

SEQ ID NO: 336625 - DNA, 962 bp, Cannabis indica
aactctttctctttcttcaaacctcactctctctcgatttccctgaaccagctaggattggaattttttttgcataattcaaaaaattttggaagcttttaatggtttcaatccaaggtaaaacttcctaaccttttcctttatgttttcttaagctctaagttaaggttttgcttgattttgtgtaatagggttctgtgattttaaaattgttggattctgtgttttgatgatatattatggttgttttagctgatttgaagttagtatgttgcttggtttggttgtttgacaaggtttgagttttagaactcaaactttagtcttcaatggtgttttaagtttcaggagttgtttcttgttttgttgcatgttttctttctattatgatgttattaggtgatctggaagtttgtgcgaagtttggggtcgatttgaggttgtagtgaggttttgtgtgttccctgcactgaaccggaattctggtttagggggacctgtaggaaccggtcgaccggttggtccctaggaaaccccacagaactggatttccgtttggggaatcggtctactggttggggcatttttgggaaccttagtttttcctatttttgtaatatttagggtattaccatgttatccatcggtaaggaaacttttagttttaagtttaagtccccgaaaagtgatttagcatgtcactcaacaattttacgaataatgtgatttaggggcctgtaaatggtcgagcagctgttccactcaggttgtcggtacacctgaattcggcaacgaggtaagattagtataatgatatgcatatatgtttacatgtttagcgtacatgtttattaagcctatattacgtagagttatattggatactgatagatgtatgtttggctcagatacttatcgacactatcacatcagtacggctagagtatgactaacgtactgag

SEQ ID NO: 336626 - DNA, 729 bp, Cannabis indica
tgtactatttagtactaccatacgttctataactaataactcaataaaaatattactctaaacttttatattatttaataggtgggtaatttaataaaatcatgaattttatgttggatcaaaaatgtaaacttagtataactcatttatttagtaaatttagactttcaggaactaacttattgttgagttttgtgccctaaataaaactcattacaatatgattagttatcaatttaagagatttgaagtgatttatgttaacatgtatttttcatgtttatggtttgatatatatttaatatatacaataagtcagttaagtccagaacatatatttattcacaattatagtattgtcaacacagtggaatgtgattgtgattgtatgattcaaagactaagtccctatcagtattttggatttacactgatgtgataataagcgatgaagtatacttacacttggagtaagtgttatgttctttctaggacattggtaaagtatattggtttcgaatgtatggagtatacattggattggaccgatattaaacttagacaagatattataaacttaccgttgtatctctccaagccaatatcactagttgatcttagattaaaagaatctaaatcatgatatgtttaggctcaatctcaggagtgctattcatgttctttgatttattagttaagcctacgtttgggtcagggtgatacgtatat

SEQ ID NO: 336627 - DNA, 733 bp, Cannabis indica
gaaccattttcatgtgaggatctggtcttgcgagtcactaaatctgacctacatacatttgcacggttgaattcgattcgaatagggactctacgtcctttagcatctcagcaacctcaccttccttttaccaaccctgcgattatccccacgcaagacgtggtggtctcgattcccattttttgatgtggggtaactctaccttttcatccatttgtcaaagctatcctcaaacactatgatgtctcccccttccaattaattccaaacagctatcgcatactcctgggtttttatgcaatgtatatggagtatgtccatgggggaactaacgatggaggactttagttatttctacgataaaaaaaagttggccacgacaatggcttttactattttagcaaatggccaactctgacatgaatggggtagaaggtacgatttccaatatgagagattggaaatctaaatggttctacgcgtttaaagcaccaggagttaggactgacttcaatcgtcgacctagtatgtcgtgtatctcaacacttagtatatatttttagtaccttgtatagtcactagtgtctgttttttttatcgcagataggccacctcgacttgtactggattctgctcgcagggaaattgtcaaagttctaggtagcttgcctgttcaagatcgcaattggcggttgctgtgtactactgcgaaattgcgagaacacaagcttat

SEQ ID NO: 336628 - DNA, 797 bp, Cannabis indica
tcaacataatgtttattgtcatattatttctcacgtctatactaatttttttgaatgtaagaatgagatgtatttttactttaaaatgtaaaagtactctattttcttacatgttcatatagtgtaatatataaacaactcataacaaactatttacaataatataaaacaacttgaatttatacaatatttcaagttgaacataagatgttgtaaaaacagcacaaaagaagtttcacaacaacatgaaaacaacttattcattctttaaattgtagtcttttttttttttttttctttctctttttcagtttttccttcccttttttagattaaaattataggaaaattaatcgtattacttaagaaatattttgatttggatgagtcaagagacattgttgatgatatgatgttctttctttctctctctttatttttcttgtgatcaacacacattttttttttttatttcatttcattattgcgtgtacagtttattttagaaatatggacaacaacgtaaaaaaaaaacaatgataataacattaaaaaaacttagtttatattaaaatttaaatacgcactcactattcttattatactatccaaatttaattcaatgattttcctttcacatttttaaaaattattagaactaataattaatgcaaaaattactaatataatattagttatttttcaattttaaaaacattaacaaactaatattctataaagtaaaaaatttaggatgttgacgcgatttttcgtcaactgatctaagaagatcataa

SEQ ID NO: 336629 - DNA, 3978 bp, Cannabis indica
tatggagcccttatatgagaggttcaggaagcaagcacctccaatatttttgggagggcctgatgttttaaaggcagagcaatggttaactgtgattgaaagaatattgaatttcatgggagttatcggaaatgactgggaggaatgtgccacgtttcaattctaggaagatgctctggtgtggtgggaaatggtgtccctttcaaaggatgttaccagaatgacttgggaagaattctgggacttgtttaatgctaaataatataatgaggcggtccgcagtgcaaagcagaaaaattttgttaagttggtatagggcgagaatatgttagtgactgagtatacgaccaagtttgatcgcttggtcaaactagccttagggattataccaacacactttagtaaaaaggaaaagtacttgacaggattgaatgccaagattaagcatgatccagttatcaccactaatgacacaacaacctatgctgaaatggttaacaaggcccttcgagctgaaggagcagtaaaatttctacaagaaacatgtgaggctcctggtgctggtggaaccaccaccctccctatttctggtcctggaacggagagtggtgattccactattgagcagaagaagagaactttcccacctacagggagttcatggcaaaacaagaggtttgtggaaaccaaagtaaagggggacgtcagacctactcatatcctgaatgcccgcactgtaaaaaacatcaccctgggacttgtaactggagggcttgtttttagtgtggatcaattgggaatctcaagaaggattgccctcagttgaagaaagaggaacccaagccagaacctaaacctgcaccaacacgtgtatttcccatcacttaggcagacgctgtcgccagcccttcagtggttacaggtaagctctttattaaaggttcacttatactgtattatttgaatttagagctcaagctcatatgttgcaacaagagttcttagtcagcttggtaggcctagtgatgtatttgagatgggatttggaaccctatttcctaatggggaattaattatttcaagaaagtgggttagatctgtgttaatcagaattgaaggcagagaactgagtgttgatctcttggagttaccattggccgagttcgatattatactcggaatggactttttatctaaatactctgccaatattgattgcaaatgtaaaatggtaatcctccaattggagaatgaggaacaatatgttttttttttgttcagttcaaggttctcatatccctagaataacagcactaaaggctagggatttactacgcagtggatgtgtaggatttctaacggttgtaattgattttggtaaatctgtgttgcttagacctgcggaggtcaaagtggttaaggaattcctggacgtgtttcctgaggaattaccagggttgccacctcagcaggagatagatttcattattgatctgatacccagggcagaacctgtttcaaaagcaccttaccgcatggcacctgtagaattgaaagaactaaagatacaactccaggggatgctggatctagggttcacttgacctatagtgtgtcaccttggggagcactagttctatttgtaaagaagaaggatgggactcttcggatgtgtattgactattgggagctgaataaaataactattaaaaaaaataccctttgcctagaattgacgatctgttcaatcaacttcaatgcaagatagtattttctaagattgatttgagatctggttatcatcaattgagaatccgggaggacgatattccgaagacagctttccggaccagtatggccattatgagttcttagttatgtcatttgggttaacaaatgctccagcagcctttatggatctcctgaatagggtatttaaggatttcctcgataactttgtagttgtatttatcgacaatattcttgtgtactctcagtcggaagcagaacatgagcagcatcttcgtatggttttgtaacgactcagagatcataaactctatgcaaagttcaaaaagtgtgagttttggctgtcacaagtatctttttcgggacacattgttgaaaaaaacgggattatggtagacccagagaagattaaggcagtaaagaactggcctagaccgcaaacagttactgaagttcgaagttttctcggtttagcaggctactatcagcgttttctagaaggattttccaagattgcaatgccattatctgagttaactagcaagaatcagcggtttgtatggtcagataaatgtgagaaaagtttccaagatttgaaacaacggttgattacagctccagtcttagccatgttgtctgatcaagagaagattgtagtgtactgtgatgcatccaaatagggtttgggttgtgtgctaatgcaagcggataaagtcatagcttatgcttcatgacaattgaaagattatgagtagcgctatccaacacatgacctagaatttgcagcaaaggtgtttgccttgaagatttggcgacactacttatacggtgaacgttgtgagatctatactgaccacaaaagtctcaagtactttttcactcagaaagatctgaacatgcgacaaaggcggtggttagagttagtgaaagattatgattgtgagatcctatatcatcatgggaaggcaaatgttgtggcagatgccttgagtcagaaagggcctgatcagactttcaatatggtaatgatttcccctcagctagcctcagatatgtctagggaaaatattgagtttgtgatcgggaaattatataatttgacacttcaatcagacttattggaaaggattagaatggagaaactagaagaccctgaactgcttaaaacttgagaagatgtcttagtaggaaaagctaaggacttttcgatctttagcagtgggatgatgttgtttaaagctcgagtgtgtgttccgagaaacattgaacttaagaaagaaattctggatgaagctcacactaccccctactcattgcattcaggaaccatcaagatgtatcaagatctgaaaccatatttttggtggtatgggatgaaaagggatgtggtagactatgtcactaaatgcttaacctgacaacaaattaaagcagaacatcagtgcctagcaggattatttcagccataatcacttcaagaatggaagtgagaagacattgcgatggattttgtggttggttaacgcaggaccacaggattgtacgactctgtttgggtcgtagtggacaactttacaaagtcagcacatttttttgcctgtaaagataacatatacagtagatcagtatgctaacttgtatgtgaaagagattgtttgccttcatggggtaccaaattctattgtctcggatagagaccctaaatttacatcgaagttttggatgagtttgtagaaggccatgggaactagtctgaagttcagcacggcctttaatcctcaaacagacgggcgatccgaatgaactattcagatacttgaagacctgctacgagcttgtctcatggattttggtggatcatggagtaaatatttgcctctgattgaattctcctataacaatacctatcaaagtaccataggaatggctccctttgagctactctatggcaagaaatgtcgctccccaattcattgggacgaaaccgaagaatggaaatatttaggccctgagttggtccagaaaacaaatgaggcaatagataagattaaagcttggatgcttgcttcatacagcagatagaaaagttatgcagatttgaagcttcgggatattacatttcaactaggagatcatgttttcttacgtgtatcaccaatgaaaggcatcaggcactttggaaagaaaggcaatgtaacaccctaactaacataggcgtattacgtgatt

SEQ ID NO: 336630 - DNA, 1141 bp, Cannabis indica
ccattggtcaactttaatgaacagattgaagaacacaaataatacaattgaactagaaccttaccatctcaggattgagatcacttgatgtaagatcaactagatgatattgaattgaatatatattacggtaagtttattacatctttacggagttcaatatccgtcccttccaatgtatactccataaatccatcccaagcttactttaaccaatgccctggaaaggacatatcacttatccaaggtgcaagtaaactacattgtagattatcctatcagttaaatcctctgtactgataaatcataggaatacatttaatcacacaatcttgattactttctactgtgttgaaaacacaataaataagaatatcaatgtgataaggatttagatgaatttattaatcaaataaacaaataaatgatcacttgaacagaataacacattaaataaataattaaaataaatctgtttctttattgataattgaataaaaaagattacattgacatagagttttattaagggcacaaaacccaacaaactctcacttgcactaacataaaataatcagtacatttcaattaatcctaaattcagtctgtgctttacaaatgtagttacagtcaaaactttggtgaatggattagttaacttgtcttcagtatccactttctccaccagtacgtctcctcttgccacatattccctgatgatgtggtatttcctctctatgtcttcgcttctattgtggctttaaggctcgtaccagtgttgtcacaaagtaaaatcagtggtttttccattccaggaacaacaccaagtcctgagaagaactttcttagccagaccagttccttagcagcctcagcggtagatatgtattcgacctccatggtagtgtaaagaccgctcaactttattttgaaaattagcagataattaggatttaattatggaagttgtttattaattctaaattattaatttatggtgatttatttgaattcagaatgcattttatatgtcatatatggaaatttcataattttgcatattcagtgcccgacaacattggagcgcagtgtttggctattagaatcacatcctagtatttttagtatagcggggcgatat

SEQ ID NO: 336631 - DNA, 1380 bp, Cannabis indica
gccgctagggataggtgacccgaagcggcctccctaaccaatataaaacagtagcccaacgaaacacttaaggcatacttaagtcgttttagcacgactgccggcagggttagaaatttgtatgacatcacacaacttatagcccttcaggcagggatctctattgatccattaaccgcagggggcaagttgtgggatgacttataaggacgtccagtgagaagcatcactgagttcaacgagagggctcgggtgtttgtctggaaagaagaagcgcgaaaggaaatgaacttgttgaaaacaagctcgagaggtaaacccagtaatgtctcaattggaactgcttccacgagaattgataactcgggggcttctgtctaaagagaaaggacgaaattaaggaactgttgaaggatagaaagaaacaaaagaagcatgacaaagacgtgccagtgtatactatttataccttgcttagtgaaacttgggagaatatttacctcacacatgagtagaaggtggccttcggcaagcccgagcctatgaagaattcaagaagcaaaagagatcctaacgaatattgcaaattccataaggatattacgcatacgatcaacgaatgtcgtcaatagaaagacgagatagaaggtctcatcgctcaaggccattttaagcagtacgtgaaaagatagggccagggatacaaccagcctagttttcctaataacccaaataaccaggggttacaacctattcctgtggaaggagaggacatcctacttatttcgagagggccgcatatagcaggggaaagcaataacacccagaaaagatatgtgaaagaaataaaaaacgagcagtccgtctttgctctagaaccttccaagaaggtgaaaatcgaggaacctcccattacattcacggaggaagatgagaaaaacgtgagatatcctcatgtcgatccattggtgataaccattcaactcgccaataaaagaatcaagagagtgttaatagacaatgggagctcggtaaatatcccttataaggagaccctaaagcaaatagggatcgaaaaaggccaaattaaggccctgtatggtgaacctttgtggattcaccgagaacagtatcgccagccttggcataatcgagctcgcattaactttaggcgaggcgccttttatctggtactgttatacaagacttcttagtcggtgacctgccctcggcttacaacatattgttgggtcatccagcattgatcggactaggggcagtcagttcgatcaagcacctatccttgaaatttcaaacaccagatggcgtgggagtggtgcgtggtgactaaatgttggctcgcgattgctatcgcataga

SEQ ID NO: 336632 - DNA, 1283 bp, Cannabis indica
tatattttgatgtttcaatacaattttcttaacattctttttgggtattcaaaatccactgtaaaattacatcaataataattatttttaatgattctttagttgtactcacataaatacaatatattttttttacatctataaaatatttacttcatgaaatatttgtcaaaatctatattgatattagattacttttcattgtcctcaaagaatacaagaacatatacatgaatatacattcatctcttttagtatatttcagtcaattatatgataaatattatatttgcatactcttcaggatatatgtaagtgttgaccgaagttttcggcaaccagtcaaataatatataagaaaagctgtaggaagtttagtgcatgagatttttacgtggttagggcattaatgagccttagtccacaagtctttgttattaatgagagtatttattacagagaatgttcttggtggatttctctcctattttctctctttgatccctttgaacccagaatcctcgacccctttttcagtatgtttgtggggtatttataatatttttctggggtgatccctaggaatggatcacttgtctttctgtgttagcttcataggggcacatattcccagcagatacaaaataggaaatacatgacctatactgtaggtatcttaagagttaggtggatattatattttatcccctcttgattgatgtgattcctcataaagtagtcgtcactagccttattgatcatagtgtagtagccaaaacaggggagttacgccatctgtcatgtcagttatacagacttcaatacgtcttcccccaatacggtattaaatgtgaggtgattgttcaatagattccagtacctcccggaactgccttagcacgtctttggcctccgggagcataaagatactctttgtgtctcctccaggagacacctttcctgagtcactattctcttgtctaagacttagctaatttccataagtgctggtctttttggttttacgtgtcatccttatccaggtccacgtattttgagcaaaatcaagggcaacagtaagattttattaagaacacataatcttcaggatatatgcaatattttatcgataatgcataatcttcaggatatatgtataatttatatagattttctctactatatcatagacacgcatgtattgtaaatattataaatgataagaacataatatatatatacgaaatcaataataaacatataaaaacatatacatacatata

SEQ ID NO: 336633 - DNA, 596 bp, Cannabis indica
cattgggaatgtcgagaattgttaggatattagaatttcccaaattacatcttagtgacctttagtggctattagtatggaggggcaaaatagtcattttacaattctttattttgtcctttagtgagacctgagttattttgttaaaatctgattttatgtgtttcaagctgatagttattaagtaaaatcaatattatttcatttaattttacaaaatatcaaagttaagcaaaaatcaaaatttttctcaagttctctctctccttcgaacccacctagaaccagctagggtttgggttgtctttttgcattttaagtttgttccagcaggtgttaggagatcttaagctcttggtgaatttcttgtatccttctctttagtttcttgggttttaagaaaatgaaatttttcatgaattagtgtttttgctgctgtggttgctgtagttatttagtattgtttttagaggtttgattatgctagattatgttgaattaagcttgaattgtgggctgttattaggtttgaggaagctttgagttttagaactcaagcttggctctttaatggcaagttttgtttcagtgcatgt

SEQ ID NO: 336634 - DNA, 1094 bp, Cannabis indica
aagtttgagttggagagttatattattattttgtcttgtagtgggttaatgtttttaactttttgttatttttgtttgttttaaaagttttttttttttttactaatttttcctttttctatttaattatttaattattttatttagatatatatattttttttttgaaaaataagatcgttcattaatagataaaattagacatcacggtcattataaaataagtttgctagaatataagaaacatgcaagctaccaaagtgattgtgggtaaaagttcacttagccacattataagtagcaaaattacagtttctgaggatacaattaaaaacacaaccatcaaaacaactagagagatcaaagcaaaagaataatagttttcgatctcctaacatgacgacaagcgattgagtgaattgatgatcactctagagtcactctctacaaagatgaatttgtgtcctttgagctttgccgtatcaagggctatgtgacatgcagccgcctcgccacaaagggcatccgaatagtcgaacctagccgtagtaacccagaccacctcaccaaagtgctctttagcaaccaccgtaatacacaaactttccaaacccactttaacatcatagtttagtttgagccaatcctgaggaggagggcgtcaatcttctctctagaccagggtcgaagcagtagacccacgtgttgcgctcacacatctattttacatttacaaccttactagggtttgtctcggttatagttaccgagtccaacctggttatgtcttacccgcataactctactcacatatatacataatttatacattatgctcttaaaatagtttatcttgatgatgtttatcaggtctaacccagttatgtcttcgacttcgcttgaaaagatcaaagggtgaaagcatcacgggaaataagacagacttcaaattgaagacatgtcatacccccagtgatccttcacgcacgaaaaacatcgtgcatgcgagagtcatattgaattttttatgtagcaagctttggcttccgcgaatgaaagctaaagttgctaaaaaattcaagcttcgactttgc

SEQ ID NO: 336635 - DNA, 603 bp, Cannabis indica
tcgtcttctccagctgcggacagttcttcaacacattctactcatctcaaacgcaatcaacatgcacagaaagtcgatcgtctgaagatagagcttcagcaacgatcatcgacctccgatcgtcttctacagctccgatcgtcttcaggtaatttcttcaattgcttctaatcctcttcttaaccttcataacctcaaaaatcaatgctaattaaaattgaaaacgaaaaattgaaaaaacaaaacaaattatacaaagacattacaagtatatacggattaatggtatataaacattacacgacattttaatgaacaaatataaaaaataaataatcggttaaaacaatgtacaaaatcaagatcaaccatatgaaacacatacataacaggcaaaacaaatatataccataaccaaaataaccagttaaaaacagtaaaaaaataatgagagtcacatttaacaaaacataacagcaaaaaaaaaccggttaaaaaaaataatttttaaccaatagaaacaaaacaacaacacctaaaaccagaaaacaaacaaaaaaaaccagttaaaaacctaacatacacaataaaacataaaaatta

SEQ ID NO: 336636 - DNA, 1188 bp, Cannabis indica
tcgcagatggatctgcccctgccgctcccaacgcttaacttttaatatttacttttgttaaactctttcttttatatgtacatgtggtacaagggtactcgcaatttgtactttggacaagtttatatttatttctcttttgagcgaatttacatcctctcggggatatttatcgataacattttcgcagtacacgggtactcgcgtatttttttatttataatatctccattgcgacttaactacagtttggtgtaataagtattaaggtagaaaaatttcaaaacttcgaaaaaatttcataactctttactgatcaatagtacatagtggtatataccccctatacttaggatttttatgagaaaatgactaagtataaatacatagcgagtacaaatgatacagtgcgagtactattgataatataattttaagctctcaccattccaggctcttcgaatcgcactaccatcgagttctgtgagtatgtatgttgcgttgccaaccttttctgcgatgagatatggtccttcccaattgtccccgaagaccccatgcgctgggttcttcgtatttggcattatttttcgaaggactaagtctcctactcgcaggactctttccttgaccttagagttgaagtatcttgcaattcgccgctgataagctgcgtttttcaggtgagcctgatcgcgcttttcttctagaaggtcgagatagagcgagtgcttttcttcgttctattcaatgttaaaaacatctcttcgtagggaacctgccccaatctcaactggtaccatagcctcgcatccataagagagcgagaaaggagtctcaccagtcgtggatcggggggtcgtgttgtatgaccataaaacttgcgaaagctcatctggccatacccccttacgttcttcaagttttcctttgatggtgtgctttattatcttgttgactgcttcagtttgcccattactttgcagataggcgactgttgagaaccttttttaattcccaagtcttcgcataagtgtcgcatctccttacagtcaaattgcttttcgttatctgaaatgagtttatagggaatgccaaatcgacagattatggagttttagactaactcgggcaatttagccgctgtgatggttgctagtgcttgggcctcagcccattttgtaaagt

SEQ ID NO: 336637 - DNA, 662 bp, Cannabis indica
tattgtagctgaatttgtcgcaaaattttcttattggcctgaaatataattctgaactctaggcctactaatgaaactctataatgttagagtttttcatcactcataaaatatgcaataacaagattcaattctatagataaacatattacatataattataagtatgaaaaacataaatctaaagaatatctttgttgattcaaagaaaaacactcaaatagtagaagtgtaccttaatccatagatagtgatgatcttaatccatcttgtagagctaatctttggggtgtttttggataatgatcttccaagaaaacaagacttagagttttctaattttctctcttgatggggaaagatgataatagaaattggctcttgtttcttggggaccactaccaatttataacctcatagctaggttattaatttgaagtatttctaatttagcccctcaataaattagaaatatcgcttagggtatctagaaatttagctcatgacactttaatatccaatgacccacacttactaaaatgatcactttattagggtcagactttatatagcaatacacacaaatacatatgagcccacattagagattttaattcaacaatctcctgttgggttttatgccctaaataaaactctgtttc

SEQ ID NO: 336638 - DNA, 525 bp, Cannabis indica
acttggagattgttgtgtgatttattttctaatgctcctaaccttccatggttggtcatgggggactttaacagttacttgtatagttcggataaaatagggagtgatcatcttgatacttcttctatgtctctttttgctgattttttgactaattttaacatgtttcctgtacagtttcttagattgggttgtagtgtcagaatcttggagtgatatttatccaaaccatagtcttcagcatcttagttattatggctctgatcaccgtgttcttaaacttagcttagctccctctaatattaattacaatgctaataggactaggcgatttaggtttgagaatacttggcttgaggacccctctttttatgatgtggttaaaaatgcttggactagtacttgtgtttctaattctgttcaagatcagcataaccatcttataggcgggtataggagtttcctcaagaagcaaggggcttgtatctcttccctaaaaaaattggaatagggacaataatctcc

SEQ ID NO: 336639 - DNA, 732 bp, Cannabis indica
tagtgcattttagcaattctcgtaataataatgggtaaatactattttgaatcttgtgttttgcaaaagttatagattggaccttctgttttattaaatgacaaaatagaccctgtattttccaaaatggtaaaaataggaccctgagcttaattttcgacaacttttttttaatataaccaacttgaagacaattcctaatacgaatagatacagaaaatataagcagttttgtgatttaaaaccttatatttcgacatgatttaaaatgtaagcaccttttatttgttttgacatctgaaaaaaaaaaaatagtccaattttttttcaaggtttctacattgtagttatttaagacatcttgtaaaatttcgagaaatttgaacaaatttaataagccaaaaatagggttcaaaatagtatgttgcacgtgatattttttttattttatacgtgtgtgaaatagattatttgaactctattttcagcgtgttaaattttttaaaattttacaggatgtctttaataactaaaacatagatcaccacgaataaaactagactaaatttttgttccaaatgccgaaaaagactgcatcggtaaacctattttagagggtcatttgtagaatttttctattatttatatgaaaaaaatacatacaaataaaaaacaattaatgaaaataaaataaaaaaaaaaaaaaatgaaaaaaatccgacctaccggatt

SEQ ID NO: 336640 - DNA, 999 bp, Cannabis indica
tcaaccaagtcacaagtaccatttgtatttaaggcatttattctatcattgcagcaagtcaaccagaatgagatatggcttcacgagcagttttaggaattgagatagaatcaagagaaacaataaaagagcaagaagaagaagacaaatgagtataagaaatgaaagaagaaataggataagtacacttttacctttacatagagtaatgggaagatcatcatcgccgggctctggatttgatgacgaagaagtaggttcaggacatgaagcaggaggtggacgcctggagtacactttaataggagttagaggcggaggaggcataggcctgttaggggctgtggttgagatatgttaagtaatggaagtctttttaggaagtatacagggtgaggaataggttacccgtttggaatgtgatagaatataccaacaaatcatcatcttgcccatgatgagtaagaattgatagagacataacacagggtgcgtattccatgaaagtaacatcaatggagacataatatttgttaagacgggacaatagcacttgtgctctttttgaagacgagaataaccaaggaatacacacttcaatgatttgagatctaattagattacctgtggaagaactttacgaacaaagcaagtgctactaaaaatccttagctcaataggaaatagtgggttttttgggaaaaataattttgtaagagatctcaccatgaagaataaaagatggcatgtggttaatcaaaaaacatgcagaagaaataacacggggcaaaatagtttaggaacatgcatttgaaataagagggctctaattgtttcaaggagatacctattttttcgttccgctacactattttgagatggagtatcaatacaagaagtttcatgaagtattcaattttgaaccatataaaagcgaaataaaccagatttgtactctttggcattatcacttcttaaagtacaaacaaacacatcaaa

SEQ ID NO: 336641 - DNA, 708 bp, Cannabis indica
aattttaaagtaatcgaatctttccaagttttttcgaaccttctctaaatatttcgccatttttaagcctttggcctggtattccccgaggacctacttcaaaatcagctgtgaatcactatggcaaatgaggtttttgactttcaacgttttgactgtctttaagccaggaatcaaggcttcatactcagcctcgttatttgatgcgtcaaattgaaatctcaaagcatagtgaaacttaaagccttctggtaatattaatattacccatgcacccaaaccttgctcattggatgcaccatccacgtataacttccaagtttctgcttctcgatgtataggcagaattttttttggagttataccttctatcaagaagtcgggcaaggcttggcccttgatggatgtgcgagggttgtatgttatgtcgaactgccccagttcgattgaccattttatcaatcttccagaagcatctggttttgataaagcttgtctcaagggctgatcggttaacacttttatgggatgtgcctggaagtacggccgtagcttacgagatgtgtggactaggcacaaagcgagtttttctagagggggatatctagattctgcccctagcaaccttttacttacgtagtaaattggttactggtgcttaccctcttctcgtactatagttgcactaatcgcatcttctgagatagc

SEQ ID NO: 336642 - DNA, 925 bp, Cannabis indica
ttttttacaaaaagagcaatcccaattcctagagaaaatttattaaaaccaaaaacttataaatacgataaacctaagtttttactctgtctaaaccctaaaaataacctaaaaaattaaatcaaaattactaaaaccaagcggagcaaacaaaggtgcaattaattaacaaaatagggatcgtaacaaaggaaaatggaaaagaccagagaaaagagggataaatcacttactgttcaaaaatgggttttcgcacgacgaaaagctttgaaactgaggttgggatgagtggcgtgacaacttctgtgaactcctgaggttgaagaggatatcttaaaaaatgcatagaaaatatgtcaatgacaaagagggcatgcagagcttagagaaatcagaaacggtttttcgcaaaaagagattgaaatttttgaaaagacaaaaatggtcgaataatggtttcttttcaatttttataccttaagattaatcaacggtagattaaaggaatagagatcacactgatggaaacaaggagaatttgaaaagatgggtaatgaatgctaatgatgtgccttgaaatcatgaactgccaaaattcgaaagcatgcaatttttcaaattgggttaagacaaatataccctttctaatcatttaaaaagtactttttattaaaaaagaactttttaaggggcaattattatatctgaaatttggctacacttcagagagtgacatgtgtcaattaagtagaatatgaaccaccagatataataacgattatatcatttaatgcaaaaggaataactcattaaatataaaattgatagagtatattcataactcgctgactgcatagtcttaggcaagacaaggataaacagactattaatatatgtattaacgagacactagcctgcctcaaaa

SEQ ID NO: 336643 - DNA, 618 bp, Cannabis indica
actagaacttaaataaaactatatctacgtggctcattacgtaactttcttctagtttatatatatactagaaaaaatttacgtgcgaggcacgtatactaattttatgttaggtattttttattttatttaaaaaatataattaacaattaaagaaaaaaatattattacttaataggtgagattattattatgtatatctaaataatgtaatttataattttgacaattaaaagtaaatactggaagtaatatattatagtgtttaagaaaacttgataatttaagtgtaatatgttcttaagataatctaaaaataaactaaaaattcatgttcaaatactaaagaaaacacaacttaaatgtgtgtgaaataaaaatgaaaattaaaaatcaatctctaaattattgacaattgaagataacatctatctaaaagttgtagataaaaaatctctttttcacaaattataatgtgaaatgttttagttaactttatatataaatatatatatatatatatatatatatatatttatatggaacacttctaaatggctaatacctatagatgggcactaaaaaaattaataagataacaatctaataaccttttat

SEQ ID NO: 336644 - DNA, 631 bp, Cannabis indica
ggaccaataaaattgtgccacgtgtatattgtgtccacatggacaagccaacctggcacttaacagctaaatttagacggaaagggtaaattgctaacagaatagtggttttgggggtttacccgcagaaatttgggttgtggggtttaatgaaaccaaaagaaaagtattgggggttttgccgccatttacccatacaaaaatagtgttacacactatagtgctctatagtaactctttgaagcaacacattataatttgtctcacatgttttatttaaaattataatatttaagactccatattaaattgtgttaattactatatgccatattaaataatattgagctccattgctatcccattgcaatgtacattcacaaggcactataccttaatattgatacgtgcaagtgtaataatattgttctacttctcacatatagaaaattaataagctcgtttttagaatgcagtttcttcaaaggtttctagatctttaaattttgttctccacaatttagttaaataaacatttactcaaaatataactaaagataaaattaatactgcaggaatggttaactggaagattccacccctaatggggtgggaatttctcgtcttggcg

SEQ ID NO: 336645 - DNA, 693 bp, Cannabis indica
gtattttaaattaatgttaatacaacattgctatgttgttgacttagtctagaaggaacttacagtttcagactaaaataaatatcacaacaagatatccctgaaaacaatagtaagaggttaaatgtacttctatgtatgaatttaaccagactcctactgttgagtgggagccatttgagatgtaatcaacaaggaacattaagggaaagtcaagaaagatttatgaaagtgacctatatgttagataatagggatgtatatgttagaagtccttatatctacaccaactcataaagaatctgagatggtggttactcttggggtggaggagttattctagaagagtgttaaaactcatctataataattcaagctccatcagtgaagacatatataactttgtaaattcgaaattaccagaaagttattcaactgaagaaaattctacactgtgttatctctatttcattcttgaaaagaatgagagatatgtcttctgtttattcatatgcactttataagcagtaaggagttcagtatcccttgatgagtaatgcatataacaaataatgttgcataatgttttatgaacacaaaggaagtaatagtggataaagcagtagcttaccacagacttacagttccagaaatttgggttgagtcaaatatactacacttgatctaaagatc

SEQ ID NO: 336646 - DNA, 988 bp, Cannabis indica
taaacatgcataaacaagaacactacaccccttttgggatatcttcctctcaaattcgtagctgatgatagcctgagcaaagatcgatctttgaaaagactgtcttccccttcagttgatcaaacagatcatcaattcgaggtagaggatacttacttttaatggtaagattgttaaactctcggtaatcaatacacattcgcagggtcccgtctttcttcttcagaaataataccagagcacccaaaggtgagtagctcggcttaatgaatcctagattcagtaattcttgcaattgtatcttcaattccttcaattccgctggagccattcgatacggtgctttagatactggatccactctcggaacaaactcaatgacaaattcaattttttgggtaggtggcaatcgtggtaaatcttctagaaagacatccgggaactcgcataccaatcttgtattctcagtccctaatgtcagaggttggctggtatccactgcagttactatgaatcccaaacaacctctgatcatcaggtgcttaactttcaatagtgttatcattggtatgcatgccccccaaatcttacccacgaacaccattgggttagcactatcgggctcaaacactaccattttctgcttacagtcgatcgttgccccatacttagacagaaaatccattcccaggattatgtctaaatcagataattgcaattcaattagattggcagtcaattcacaactgtcaatcaagaaggacaaagaacgaatccacatagtggatactttaaggtctcctgacggtaacagggtttgaaaccccgaagcatagatatcacatggcttatggaaaatttcaataactctactcgacacataggagtgagtagctcccgaatcaaacagcacagtataagcacaacaattaatagacaactgacctttgacaactgacggactagcatcagcgtcagcctgagtcat

SEQ ID NO: 336647 - DNA, 905 bp, Cannabis indica
attgtagaaacaacattgctattgggcaccacttttgcccagtactttttataggtggcgtcccacgattggttagcaatattttttaaaaaaatttcttgtgtgataccgaggagagtgcaagacaataaaactttaaattttttattatttaattataattagctaaacttttattaaaaaatcaataaatatataaagattaaaataagtatatgtatatgagttgtcactaaaaaaagtcatgatattttataaagattttaggacaattagtgaatattgcagaagataaagaccaaaatatatgcataatgttaaaaaaaaaagcataataaacccattagaaagaaatggataagaaaaaatacaaataactttccaaatatcatttattttgtttgagaaagaaaagtataataataagttttaaacactattttttttaaaaaaaaaaaatctttgtttcttggcactttgatgttcataatcattacattattaacaacttgaatgttatttaaaataacaaataataatttattcaaaattttaaattacgtgccttaaaataaagtaaacaatatttcattagataaacagcgtgccttaaaataaggtaaacaacaacgtgcctaaagtacggtaaacaacatgccttatttagacacgctgtttacctaaattaaggcatgttgtttacctttttattatttgaatattgcaccaaaaaaaaaaaaaattcttctatttacctaaattaagggaaaacaattgatgatttattggatttctatttcgtgtgagaagtgaaagaaagagaacgactataggcatattgtagaaacaacattgctattgacaccacttttgtccagtactttttataggtggcgtcccacgat

SEQ ID NO: 336648 - DNA, 677 bp, Cannabis indica
tgtctctaaatccttacttgatgcagaaactaggtacagtcagctggagaagttagcattggcactcattcacgcagccagaaagttgcgtccatacttccaatgccacccaatcacagtactcaccacctttcccctcaagaccatactacataaaccagagttgtttggaaaattgaccaagtgggcagtggagctcaccgaatatgacatctcctacggcattaaaatctcaggtattagctgatttcattgcagactttacacctaactctcaagtgcaggcggaaaaagaactttgccaccttacagagggacagacaaatggcacatgggaattacatgtagacggttcaagcaatgtaagaggaagcggattaggacttgttctaacctcaccccaaggcgaggagatcaagcaagcaatcagatgtgggtttaaagctacaaacaatgaggcagagtatgaggctatgattgctggactcggactggccaaagaaatgggagccaaaagaatcaacgtctttagcgattcacaacttgtagtcaaccaaatgcaaggtagctatcaggcccgagatagcaaaatgacagcttatcttgagaaaacaaaagagttgcaatcgaccttcgacgagttcacagtcagtcaggtgcctagggaaaataatagt

SEQ ID NO: 336649 - DNA, 743 bp, Cannabis indica
agggttcttgattttcttcttcaatttagtgatttccagcagctctaagtgtttcccaaggcaaggtaaagtctctagcaacctcctcttaagtttcttgatttttgtgaaagtgaaatttcgcatgatttgagattttagttcctgttcttgctcaggttatttgttattattttcaaaggtttaattatgtgagattatgttgatttgagctagttgtaatggctgttagtagacttaaacaagttttgagttttacaactcaaacttggagctttaatggtgtttttcaattctgagcttgggtagttgttttattgcttggaaaatgtttattggggtataatatgcaggtctggaaggtttggtaaagtttggaatcgattttgttagggtttgaaattgtttgggtgttctgggtaaaaccggctaactggttttacaggtacctgtaaaactgggtaaccagtttttgcagctaggattcctgacaaattcaggttgtcgattcgttctagtttcagagcctcgattggttaattgcctgctagtttagggtagtaccatgttaagttgcagtaggtaaggtttttagcattaaaacctaattcccggatgtgatttagcgtgtcacttatccatgttgttatcgttgtgatttaggagcatgtaattcaccgagcagttgttccactcaggttgaccggcacacttgaaatcggaattgaggtaagattagtata

SEQ ID NO: 336650 - DNA, 593 bp, Cannabis indica
ttttatttttatttttaaaaatatttatttatttatttatttttattgtactgatattaataatttttttttctttgcttatttctattgttggggcaaaattttaaaataaccaaataaaaattccaaattccaaattaattattgtaaggtataaacatcaatttcattcatcataaatgaaaaaaccaataaaatttcagagataaacaaatacaatacaaattaaagatctagctaatcccataaaaattaacatatatgaacacaaaataaaaaactaaccctaaaaaataatttaaaaaataaaattcaagggaaaacaacaaatttcagattcagtaaatcccctttctaagttcccaccacgtctacaaactcaaaaccaccgcctatatcagtaatcgatcctcctcgcgtgcacccaaagcctggaagtttctcaatccaatcctgaagtcacctgagaaggaaaaaacattagatctaagactaaaagttagagtgggagatgagcaagagagagagagagagagatcgggaaagataaatggtgtatatgcgtgtatacactctgaaatggtggactgctt

SEQ ID NO: 336651 - DNA, 796 bp, Cannabis indica
atataaatatcacatattatacatagttctttccttctttctagattcaagtgaattggccgacctgaacagaaagtctcgtgctgaatggatgcgctaagcacatattgaaactgggtaaatcacatgtttgaaaccctaatccgggaaacccaaacctataactctaggctctgctatactctcaagggattacactaactcaggaaacaaggaaacacccaactacagcactgaaatggatgagagttgagaaaatggcttcttcggggaccctaccaaaaccggctagccagttttataggcttggcaatctggctagccgatttgcaattgcaccaggcttcccccaacaatccatttcttgctcaaaactcatccaaatgctaccaaattttctagagtacctacatagtgcatacacaacatactccaactagtaattcacagaaaaatacactaaatcaaattatgccataagagatcaaagcttaggtctttaaattcaaactttgcataaatccaaccccaaacactaaaaccagctgtaagaagttatattcaactcaaattaacattacatttcgaactatacaaacactaaaccataacagaccccaatattcaaaatcactacatgaaaccaaagtaaaagcttcaaaatacaaaaccataggttctagggttaccttagctcaaagaacacctaaattcctagctgaataccagaaaaataatggtgaagagcttggtttccttctggtctaggttgcccgagcaaagagagagagagaga

SEQ ID NO: 336652 - DNA, 545 bp, Cannabis indica
cgactcatggtgcagtaattgttaagagtaaatacttatcttcttatgtgattaaatatttattgcttcgataataggaagcatataagcatctggaaaattatgttatttaatgaaaagtgtgattattaattgagggtagtaaaatttctattcgggaaagatattgtatgtgttagttaagattttgacatgaaatgtgtaagtgtggaattggtgtctgactagttggtattattgattttaggattatttgaaagaatgaaccctgataagtagactagatcacaaggctagtttgtagaataggatgttaatctaaccaatccaccaacactgttagtacctctgcaaaatcctagggatactgcggggatgataatgttaatcctcctgttgaccgacagcaattttttactaaaatacgaaccatcatactttgtccagaagaagagttgttgtaacgtccccgtttcaagcctccattgggtccttacacccacggaatgaatggctcttatacacgagtacgtcactctggctgc

SEQ ID NO: 336653 - DNA, 795 bp, Cannabis indica
gaaagttttttagagacaaagaatatttaaaaatggttgttggcttgtatgcaatgaagaaagggtttgactacttcgttaggaagtccggtactactatttggtacgttacatgtaaggatacagattgtgggtggagattaagagcgaagaagaacgtattttctaacatgtttaatgtgactatatttcgaggaaaagataactgtcaagcatcacctttgatagttgcgcatctaattaaggataagttcgcaactaacggcttggatcatttggcctctaatataaggaaagatatgcaaaaggattacaggatccaaataagttataaaaaggcttggaggtgcagagagaaggcactacacctagttcgaggtacacctgaaggttcatactcgaaattaccttattacatgcacatcctacagttgagaaatccaagtaccatcatgaattttgtggtaaaagatggtcgctttaagtattgtttcttccttctgggtccttgtaggcgtgggtttaggttttgccgacctgttgtatgcattgatggttctttcttgaagactaggtatggtggaaaaatgttatgtgcagtggcactagatgcaggcaaccatatttttctgatagatttcgttgtagttgacagcaaaaaccataattcttggacctattttacgagaaaattgaaagaagcgattgctgatgttgagaaattagccttcttgtcggataggcatcaaaacattgttcatgctttgtagaccgtgttccctgatgcacactacg

SEQ ID NO: 336654 - DNA, 576 bp, Cannabis indica
tgttagttggatttaactaagtttggagttttaactccaaactttggttttcatggtaaaatgatgagttttgttgctgcagctgctgctattgtttgattgttttctctgttggtaaaatatgttggaataagttgatttaaacttgaattgtaggctattattgggtttgggcaagctttgagctttagaactcaagcttggccctttaattgcaagttttgattctgagtttgtagttgtgttttattgccctgaaaatgttctttgcgatgtacaaaacaggtctggagagtttggtttgaattggggttgaattgcatgagttgttaaatttttagtgtttcctgcactgaactggaattccggttcagtgaggcctgtaagaaccggaattccggttggcttccaggaattttccccagaactggaattccggttggggaaccggtctagcagttggggcaaatttgggaaccctagttttcccatttttgtgttatttagggtatagccatgctatttatcgataggaaaacttctagtttcgagtttaagtccctgggaagtgattta

SEQ ID NO: 336655 - DNA, 760 bp, Cannabis indica
tcccatttcaaaaacatcactagacctatcaagctgattaagaactctcgatgatacataagatcgagtagcacccgaattaaataaaacagtaaaaacaagactgttgataagaagctgacctgtaactactgaagggctggcggcagcatcagcctgagtgatagaaaatacacgtgctagtgcaggcttaatctcaggcttaggttcctctttcttcaagtggggacaatctttcttgaggtgccccactgaaccacattggaagcaagcactccggttacaagtcccgggatgatgtttcttgcagcgcgggcactcaggataggagtaagtctggcatccccctttattctggtttcctcgaaaccttttaccttgccctgaactccccgaaaatggaaaagttctcttcttttgctcaaaagtggaatcaccactctcctttccagggccaggaatagggagagtagtggtcccaccagcaccagtagtctctcgagtttcttgcaagaacttgaccgccccttcagctcgaagagccttgtcaaccattttagcataagttgtggtatcatttgttgtgataaccagatcgtgcttaatcttggcattcaaccctgccaagtacttctcctttttactgaagtctgttggtacaatcccaaaggctaacttagccaagcgatcaaacttggttgtatattcagtcagtgacataccctcgccttgtaccaactcgacaaactctttccgcttt

SEQ ID NO: 336656 - DNA, 719 bp, Cannabis indica
aatcacgtaatacgcctatgttagttagggtgttacatttccagttttctgttaagcattcacattcccagctcgattactcgccattataggttgaatactcgcagttttcttcaaacaatttcttcttgtcattaatattattacatatatttggtgttgcgaattttgctcgattacatttggcgccgtctgtgggaaccgagaattacgttttattcaattcaagaaaagaaatcatcatggctggaaaccaaacaaatgaaggtgctaacaacgagtccatcaacatcggaatgatgaacgttccgttatctggagttaggacgccacctgtggatgtcgttaatggtggagtagggagaggtaatatcagacctctcaaactattccctgaaacaactggcctccaagtcggagaaacatccacaccaccagcaacaatggggcactttccacctgtcactccggtagtagtatctgagggaattgtccaactcaccaccgaccaatatactgcgattcaggatcaactacgcgcgttgcaggctgaggtggatggacagaacatgtagagaccgcttagtttaatttggaaattagcagttaattatgattaattataaaaattatttatagctatttaaataatttattatactgttatttattgaattcagaaatgcatctttatgtcatgtagtagtttgcataatttt

SEQ ID NO: 336657 - DNA, 956 bp, Cannabis indica
aaatgggctggactcaatcggcctagtcagcacgaggaggaaggcaaggccccagacgcacctcaagcatggcatccagtttcttcttcttctcccgaaatttagcaatagcctcttcaggcttgggatagaagtcgagcttaatgttttggccatttgtctgccaggccatatagacgccgtcgtcgaagcgcttgacgcagcgtttgcaggagacaggggacaggagctcatcttttttagccttcatcaaggcctggtctctaaagtccttgagctccttcaactccacggccaagttggccctagactgcaagtccgcctggtgaacctcctctagggacttcaccttggcagccatttcatccatggcctccttagcctctcgaagctcgcgcctggccctggcgacggcctcaccctccgcctttagcgcctcccgatgcctcgcctccagctcagcctcccttcgttggacctcctctcggagcctcgactccgcctgggcctccctctgtgtggcctcctcctcgagtttcgccttagcaagggcctcccttcgctcagcctccccctagatcgcccgcctttcagcggaaaagtcccgcaggatcctcacggcctcgtcgatgcccccaaattcgaacatgacgaagccatgattgactatggtcttggaaaggcggctggtctccacagtaatctgaaaaaggagataagagtgagaataagtgccttagacaaaatatcgaggagagaaataaatcacaagtacgtaccgcagccatggcgtggctaatgtcttgaacctggtatacggagttcaaggatgcacaagcagcgtactgtttgggccggaattgagttagatgggagacatactcactggtcatctccgaggaaaatagggccaaggttggcctaaggaaacggttgaaccagtccgtcagcgggtc

SEQ ID NO: 336658 - DNA, 1097 bp, Cannabis indica
gggatgttaggcagatatttaagaaacccttgtatggaccattggatagcagccaagagggttatgaggtatcttcaaagaataaaagattacatgctcacatacaggaagtcagatcatttggaggtcgtagggtattttgattctgattttgctggatgccaagatagcagaaggtctaccttaggcaatatttttctattagctggaggagctatattctggaaaagtgtcaaacaaacacttatagcttctttcagtatggcagcagaatttgtagcatgttatgaggcatcaaaacagggaatatggctgagaaactttgtcactaggctgcttattttggagaatgtagaaagaccactcaagatatattgtgacaataaatcagcagtgctgtattcaaataatactaggagctcatccaagtaaaagcatattgacataaaattcctagttgtgagagaaagagtgcagagtgggcagatatccatagagcacattgggacaaactccatgatagcgaatccactcacaaaaaggattaccacccaaggtctttcatgggcacaccgctcatatgggtgtagtattgcttcaggatatcatgatttagtgggagtttgtattttttttttgcttaatgtttgtttaagaaatttatgtattttgttattttctaatcagaaataaatttttcaattaattcactcggttttattctgtttaagtctgacctcactttggtttaaggaggaccagtcaaaaataggcatgttcggttcacattgcatgtaatttccatgctacacatccatgattgatctatgtcatttggctatatttgtatatgtgaccattgatgggtttagtcataattgatatgattaaaattgctttgatcctatatgggtatagttgatggacgagattgttatgaatacctttacgtaatagcaaattttgagctcataaggttatacatttatcaggtaacatatgttgcccaagtgggagattgttggattaaaaaatcctattgtgggcacatatgtataatgtatatgctattataaagtgtgatacaaaattaagtg

SEQ ID NO: 336659 - DNA, 677 bp, Cannabis indica
aaaatgaaaaaaccccaaaaaaatattagtatatagataagatattaaagagttttacttaagactatgaaagattaaaccttgagtgttaagagttttaaatttttttacctagaattattattttaatgataattaaattctatatacagtgatccaaaattaaattttatcgatgtggctttaaatattgatatttgattagtaatgcaaacttaaaacatacctctccactcctcttaaaaaaatttaaaaggaatctaaacagccgcatcaatgccgtaaccctatacagccgcatcaacgccgtaaccctacacagccgtgccctagtatcagcgccgccgcatcaacgtcgatgttccttctaggttcttggagtatgctcgtttgttctcctcatgtgtagttccagggttcgtccgttcgtatggtttcctcagcagccgcatcaacgtcgactgtttgactggttcttcagcgtcgtcagttcgactggtttctacagaggccgtccgttcgtgtggtttcctcagcagtcgcaagtttgaaagtttggaagcatcccatgttgtccctacattgcagcaatcaaagtttctggttttagatttttcagtggtttgaaagcattacaatacaggtcgggtcttgtcgtatgacatggtttctttgtt

SEQ ID NO: 336660 - DNA, 978 bp, Cannabis indica
acacttgaaaaacatcaaattgagaaatgctcacaaggagagtgatataatcaaggttgtgacaattaaatcagtgccaaacttagtttcgttttgttatgaaggtaatattaattgcagcatatcaataaagacatccaatttgttgaatggaaaatttgtcattgctgatcatcatcacaaatatgacacaaattggtttatgagtatgctgaacttttttttgaatctcaattgctcttggaatattgtacactgcgtctttcttccaataaggtatggccattacttatacttttctttattctcctgataatttgattatgttgctgtatttattttcgtatattttgttttgaacatatgtttgttgaattcatatgtacttgaaggcgctggtcatgccagacaattgtaaaaggttatgtcgttctcctttagctaaatggaagcatgtccgagttatcgcgcttggtgatggaatgtttagcaagaaagttaagcttaagttatttttgctgcaaatcttaattttgtgttcttgatcaattactaagctctgatttgtggaaaattaagactagtgtgcagaatctgatcaactaaaacttaaatcaacacacagttagcaatgacaagatagatgaattacaaataataatcggaggaaaaatacgaatgaagagagttacctaaatagaaaaaaagcagtaaaacaataaaatcaacaacaagatatgtactagttcaagtcctatagatcgatgtactctatgattctactccagttctagaacaccaccaaattctctttattgattaagcaagaataagggtacaatacaatcgagatcaattctctgctgaattctcttaaagtgtttcaactctcacatttttacccaagaatcgtcttcatctataaaagattcttcatacaaaatctaaacccaatatctctctttactctgtacctct

SEQ ID NO: 336661 - DNA, 722 bp, Cannabis indica
gctggttggaggttgtgccgtcagactttattgcgtgtagcagtcccaacacgtttcctcccatgcggcattaaatgcgacttgattgctcaggggaaacctgacaccccgcggagatgccttaacgttacttaggcttccgggagcatatggggttccatatgccttctccgggagatatgtcccggatgctgcttcattgcataaagacttagcaaatagtttggattataagttgcttgatccacgtgtccctgtctggttggtccacgtatattgggcaaaatcaggggcaacataagccaatcctaaaaataaggacgacactcatccaaatcaatttattttcatactttttagagataattgctttcgtattaatttatacataatatagtatatattattaacaaaattgtatatattatattaacaaaattatatacaacaataaaataattataccatacctacaaaattatataatatatatcataataaaataaaaattaaacataatctaaaataaattgatatactatataataaaacttatataccatattaaaagaaaaacatatactatacaataaaaatatataagatactaataaattatatatcatgtcaacaaaaatacaatacaaaatagaacttatatattatttgaaaaaaaaaaagatatatcgtataacaaagaatacatataccattcaccgaaa

SEQ ID NO: 336662 - DNA, 925 bp, Cannabis indica
tacttggccgtctccgagcatgcggtcagcgcaaccttagtccgggaagaggagaaaactcagcatcccgtgtactatgtcggcaagcgcatgataggagcggagacgcgatacccagtcattgaaaaactagttttttgcctcctaatggcctcgagaaagctgagaccctatttccaggctcatccaatcaaggtgctgaccaaccacccactccgacaagtcctacaaatgccagaggcatccagaaggctcctcaaatgggaaatggagttgagccaatttgacctgcactacagtccccacatttccataaagggacaagcgttagcagacttcatcacggagtgcaatgaagccaaagctaccgtgaacatacccacaccatcagtcctagcgtggaaagtatttgtagacagagcctccaacgagaatggatccggagtgggggttgcagtgatatgtccaagcggacttcgactccaagcagccctacgattcgacttctcagcttcaaacaatgaggcctaatatgaagccttgatagtagggctgagactagcaaagactgtgggcgctaaaagagtagaagtctatagcgattcccaactggtagtgaaccaggtgtcgggagagtatcagacgcgcggagaaagaatggccgtgtatgtggcgatagtccgggaactgctccatgagttcgcagactacaaagtggaaagaatccccagagaaaagaatgctcacgcgaactgtctggctaagttagcttcagacagtgaaattaagaaactgggggtagtacctgtggaacgcttggcagagccaagcactaaaataaaagaggccataacaacggttgggcaagaacccagttggatggtccccatcattgaatacataacaaaaggtgagttgccccaag

SEQ ID NO: 336663 - DNA, 306 bp, Cannabis indica
catctccgatggtcgtatggacgttggtttcaggtgaaacagttgtgttatgaatgccctggttgggtgcggaactgttattcccagtctcttgcacaccaagcgcaatttcatttataggaactgtcacaccattccccacattctctggctgtccaggattaacagctggcgaaacccttgtgtttcttgggttctgcgatgcaggatccagcatcagtgaatttgttggatcaggcatgccttgacgagtttgcaccatcgtatttgtgattggatgttaataaagagcgattcgtgatcctg

SEQ ID NO: 336664 - DNA, 788 bp, Cannabis indica
ttgtgtggaatggaaaaacttcatctgctttagaagtggtgcgatcagctagaactatccttgaccaatggattagtttcaatcacaaaaaatgggggtattgttagttgatgatattaacaatgttacagagcactggaggaaaccaatgttaaatatggtaaaggtaaatgttgatggcgctatctttcaaacagagagtaaatttggatatggtggtgtgccccgagattccaatggtcatcttattgaagctatttcgggaagtcgttatggattggtgcaacctgaagtagcagagataattggcataaaggaggctttaagctggataaaaaagaaagcaatggctgaatgtggtgattgaaactgactccttgatcactgttcaagctattaagagttcgattgatatgccgtcccaatttggttagcttgttcgggattgtcaagttttattatcttctttaagcaatatttctatagtttttgtcaaacggtttgctaacaaggcctttcattgtgttgcgagagggtcttgtttcaagtcagattgtactttcagtgagcatgattctcctcttgatttaaagtctattgtttatgctgaaagttattaaaaaaaaatcattttttattcaaaaaaaaaggtagccaataatggattatcagtaattaattaagtagtgaagccatcgatttataccaatggataatattattatgacgaagtggcaatgcaataaggctcccaaaatagagtttgtctaggctctttgcaacccttt

SEQ ID NO: 336665 - DNA, 868 bp, Cannabis indica
cgcgctgcaagaagcatcaccccaaagcatgtaatcgaacgggttgtttcagtgtggagcagtggggcacctcaagaaagattgttctcagctgaagaaagaggaacccaagccagaagctaaatctgcactagctcatgtgtttgctattactcaggcagacgctgccgccagccgttcaattgtcacaggtaagctctttattaacggctttacttataatatattgtttgattctagagctatgtgagtctatgtagcaaccagagtacttaatcatcttggtaggcctagtgatgtttttgaaatggggtttggaaccctgttgcctaatggggaattgattatatcgagaaagtggattagatctgtgctaatcagaattgaaggcagagaactaagtgccgatttagtggatttacctttgcccgagtttgatattatactcggaatggacttcttgtccaaatcctctgccattattgactgcaagcggaaaatggtaactttttaaccagagaatgaggaaccgttcgtttttgtgggatcagttcaaggatcttgtatgacaaaaatttcaatgctgaaggctagggatttactacgcagtggatgtataggatttctagttgttgtaattgattctggtaaacccgtgatacttgaacctgaggaggtcaaagtggttaaggaattcctagatgtgtttcttagggaataactaggtttaccaccacagcgagagatagatttcataattgacttggtacctggggcagaacatgtttcaaaggcaccctatagtgtatggccccaatggaactaaaagactaaagatacaacttcaagggatgttggatctagggtt

SEQ ID NO: 336666 - DNA, 663 bp, Cannabis indica
caaacaggcagcatcacaaagaccatatagaagcatacacaagaagcatggataaacatcgttttattaatatatggccttgatagggcaagggagtacacagctgggcccctatcatgctggtgacaaggtgcttcataagtcacctggtcaccccccccctaaagagcttattggggttttaagggatttccaggaacatagatgattttagctctgtagacatatgtgaaggaaatacaaagaaagaaagctaaacaacaaaaggttcccaacccccatgaggtgcttggtgcaagacttgactaatgatcaagcaccaaggcatgctcatgttacaaaataccccaatgaggtgcttggtgcgagacttgactaatgatcaagcaccaaggcatgctcatgttacaaaatggccctattgtgggtgtgccatggggcagcacgccacattctcccccacttaattgttcggcgtcctcgacgaacctgctgcatgatcttcaatcttctgtataaactgctgcaagtcctccgccttttcccagctgatctcgtcatcagcaaggcccttccatttgaccaggtactcttttctcttctttttcttcacacgaacagttctttcggcaaggatttcttctggttctctgctgctgcgtc

SEQ ID NO: 336667 - DNA, 578 bp, Cannabis indica
tccttccgctcagatctctaatttttgttccttttgtcacagtgtataatcaagatttgagcccgaaacttttttagttgtttggattcttcacaatcttacacactatgattgaggactaacttgttatgggtggacatgcactcaatcactaaggcttgaatgttaatgatgaagaagactatagaattcaaattagaagcgagaaaagaagaagaagaagtctcaaactctctagttgtttgacaatatgaaaactaggtttagagtcattagttggataatgagactatacttttctttttatactaattcacttagagttaagattgaattatttggaataaaaaatgataaaataatagaaaaaataggactatagtggccggccatatgtgggcccaacactgttagctttttgctatttttcacaaatactatattttctaatttcaatcctataaatgccaaaataatttatttaataattaaaactaattatcaaataaaattatcatttgtattatttgttaattagactccacaaagtctcttaatcaacaaacaaaccctaaaat

SEQ ID NO: 336668 - DNA, 577 bp, Cannabis indica
atctaaattatggaatcctaactttcttaacaaattaaatattggttccctttatgttaattctggaactgaaaagttttatgtaaatttagattggatctagattatacttttactagtgaactaacagaactaaaaaataaagaagtaattagaagagtaaaaacataatttgaccaaaactaattacgaagtgatacaaggacggctaatcactagaattaataaataagattatttggctgatgagattcaataaaaatttaatattaatttgttatatttaaaattaaattattaataattattaattatttttttgtaatttgttactaaataagaatcccttaaatattaatttttttacacttaaattattgaaaaagttataaaaccccttataacttaaaattattacacaccttaattaataaaaaaaaatagtaagaatgacctctaactaaatgtaattctatactcaatcttattatcaatactttaagtgccaaatcagtgtgtcagtctaggattggttcaagtgatttatttttttttcaaaaaaaaaattaaaaattaa

SEQ ID NO: 336669 - DNA, 847 bp, Cannabis indica
gtcccaatctggttccatttctagtgccgagtcacgagctgggtcctaagttcaagttcgggtcacggtcggtactaggtcttcgtcctagttttggttctcagatccctatcctgattcttggtccaggtcccaattattgtgtgggtttgggtctcggtctaggttcgggttcgagtccaagtctcagttcgggtttaggtctctgtctgggttttgatcttggttcgggtttatgtcctgatcctggtccaagtcctacttcaattctagtttcatttgcgattctgaattcgagtttggggttgagtttgggtcagagttcgagtcctggtatgagttttggttcgggtctggatttcagtctaggtccatatcaagctccgggtgtgggttcgcctcctggattcaattctgggtctaagtccttaattatgatcctgatctgggttcgagtttaggtccgagtctgggtctagctttgggtcttattctaggtgtggttgtttgagttcgggtccgagtttgtgtccagctttgtgtccagatctggaccccgatctgggtctaggttcgggtcgaggtccaagttcgtgtctcgagtgcgcctccaagttttggtctgggtcaagatctcggtccctatctaagtccctatctaggtccaagtttgtgtttgggatcgggtcccagatttaggtccaggtccgggtcttagttccagtctgggtacactaccgtgttcgggcctaatttccagtctcagtttgggtctgaggctaggtctgtgttcagtgcttggactgggtccgggtcctcgtcacggtcctagtcttgttctagggtc

SEQ ID NO: 336670 - DNA, 900 bp, Cannabis indica
cttcgaactgagtaatgagatcatcagacaccccctcattgtgttcaacaaagggagtgtcttctaaagagtgttcagatgtgtaacacctctcttcctgaactttttaaacaaaggggttcactgattcctgaacgggaattgtacgcaggcacgagctcttgatcgagttacaaggcccgtgtaggaggtaggcttaacagttgaagtgacccttgttggtcggtatcgctggaggaacacccagtcaccatgttctttttagaatgagttagggcttgctttgggaacccttacactgtcacttctagccttctttgggaaggagaaaggcgtcctacacccctcatctaataaaagggtattcattgatctcaatagatgccccctgtttaccttggcagttgacagggattatgatcagaggcctgatcggcgtgcctcctactaattccctcgtttcatgagggtttggggaaggtgaagtttttttccccctcttgccttttgttgccttcctacctctccgagtttaagaagtcggtgttcccttagtttcctccgcggagataaccatcaccgaggcgatagtgggcaagaaattaagaatggaaccaatcaagatacgctcatggccccattccttttagatcattatgggggagccaatcttcgttggcctcccttctgccttgacaacctttgccgcggaccttttcattgcccgggctggcctctttttgaagccctttgctgccttgcatctcaaggcccgcgcagtcttaggaatactcttcacacttttccatctcccagcctttctaactggtataggtaacttcacattctccactggttcgggtaccctgcatgaaatgggtgctcgatcgatagagaatg

SEQ ID NO: 336671 - DNA, 1056 bp, Cannabis indica
agatcctggtaaaataaattccaacatatataactacatataatcttgttcctccgcactcgggttgcccaaatgtgattaactaaagccttgacaacccgaggccttcttcctcaagcctcttccaatgtgatggaggtctttgctcgatcaacctcccctccgatgtagtgtttaagtcgctgcccattcacttgaaatactcttccggactgttcattcttgatatccacagctccaaaaggatacaccttgacaatggtgaatggtcccgaccaacgagactttaactttcctggaaacaacttcagccttgaattgaataacaacacttgctgcccttcttcaaatactcggtgttgaattctcttatcatgccatctcttagttttctccttgtacaacttggcattttcataggagaaaaacctcatctcttcaagctcatttaattgcaacaagcgggcttctccagcagcttggagatcaaagttcagcttctttatagcccaaaaagctttgtgttcaagctctaccggcaagtgacacgccttcccatacaccaatcgatatggggacatgcccaaaggtgttttgtatgctgtccggtacgcccaaagtgcatcatctaggcgttgggaccaatcttttctgttgggatttacaaccttctccaatatgcctttgatttcccgattagatagttcagcttgcccattagtttgtgggtgataggcagtggcaattttgtgttttacactatatttagctaacaaggcagccaacactttgttcacaaagtgagtaccttcatcgcttattaatgcctatggtgttccaaagcgagtgaaaacttgcttttggaggaattttatcaccacttttgaatcattagtgggacttgctactgcttcaacccatttagagacataatgcaccaccaacaagatgtatagattgccataagatggtggaaatggccccatgaagtcgattccccaaacatcaaaaagttccacttcaagaataaaattcaatggcatttcattccttgct

SEQ ID NO: 336672 - DNA, 729 bp, Cannabis indica
gaaggtgggttgaggggggtgtgtctgctggtgtggttgtggagtcagactcgctcctgctggtgcaagccgtgcaacagaagaagcggttgttgtttccggtgggacttttgatttcggattgtgttgctcttatgaaatcctctcttttatttcctatttcaattagttttgttaaacggtccgggaatctggcgactaactttttagctcgttcttctggttctattcctggctgtgtttctcgcgggggttttgtccctgctgggttggaagctatcttggtagctgatttgatttaataaaattttaattttttggctcaaaaaaaatgataacatatataagatgcatggactacttctctcattgtgaattgattttaaaatgaaacctgatacatcatataatgctaagataacaagcacttaacactcaaatattctttttccttaatagaattaattacaaatacgtgtttataattgtaataaataagattttgataaaaatctatcaataaatttactacaaaagttgttacttttagtgataattttctagtcacaatatattttttttgtaattaaatatgacttttagtcacaataaaatattacatgtgattaaaatgtagtatttagttacaagttgttactaatttagttttagccacaacaagtattgtggctaaaaatatatttagataacaaattgtaatttttatga

SEQ ID NO: 336673 - DNA, 535 bp, Cannabis indica
ggctacatctttcttggctgcaatctcatcttcatcttgttaagaaaaaaattcaggtacccgcttcctcttcattttcattttctgattcctactcaacttttatttttctcttatcatctttcctttaattttttgtatagatctatgttatatggtgatttttctctctctctcactcttgttgaatttgtgtctgattctttctctaaagatgatggaggatctgtattgattgggctcaaaaatggccgggcttgagtcagttccaaggttgcaattagtaagggatggagaccgaaacttgaatcaatgggactaagttattttaactgattttttattcaaatttactcataattctgggtttacattgttgtattttcttttaaacaattatatattctttttgcttcaaatcaacatacattggaaatattttactgtaatttgttttggattttgtacttgtgtttgttcatttggtataaaaatgttgtgagtattttatttctctaatctttaaagattcaga

SEQ ID NO: 336674 - DNA, 1384 bp, Cannabis indica
ttggcaagagagaagaagggagaggagagatggaaggtagagaatctcccttcaaaagtccaaacacactatttttaatctctcttaacatggggagaatttaagaaaaagacgaaaagaattatataaaatatcttttctacctttaaaaaataatatataatgtattaaaaatgataaaatggtaattttaatatttattttactctctatcctttcacatatactcctaattaatctcaaacattataaaagagaacaaatatcctctccattccttctatttccccatcgtttttatgatggattgagaataaatttgtaattggttttgtttagaatagttgcatatgtggttaatagtttttgtggtaatgtagtgaagtagtgatgttgataagtagttgttgatttagtatatgagaatggtttttacttagaagagaggggttgtatgaaaaggtagtaagatttattgatagtttgggttttttggtgttggttacaatttggaaccctcgatggggtatttatagttgctccctgttacactttatggttagaattatttcttctagatccttcttttactagaaggaagtatatctaagcaaatttaaatatttctagagttcaacataactagtatactcaagacttaatctaatctagaattctcttaggttcttagataattttttctacaagtgtgtaaaaatttctaaacttgattgtgtagaaatgtgtagcaaattctaatactccttcttggtacacattacggtaactttgatcatgtctcgtagtagctcgaacttgcctcttggtagtgccattgtgaataagtctgctacttgttcttcagtcttgtagtgcttgagcttgatttctttgtttgcttctgcttccctgataaaatagtacttgatgcttatatgcttagttctaccgtgaaatactggattttttaccattgttatcgcaatatatctttgtagcctccttctctgattctctcatgtcttctagtattctattaagccacatagcttggcttgtagtcattgctgctgcaatgtactctgcttctactgatgattgtgcaactgttgcttgtttctttgatgctcaagaaaatattcctaatccaagtgtgaagacatatcctaacgtgctcttcatgtcgtccatggatcctgcccagtcactatccgtgtagccaaaaaattttgagtcacttgtaatttcgcaccatattctgtagaattttgttccttaagtatctgagaatttgcttggctgttccgtagtgaacttgacttggatcatgcatgaatcttgataggagactaactacgtacattatgtctagtcttgtagtagt

SEQ ID NO: 336675 - DNA, 517 bp, Cannabis indica
ttctctctttttttcattctcagatttgaaaatgaaaaatgatcagaatagcatgatgagagtagcttgcggaagaatttttgctgttgcaagtataattctcttgtattttttaattttaatcttagggtttgcaaaatttgaagaaatctctgttttactttcacatttaatctttgaaatggggtttgggtttaatctctgatataagattttaggtttagtctcttaaatgggtttagttttctgtttgaattatgtgtggatggagttgttcatgtttgaactagtttaatttttagaataaatttaccaattttatttgtgattttagttgcttatttgtgctggtttttttgtcagattagtgcttgaggaggaggagtactggtagagatgatggtcatgattagtagtagtactggtagtgatgatatcatgatcaatttgatcatgatttgtagtatcagaattagtgcatgatttgtagtagcagtagtattggtttgtagtatct

SEQ ID NO: 336676 - DNA, 738 bp, Cannabis indica
tacaggtaaaaaaaaaatgtaacatgatggtcacaataaaaatgtaacattgaatagtcaccctaatatttaattgtataaatatttaaataccatatagggctttttgtgaaaataaattgggttttacagatttttatgtaaaattttcaaaatgaaagtaaacctaatctgtcaaaaggatatggaggaatctgcttatttttcagcagcgtttcctagcacaaacattcctactttctttttttaaatccaaacattcctacttagtctcaaaatataaagcagtggtaatcatgacatatttgatatgttacttaatcaaacatctacatttataaatttatcataccctttaagtaccaaattgacaactccagaacagtagaagaggaaatttacactggtatttcaaatcaatgacaaaggaatacaagcaccagaaattcgagcaagatactcaaccagactccccaaactttctcactcgcatttcagcccactccttgcctagtcaagcttataatttaagcatgctatttaagaaaaataaaaaataaaaatgattgtaactaagcagtgatgcccatctcagctgatattacttgtggcacttaccataattatagaagactggaaacttttcactatactatcaatattcaagcatcttctgtactagtgatgttgtaacactccattacatgaagcatttccttcatattcgtccaatgcaac

SEQ ID NO: 336677 - DNA, 470 bp, Cannabis indica
atatatatatagaaaaaaaagagaaggataagaagaaaagtagttaaacggctgaagtcccaggctctcagttcggatcttctaggccggtaggagctggaggatcagttgtttggacgggaggaacatcgacgttctggcagaggaagaagtagttgcatccggctcaccataagccacttgagaagcacagtacttgagatacatgtctttggcctcgcccaggtaattgaaattttcctgagggttagctttctaaaagtcataaaaaatcttgagaccagctgtctctaaggcgtgcactttttcttcctgcttcgccattcccgacttgtacttctcaatcttagctgtaagctcctcctccttagaattcttctcctcttccaaccgacggaggatagctcgaagagacgtcctttcatcttgaaggctattcacttatgtagataaggtcccgatggtctctt

SEQ ID NO: 336678 - DNA, 559 bp, Cannabis indica
gcacaaaacccaacactagcctcccggagaggaaagacgtgtcttatgccctcctccgggaggctcactccatgaggtgtactttcttgtccaggacttagttgatattcgtgagtggacgttctttcaaatccacgtgtcacccttatccgcgtccatgtatttaggaaaaaaccaaaggcaatatttacgccccatgtctcatttagtgaagggtaaatgaggcttgtttgggacctccggctagcttgttgatatagcggcacgtgccttaggcgcgttggctgcatttatgatggtcatcattaatatttatttccttttgcaggcaacaattcgcttcctgttcattgagagatcggtgcatttaatccgggttttagaaaggtgctcaaatacttttaaccaccttggtacccattcatcccatccgttggatcatagaatgcgaatcgattccgcttcccaccgtacgatggtgtctgatcacagctgccttgcaaccttttgttggaattattttaccaggatcttacatctactcacaagtatgttgatt

SEQ ID NO: 336679 - DNA, 584 bp, Cannabis indica
atattgtctcatcacaattgtatacttttgataatcagataaacaaaattgcttctgatttagaaaactaggaagggatgtctgacaaaagtcttgaaaaattggtgatttacttcccgcacagtgaaactgtgaaaataaaaattaggtagtataggttgacaattatcttttttggaattgattcaagtataactgttcatgaaacgtagacaatcctcactttttatttaaatcacatgtgggataatactaaataactacctaactgctcttttttttatcctttagatggtcattgctggcgtggaaggttatatcttctctgattcgcgagttatgttccttgtccatcttgataaggaaaaatgctaagtgttgggatggtttccatctcgttatgttctctttgtggcttttgtaaagcgaggtgatcttctcgctatatgtaatgtgaggcagtttatgatgatatattcattctactcgggtggatgaatatccctttcttgtttgtatattctgatgcatgcatatgtctcgttaatcttagatcaatagttagtagctgcatgtataagagc

SEQ ID NO: 336680 - DNA, 538 bp, Cannabis indica
ataagtgaagagatatttatttttgaatgattatattattattattttgtatcttgaacctaacccaactatagttacgggaaggtacacccatgaataagggattttaaatcctagatgaaaatctatataaggggggtgaaatcacttgttaagggaccctcaacttaatactcacgaaatcatactcttgagctcccactctcaaattctaaaaactcacttgaggagtgaactcttggagaacataactctggagaactctcctcaagtattgtgatcaataacactccaagtggactagcctattaccgttaaaagggagtgaaccactataaaattcttgtgttcgtctttggtgaatttacttttgtaaaccggtttactttgattaactattgcttgtgttcatcttgctcgttttacgatcttcttagatccgttgacgaaaaacagcatcaacagttaagtgctttcattgagagcagtgaacacaagtgttaatcaccccttaccatcatggtgagtacaagacgga

SEQ ID NO: 336681 - DNA, 685 bp, Cannabis indica
tcccgaaaggtcttctccgcggctgggactgtcacattcgggcagaggaccttagaaaggttggagtcctccaccgactggtgcgccaggatcagcttagccttccggcagttctccgtcatgaccaagcccccgacgtcgaggtccgccttatcataagtcgcgaagacctgggcctggtgaagaaagatctgagtaggcgcggtccgttcgtacggagggatcctaacccactccgtaaggagctccgggtgctccacagctcggaacccggaggagaagaagaagcgatggcgatattccttgacgtgcttttgctggttataagggaccacgccattgttcgaagggtgggcccagaagccgtaaaaaccgtccttaagtttgtcgcccttcttggggacagaaacaagttcataaaaatacaaaatctccgccggactgggagagccccatccccgggcggagtaaaaaatgaataagcctgaaagcaggaggtaagcttgaggaattagttggtatggcgcaaggctgacaaatacaaggaaattaataaaataatcttgaaggggaagcatagccccgatcatcagatgcgtctggctccaagccccgaagcctccgtaattgtggttaagggtctccgcatctcggggcagccggtggtacgtcccggacgtcgagg

SEQ ID NO: 336682 - DNA, 529 bp, Cannabis indica
aggattgggggtttttccacgtgctcttttagttttttgaatgcctccttgcactcgtcggaccattcaaatttttgacatttcttcaagatgttgaagaagggaatgcacttgtctgtggatcgagagataaaccagctcagggcagcaaacttttcggttaagctctgtacatctttgtgatttttgggggtagacatgcttaggagagcttgaattttctctgggcttgcctctatccctcgttggctgacaatgaagcccataaactttcctgattgaacgccaaaagtgcacttctttggattaagtttcattccgtatctccgaaccacttcaaagcattcttcaaggtcatccgcatggcttgcgtatgcctttgatttgaccaacatatcgtctatgtatacttccatgttccgtcccagaaggcctttaaacatccggttcaccattcgttgataagttgccccagcgttctttaacccgaaaggcataaccaggtagcagtatacccccttatcggtcc

SEQ ID NO: 336683 - DNA, 806 bp, Cannabis indica
acaacaaatttctcttgatctgatgataatgctaacatttgagctgttatcaaacgctgcttcaactcctaaaaatcgctaatttttcttagttaactcggtcagtggcatagagattttagaaaatccctcgacaaaacgtcgataataccctactaaatcgagaaaacttcgaatttctgttactgatttcgacctcggccaatgctttaccaactcaatcttacttggatcaaccataatcccattcttcccaacaatgatccctagaaaagaaacctctaacaaccagaattcacactttttgaattttgcatacaacttgagatccctaagtcgctgcaataccattcaaagatgatgctcgtgctcctcttccgattgagagtatacaaggatgtcgtcgataaacactatgatgcaattatcgaggaagtccttgaatactctattcatgagatccataaaggccgcaggagcattagtcaatccgaatgacattaccagaaactcatagtgcccatatctggttcagaacgcagtctttggtatatcttcttcccgtattctaagttgatgataaccagatcgtaggtcgatcttcgaaaacactgtctttccttgaagttgatcgaacaaatcgtcaatgctgggtaatgggtatttattcttaatcgtcaacttgtttagttcccgataatcaatacacattctgagggaactatctttctttttcacaaacagaaccggagctcccaagggcgatacactgggtcgggtaaacccaatatcaagcatcccctgaa

SEQ ID NO: 336684 - DNA, 1224 bp, Cannabis indica
aggatcattggatttgtggtcgtctaaacatagctgagcggcggatatatttgtacaattcattgcgttctggaaggtatatgacagctgccaaagaggcttgcaagcctttttctgttattttaccatattatttctctatgttagacattagaggccttcgcaatgaatctaagtttaccacgatggaaccgttcccgattgttgctgttgatggtttacccgagcaggtcacagcgtaagttttatgatgttcaatgtttttacagctttttgtagtgttatgttttgttatgtgattttgttttttactagtgttcttatagtttttttttccttttttattgttttttttttcagtgattgtggtgttttcgtagcatcatttgctgagtatttcattgatgacaaacccattccatcctctgattttgatgtggaaattcaccgcgatcgtttggctgtgtcattttatcattatggcatgaagaagcaacttgagaacattgaaagtgaatccgaggcccctcccatccttcccaagaaatgatatgtcctattttaatcagattctgcttgtttttatgttgttttgctgttgtttttaatgttgtttctggaacaaacattggtgttcttttatgtttttatgttttttgtggacaatatgtaatctttatttctatatgtttttttttttgtttttgttatgtataaacaagttgttatgttaaattggttagtcttttcatttcacatctcatctttttatgtatttctttttcttattagtttttttttttttttttttcttgtttttttcccagttgttaaaataccttttcaagtgattaataacaattcagtaatgtataacttttttgaataaaaatctacatttcattaataaaaaacaaactgtttcagtaataaacttcatatatatattcaatttagtatcaaacatcttttaatatccaatctaaagtatcatcaaatcccaatgtaatcaatgttttcaaataaaaactttaatccctatgtatttcagaaatttaaattcctcaatatctcattctcaaatatatgtgtagttttcttttgtttttccactgttgttctgttgttgtttttattcccttctacaccttctgctgcatgctctcttgttatgccccagctcaccacatttgctgcacttgttgtgttgatcattttcccatc

SEQ ID NO: 336685 - DNA, 515 bp, Cannabis indica
tataataaattattaattaaattagaattctttgagattttatatatttaagaaccttcaggctaactctagtaaaacattaaggtagtatttagttgggaggaataaaaatataagaatggaaatgtgaataagaataggaatagaattgaataaaatttaaaatgtataaaaaaattgataaaaagaattattaaattttttcttattatgtatcagaattgttttttttttttatttcaaaataaaatagtcattccaccaaaatagtagaaatatcattctattggaatgaccttccagtactttaatatgcaactaaacaaaagaatggaatgtgttgggttttgtgccctaaataaaaccctttacaatctgattagttatcaatataagaaatttgaagtgatttatgtttgcatgaattttacatgctaatggtttaatgtgtttattacatttacacacaaaatcagttaagtccagatcatatgttaattcacaattacagtatc

SEQ ID NO: 336686 - DNA, 503 bp, Cannabis indica
aaaaaaaagaaaagaaaaaaatgttgaataaataaagtgatgttggaactaagagttgtaaaattctcaatcattgaaatttttgggcacaatttgagatatgtaatttattgtgggtgcttgatggtttatagtgtgcttatggtataatatagcctaaataacttttcatctacctattacctaagccaatacattacaaccttgaaagtccttttgattccgaacaaggatttgttgacattagtggagaaaggtaagtcatgcaagcatattgatcattagattgtggaaagttagaaagagtagaattgatatgatgtttttcaaatattgaagttaatttgcatctatacattatttttcaaagtaagcatccgaattaattttagagttttgagattgaaattctggtttaaataattgattgaagtttcacaggttgcagcaacagtttgattgtctaaaggcttagttaattatgtgttagtttgtattttttt

SEQ ID NO: 336687 - DNA, 708 bp, Cannabis indica
tatcatttttacctcttttttttaaacactttaccgattttacccctgtcacctcaatatactctttatgtgactcctttatatcagaatattttaggtacagtacatataaaaagatgtatgtttcaattaaatataaaattagaggtagatttggttaattgataaataaaagaggtacttttcaatataccccaaaggtcaatcctagtccatgaagcccttcattcaaatagtagaagacaataataacaatgataataaaaataatattaatttatttttgatttcaaatgtcaaatttaatattaatatttattttagagtaatttgcggcataaatacttaagtttaacttttagttgcacttaaatacttaagttaattttttagcggcaaaaataccttctattagcattttgaaacttccgtaggtacctcactgtttacagttagataatatgccacatgtcaccttataactgaaccacatcatctaaaaaaaatcacagccagcaattcatttaaaaaattgccaactcacctaaatattgccacatcactaaataaaaactcaaattagttaaaatctatatatctatatatctatatatctattctatataaagtgtgcctatataattgaattcttggtttatgagaaattcatgggtaacttttttttttaaaataattttctattaaaaa

SEQ ID NO: 336688 - DNA, 755 bp, Cannabis indica
tttttcgaacccaatggccgcggccagatttttggtcgtcgcggccaaaaatctagcagagagccatccattttctcgattttgttttggacgttctttatatcgttggaaagctcgtttcgagctctatttgattatctgtattttgagtgccatgtttatgatatgtgaaagtggatttagggattaaccctatacttgtaaatcctggaatttgtgactaggattagcggcacttggtcaggagcacccaggagtttggaatctctattattacaagacaacatgtaagacagtagtttgcacgtagagtatgcgcggtggcgcttatgttgaatatgatatatgtgagtaattgtaaccgggattagggttattaccctaatatgagcggttaatagcctagggttattaccctagtgatataagttgagtaaatgctatgccatgctaagtatatgattatattgagatttaagtattatgcgttcaaggcataatcgggttggactcggtaaccataaccgagatgaatcattctaaggccttattgtatttagacgtgtgagaacaacacgtaggtctacgccacgtagacataaatagacgtgtgagagcaacacgtaggtttacgtcacataaacataaataggcatgtgagcccaacatgcatgtttgtgacacacagacagatttaaatggcattgttgtttatattatatgatgagcatattattgatatgttttatactgtc

SEQ ID NO: 336689 - DNA, 1159 bp, Cannabis indica
ccgcacagcaatggtatttcaagttggctccaggaaagtttagttcatggaaaaccttctcttcggaattccatgcacaattctcttcctcacgccaactcccattgcatctgggagatttggtcgaagtaaaacagcgaccaggcgagccactccgggcatacatcagcagattcatgacggaagcgaccaaggtgtcacgggtaaccgaggatggaaagttatccgcgatactggggggcattgaagtccttggcgaactatggaaggacataaggaaaaacggaccggtcgactcaatgagtgatttccttgaccgggccgaaggtttcatcaagctcgaagaagccattcagcgagcagaaggtgagcaaaagccgaacaaaacgaaggctccttctactggaacgtccgcccagcttccccaatattccagcaattcaagtggcaagcgttcaggcaacaaccacaagcaagggaacgggaagaagggaaagttcaccgaaaaacccggacagactccccgtgatcgcgccaaacacactgcattcactatcttaactgaagatatagaaagtgtgtatatagcgactcagtcgctaattccgtacaagaagcccgggcccatgaagaaagataccagcaaaagggacatgacaaaattttgtcggttccatggagactacgaccacgacaccaacgaatgcaacaacctgaagcgggaaatagaatttctgatcaagaagaacaacctacacctatagaagtatgtcaaggccaaccaagctcagaacaaccaggatttgatgcctctgccgatagatggacacttgcaagtcatcattggaggcccgcacatcgctggagacacgggcaaagctcgggagtgatatgcccgcacaggtcaatacgagcaagaagtagtcatcctggccgttgaagaaaggaagtccaaagttccgatagcaggagagccaaccatagcattcaacgacgaagatgctgtccagataagatttccgcacaacgacccgctggtcgtggaagtctagataacaaacaaaatggtgtccagaaccatgatcgataatggggcttcttcaaatatttgttcaagactgcttacgagaagatggggctccagctcaaggatttaact

SEQ ID NO: 336690 - DNA, 1942 bp, Cannabis indica
ctctgggcatgccagcgaggcatgctgctcggactgtttgctctgagaagatactccaagttgactccacgtgtcaccattatgcgatgccacgtcagagtgcaaaaattgggataacaatatcctacctttttcggtcatcaatggcttcttgttgagcctttaatgtttccatctctctatccctccactcaatgaactagcatcgctgctctttgaatgcaaggtttattgcagcatggagatcctccttatcatgaaggaaggtgttagtgtgaccttgcatgagcccaagggcattacggaggttttgaatctcagtgtcgtcccctaccgtcgtctgagcattggttgtggatgggattccagtgttaagagtgctttgatgagctacagaactgatattctcagtctcttgcacacctagtgtgatcccatctagaggggaagccacaccttggcccacaataggtggctgtgttttaggctgctcaggatttgttcctggtgggacccttgtattcccaggggtttacatggcaggctctgtcagcaatgggtcactctgatcaactaagcctctacgaatttgcaccaccattctatgtgtctgttgaattttaagacaaagaataaacttggatttttgctctcaatgaaagcaccataatgttgacctcgcttttagccaacgatagtgagtcaattaataagcgatcaaaaatgtaataaaataaagcaaaaatcaataagcgataaagaacaccaagttttatagaggtttgatccttttagttcagtaatagcgtactctccttagattgtattgacttgagaacaaagaacacaatgtttcctctctcaaagctctcacaatcaaatctctgaatgtttttctcttagatctctgtgtaaagcaattctttcgatcccttttcttgtgaagctagatcactatttattgggctaaatgcatgagggaaggttttccttttaattacaatatctataattggtaaataaattcattacatatttagaatacatgaaatgggggattgagacagcctgccatatccctctaatacaatcccatgattgtagggattgcctttgtgcttgggcttcacgataccattttgaagtggtcaagtcttgacacacgacttggtgaactaacttcattctttgcttggataatttgccttctgctctgtttggccagacagactttgtgtgtgcagacatgttgcttgaagtctgttcagtatatctctccgcccaagtgcaaggaatgacagacacgtgtcactcgtacatgccgttgttgaaatatgttttaccaggatctagatttactaacaagtatgttttattaacatcctaatatgaatttctaaaacaatgaaattaaacacataaagtttcagaaaaccttacattgggtgcagcggaataatatgtctccttccactcagatctctaacccttgtatactgtctatcgcggagtatcaccaggatctgagcccaaacgtccttctcttgaatctggattcttcacagttccacactatgattgatataccacttgatgtgtgtgggcactcactctatcactcaagggtattaaaatttgaagaagaaaagagagagaagatggttcggctatgggtatagaaaaggtggctcagtttttctctctcaagacaagaaatttcatctcttttaagtgtgagccatcactatctatttataggtaaccactagatttaggttaggaattattaggcattaaacaaatgtaaatattgtgaggaaaatcccttaaaagtcgctggccatagttagtgggccccacttgggtattttcccttattttctcaaaaatgccacttttccaattctaacctatttaaatgccgaaactaattatttaataa

SEQ ID NO: 336691 - DNA, 619 bp, Cannabis indica
acccagatgtagactttctatcatcaattgacccagcccagtctgcatctgtgaagacttcaaccttcctctcaattgtcttcttgaagaaaagaccttttcccggtgtttgcttgaggtacctcagaattctatatacagcattgagatgtccttgacatggattatgcatatattgactgactagacttaccgcaaaggcaatgtcgggtcttgtatgggagaggtagataagtttccctactagttgttggtacctctctttgtcaactgggcttccttcaaacattttcctcttgtctccgagctcaattggagtcttgctgggcttgctaccaagcattcctgtctcctccaagagatcaagagtatatttcctttgggacacagaaatcccttttttgcttctagcgaattccattcccaaaaaatatctgagtgcaccaagatccttgacttcgaactcctttgccaacatttccttgattagaataatctcttcaatatggtttccagtgacaattatgtcatccacatatacaatcagtactgccattttcccttttcctgagtgtttgataaaaagagtatgatcagtctgaccttgcatgtatccaag

SEQ ID NO: 336692 - DNA, 1076 bp, Cannabis indica
tgtcttgtttttgagcttcttgactgatgtctgttttctaacaatgttgctttttgttctgtacaaaacatgtctcggcaaatgtttgaggctctgaataagagaatgggcggaagctctatcgcctctccttcagccaagaagtctaagggcggtgagaggtcctctactaaggaaaagagggcttccggggaggtcattgatctttccgaggagctgactgctgcaaacccctctacccccaaagctgccaagtccaaggagtctggaccaccgacggttgggtctgaactggttatgagtgaccctgaacgggtgtgggcacctactccacatttgtcggtgcttctagaggccaaaaagggcaaggagatgctggcccattacatgaacctgctggttcctgaggtcagtaagcaactggctggtgctgacaatgactcttctttggaatttcttgtgggcggagtcttgaaggagttcaccagggtaagtctttcttaatgcttccctttaatcttccatacttagctcaaatgctaatattttttccttgtgcaggccggtctgaagttggcacacttactcccgtgctaagtctgctgcttccaagaacatggctctatctgacaccttgaaggcagaggtggacttggcttggaaggatgctaaagaagccagggcgaaagtcgaagttgttcggttagaattgggtgaagccaacaagaagttgtttgccgcttagaagaaaatcactgtgctgactaaggatctcgaggttgctgactatttagagaagaccatcgagaccttatatgctgaggtgaacagtcttcaggacgaaacgacttctcttcgagcagttcttcattggatgaaggaggaaaaggaagccaaggagggggagctttcggccgaggtggataggttgaaggagaaggtcaatgccttggagacagtcagtctcgagctcttctttgatttttggaacgctaatccttgggccaatttcgacttctagggcgatgctaaggacatgtaccttgagtactacgcgtcccaagtggcttatggca

SEQ ID NO: 336693 - DNA, 738 bp, Cannabis indica
acttcatcgctgattatcacatcagtgtaaatccagtgcactgatgaatcagggacattgtcttttgaagcatataatcacaatcatattccactgtgttgacatcactgtaattgttaataactatatgttttggacttaatagattttgtatatattaaaccataaacttgaaaactacatgtaaacataaatgacttctagtcttatattgataacaaatcagattagattgaaatgggttttatttagggcataaaatcgcaacagtaacatgccatcttggcacgcacattttattctcccccacttaaacatgtcgatgtcctcatcgacggaccacatgccaatcttcctaatctcgtctcctaagcttactccaagatgctcccgaatcctaagtctgcacttgtccctctacctccgtagaaccaccctcttggtgacgatctccctcgcccactcttggacttgatcaaagaacttgtgccactatcgctatttagaatctcccatggagtagcgcctccacactagaatacttcccccaacatgaactccttcgagtccatcacaatttccctccagtaaaccaagtagcccttgcaacactgaccctgaagctaccacatcctctgcttgtagctcactcgccaatcgtcaaatgcatacttattttgagaaggagtaagtatggtgcaccctttggggtgaggttcgcaaaccaaccgtacccaa

SEQ ID NO: 336694 - DNA, 914 bp, Cannabis indica
aaagataaataaaagcaaagttcaaacaattggatgaatctggacaacgagtagcgaggcatccatctcgctataacaaggtatagtcatggtaccttcactaatcagctccagacatcttttaatgagatccactgctctgtcgagtcaactctctcaaatagaagctgacattcaaatgatgattgattgctgaagttcaccttgtcactaagaattgtgattgtcagatggagtgttatgtcttaatagcaaaaacgatggtatttacattatcaaccttgctgtcagggttattgttgctatcccagtgagatgccccagcgaggtaccctttgtagcatatctaaatccacgtcagcattgacccagtaaaagcggataaatcacagttgtgtgattttcaaataataaccacatttattttacgtgggacgtaatcaaatcccataattttaaggatatattgttgtgggatattaatctgattgtaattaactacctccatatgtaactataaataggggcagagtgtacagaaaagacgaaaaatccttgagagaaaaaccctagttttgtatcagagaaatctaataagatagactcgtggactacgcagaattttaaatgcaaaaccacgtaaaaaacttggtgtgatctttgtgttgggttttgtgccctaaataaaactcatttcaatataataaatttactaattaataaatatcagaaatcattttatgttgcatggttcacataatttatttcatgattataaattctattaggtctagaacttatgtatttgttcatgattatagtgttgtcaacacagtggaatataatcatgattatatgttcaaaaatttaatttcctgatttctcagttcactggatttagactggcatgataa

SEQ ID NO: 336695 - DNA, 472 bp, Cannabis indica
attaaaccataaatatgaaaaatacatattaacataaaccacttcaaatcacttaaattgataactaatcaaattgtaatgagttttatttagggcacaaaacccaacaacttgttctttactgtcaacttatttaactcttgataataaatgcacgttcgtaaagttccatccttcttttcacgaacaatactggtgcaccccaaggtgagctacttggtcttgtaaattttaaattcaacatcccctgtaaatgaactttcaactctatcagctcagcaggtgccatcctgtagggagctcttgatacaggctctgccccatgtattaaatcaatctcaaaatcaatttcacgcttcggtggtaagcccggtaactcctctagaaaaacatctaaaaattctcgaaccactgagacatgctctggtccagctggtggttccttagtagtatccactacacttgctaagaa

SEQ ID NO: 336696 - DNA, 725 bp, Cannabis indica
caagcaacccatcggacacaactcgatatgatctcaaaagttgtagctcactcgatgaagccaactcgtgattgtgtattgtgctgaactctttgcatttccaagtgttacacggttgtgtgagtaaaatacgcaatgctttttttttcttggtgtgttcggtgatgcgatttttttcgaacctcggaacacaaaccacctccgcattacaatgaccccatgagaaccccatacatcgtctttccttgtgctgaaacccatatgtttcgcgtacatttcgtagaatgcttcctatttttctagtttgtcgaggctcttgccaagcacgtcctgtatttcaatctcattcactggttttatcatgtttagttgtgctgtgatggtttcccattcataagtgtgttcgtcattcatgttggcttgttattgatttgtgagaattatagatgaggagtaaggtttagagggtgctgaggggagggaaattagattttgtgagtttaaagggctgggataatagggttgtgtggagttggtgatctcatttggtgatcacatttaaagctgttgggctgatattaatgggcctctacaatattacaatctgaactcaactcctctcgtacgtcagaacagtataatagtacaaattgttttaatttcattccacatgtaattgtaaaataaggctatttgacgaaaaatttaaaggggtgatgttattg

SEQ ID NO: 336697 - DNA, 847 bp, Cannabis indica
tctttctacaactccattttactgtggagtgctaggggcagtcagttgggattcaattccaagttcaatgaaatgatctttgaactgcatatccatatattctctacccctatcagttcgcaagatctttaaagttttactcaattagttttgagccaatgctagaaactcttgaaacttctcaaacgtttcaaatttcttatgcataaggtaagtatgaccatatttagagtaatcgttaatgaaagtgacaaagtactcataaccacctctagctttgacattcagtggtagtggttctttggtatgctctccctttgtagagaaagaacgctttgtcattttgccttctaggcaagatccataaactggtaattcacctaaggtgacatttttcaatggaccacctttggttaacctgtgaagtctatcatagcctatatgaccaagacgtaagtgccatagatatgtttcgtctttattatcgatcttttaccttttgtggtttttaggtttagctatcttaaacagttcgttattaagcacaattggttcatatggtctaagaacataaagcctttgttccgtaaatgcaacacaaatttgaatgtcattacgagaaatgatagaaccagaactcaaaaaattcaatttattcaatttgaaatttagaataaatagaacattgtctaaattcaaagttctgttctgaaacttgtgttttgcttttcctctagctctaacaaatactatttcaccattaccaactttaagtttcaactctccaaattttaaataatttcaattttcaagcaattgcaatgaacaacagacatgattagtagat

SEQ ID NO: 336698 - DNA, 648 bp, Cannabis indica
actcatttaatcccatttacaccccattaagaaatagtaacatccattgggtgtaggatgtttgaatttcaaagtatgtgatcctagacactataaatagagactttggttcaccctttgagacatactcttctcttctatctttcaaacacaaagctagagagttctaaggtctgataatttctagaagtatctccacaaagccctaagcatttcatagagggagaaataatctacttggacaaagatgtagaaatcttgttcaagctttttggtgatctcatctccactttgggtgtttgttcttcttttcttattttgttctattctctagttttatattattctcttgttctcctctaaacactcttatatatgttatcatatatatatatcttgactatatagtattatatatattatatatacatactatatacacattctatatacactctttatatctctactatatatcatctattttatatatatatattctatatcatatatatacactattatatttatatgcttttatatagttacttctatctttgagttttgagttgtaactcttttcttttatttgtattttgtactttgggttgtaactctttatttaatatattgtccttgtaatatttt

SEQ ID NO: 336699 - DNA, 1683 bp, Cannabis indica
caaacgttagtgcagatataacagtctaaaattccagacacgactagacattgaacagaacatacactgtcacaaaataatgacactaacatgagcagttgtcaattctacctcgcatggcaattataatctaccttaaaaaaacttgaatatacttttaatgattttatcactttgtatatttttaattttctcatataaatagttaaattgtctatccattttataggttcaagtgcttttatcaatacgtcttaatgtctcgtttagcatcttcttagctcgcgcgaactgttaacattcagttttatgcacgagttatgacttatatctcatttataacttttcattttccactcccatcagataggtatataatcaaaaattatagttgtttgatcccttttttgtcaaaaaggtttgatcaagatgttataacaattttactcctctctcgtcaaaaaggtttggttcggaagttataacagttcgactcctctctcgtcaaagaggtttagtcgagaacctttaaatttaaaaaaaaatatatttttgaaatggtgggtttgcattatactatgtctttccagatgaattccagttaatcatacataaatgcccattaagtaattttaaagagtaaaactttgtaattacttaatataaatggatctctttatttataactgaagtttaaattttacatcagtaatgcaagttacatcatttattggtagtaaggtcacaaatgttccacattccagtagttttttattagcgagtcgttgagtcgagccagtttgtaaactccaactccaactactgcttcgatgacatatggaccctccaagtttgggttgaccactcctgcagatgcatctctaatatttgcaaatactcaccttagcaccaagtctctaacattaaatagtcttttcttgactctactattgaagtatcttctaactcggtgttggtacgctgcgttagtgacttgcgactcagttcatttttcatcaagtagatctaaggacaattttagaagttcatggttttcttcttgattataaaactttcttctgtgagtcgatatgttcacttcaagacgcagcattgcctccgagtcgaaagcaagcgagaaaaaagtgtgtcccgttgccatctccttggtagttttgtgagcccagagtactttaggtagctcatcgacccacctgcctctggcagcatctagcttcttcttaatagtatcctttagggctttattaacagcttccacttgcccattcgcctgaggcctggatgttgacgagaagcttttgataatttttttcctctctagcagaattcagtgaacaagtcgccatcaaattgggttccattattggatacaatcttcatgggaattgcaaaccaacagacaatattcttgacgacaaagttgaggactttcttgcaggttatggaaataaggggctcgacctctgtccatttagtgaagaagtcgactactactaccacatacttggctcctcctcgcccagtgggtaatgccccaattaagtcaattccccatgtagcaaatgggtagggtgaggtcatcattcttagttctgttggcggcacgcgagttatatgtgaaaacctctaacacttatcacatttcttgacaaactcatgggt

SEQ ID NO: 336700 - DNA, 665 bp, Cannabis indica
acagtagcagaaatcccatcaagaacatcatccatagtacagttggagctagtaaacagattctggaagtaagaacacatgacatctgatagacccgattcccagtcaacccaacttccatcttcgcattggagtttatcaatagcattcatatggcgcctagaagaagccgttgcatggaaaaatttgctatttttatccccctcctgaagccacaattgtttagatcgttggcgccaaaacacctccttctgagtaagaacttcaaaaagttctgtctcagcttccttatatttagaaatagcatcgggatccctaccttgcttccaccacctcacctccttcttccaatattttatacgagaagcaaaattacccgaataatctttgccccaaaccgaaagagattccccacaccgttgtattttctcttggatacccgctagattatactcctcccaacactcctttaccacctgataacacagaggttcccgaagccagcaattttcaaagcgaaatttgcgactcccggaaactatattatgccgagccaaatcaagaaagatgggacaatgatcagaagaagatacctcgagattaataagtttagcccgtgggaacagttggagccatttgtcagtcaccagagcacgatctaaacg

SEQ ID NO: 336701 - DNA, 1120 bp, Cannabis indica
catttcttgttcggcttgggcactaacacgggattcgcaaccgaagccgggtagaaagcttaaattataaagtttttgttgcgtagcttttcaacttcttccttcaaggctactgctcgttctttgtccaacagccttcgcttttgttgaactagccggaagttgggatcaatattcagaacatgtgaaattatagaaggatcaattccaaccatatccacatgtgaccaggcaaaaacgtctaggtttgctcttagaaattttatcaattcttattttacttcgagcaagaaacatttttcgatctttagctttgtggtcgggatatctagatcgatctcgatctcttctaattcttctacaggtccaacattgctacttggggtccctaagtcgaggatccacatcttcatcccctccttgggaagttccctacatggaaatgttttttcccttgtttgtgctctggctggaggatatttccttcttagccttggccactgtaagattgtaacattttcgagcagactgctggtttcctcttagacaccctaccccattctttgttgaaaactttaggcatgagtgaaatattgatgttacagcctttaagtcatacaaggtcggctgacctagcattacgttaaaagctaaaggaacatataatatcacgaactgtgccatgacagtcatgctcgtcggaccttgtccaacagtgaagggtagacgaatttgtcctagaggtgcgactccttgaccaaagaaaccatagacaggctggagacatgaggttagatccttgagttgcagtgccatcttttcataagcagttttgaacaagatattggaagaggctccgttatcgatcatggttctggccaccattttattggctatctgtactttaacgaccagcgtgtcgttttgtggaaatttaattttgacagcgtcttcatcgttgaaggttatggtcgactctcctgctcgtggaactttgggcttctttctaccacggtcggataacttcttcttgctcgtgctgtgctatttgggcatatctctcacgagctcttcctgaatctccagaaatgtgtgggcctccaacaataacttgcagatg

SEQ ID NO: 336702 - DNA, 698 bp, Cannabis indica
tctgctctgctgaaacattatgaacagcaacgttggctaactggatgtcaagttgctaggggagcgcctcgtgtgtcacatatgctttttgctgatgatagctatgtgtattgcaaggctaacgatgaggagtctgaaagagtgttgcagttgttcaatgtgtatcaaagagcctcgggtcagcaaattaatcgagccaagtcatccatcttcttcagtaagaatattaatgaaggaactcgggctagattgtgtagtattctgggtatgaatgcagctatggagaatagcatgtacttgggcttaccttgtacaatgggtcggaataagaatgctatacttggatttcttaaggataaaatgcagaagaaaattttctcttgggagacaagatttttgtctaaagcgggaaaagaagtgcttttgaaatcagttgctcaagccttgccttgttatgctatgagtgtattcttactcactcaggaaatttgctctaatcttgaaggtatgatgtctaaattctggtggaaatctcagtctaattcttctagtaagggagtgagttggatgagttggaagaagctttgtcgtcacaagaatgagggtggtattggctttcgagaccttcgtaactacaatctttcttttcttggaaagcaaggttggagattattaaccaatgagaattctttggttag

SEQ ID NO: 336703 - DNA, 596 bp, Cannabis indica
tacaatctttcttttcttggaaagcaaggttggagattattaaccaatgagaattctttggttagtaggatttacaaagcaagatactatcctaatggttcttatctcacggctgagattggttcgaatcctagctttatttggagaagcattttagaagccaaagatttggtttcggctggtgcaagaagatcaattggaggggggacttctgtcagcattcttcgtgatccatggttgcctcacaatttgaatccttttgttctttctagtcaccctgctctggtaggaaaaatggtgttcaacttgtttttggatggacagagatgttgggatttagaggtgctagaagacctttttgaagagagggacaaagatttaattgtatctatccaacttagtgagtcagtggacgaagatggctggttctggaacaagtcatcttcgggcttttatacaataaagagtgcctactcttatctgcagcagaacacagccacggtagacttggttcagaactcagatgggttcaaaaaactctggcagcttgatattcctcagaaggttcaacactttttatggcgtgcaacatcggg

SEQ ID NO: 336704 - DNA, 730 bp, Cannabis indica
gttttttttctacttcttttaatgaaattattagtttcttttaatgttgattaaaaccaatttttaaagtttgtatcatttttagattataattttttgtattgtatttttttttttttcaggatgatgttgatgaaactagttttttttctgttgcttttaatgaaataattagtttcttttaatgttgatgaaatttgtttttaaaggttagtatcgtttttacattattattaaatttttttatgaaacttgttttagtttgtgattctcttaaagatatttatctcatattaaatgattaaatcaactctaattttcaagcaaacaaataagagatgaaatgtcaaaacagagtatgaagttagaaattggaatattaggtattcatataaatttatacattagaaactaattttttatagttggtgtcgtttttagattatattttttgcattgtattttcttttcattatgttgttgacgaaactggttttagtttttgattccatttgttatctttatcccattttgtatgattaaatcaacttttgtttttgagaaagcaaagcaaggattgaatgtcgaaataaagaatgaagttagaaatttcgttattaggtattcatatataatttatatgtttgaaactagtttttaaagtatttgtatcatttttagattataattttttgcattgtacttttttctttatgttattgatgaaact

SEQ ID NO: 336705 - DNA, 604 bp, Cannabis indica
aataatttaaactttataaactaaaagtccttttccattggccgacctaagcagcaaaatagagtcacaaaatacatcactggtagaccccaacccacttggtctagtgtggcccgaacatgtacattcttcgtccagatcctatactcatggctagtcagaaacaactcctatactcatggctggtcagaaacagctttacataagtgctttttggagggaaaaccttttttcacttctcgctttttacttttaactttctctcactagaaacttgctttagaaaagctcttccttctctctaaaatgttgcacccacaagctttatcttcctgggatttttgcgtcgtttcaatgatctgagcttcccaccttcttcttcaacgatatcttgcactgggtaaactttctattcctgctatcttcacttgatttggttgattttgccatggatgcatgaacattatttcttgctttgaacatgtcttgattcttacgttagattgttatcctttcggtattttgatccgcatgatagccttaggatacataatgtgtgatttctagacaaaaaagatcttaatctgacctttattgtgattct

SEQ ID NO: 336706 - DNA, 1043 bp, Cannabis indica
tctcaacgtgtccaacagaaaagtgatgcacgacggtcttggcttcgtccttgaaaagtttttcacgattttttgagatgtgtagggtgagatttttgcagaacactaacaagtgtaagatgatagaaaaaacttgttaaaatataccttgaaaagaagaatattttcaattttttaattagggggccattttaaaatttttttacttgaatccaatcttcatattcatgtcttagtagtataaattcttgtgaccagtgaaaaaaaatattctacgatgggtccaagccacctttaacaaaggggtaccactatcaaaaatgtgtgattttcactatttcgattaaaattattgttagtgcatgaaaactactttatctcgcaacgtgtccattagaaaattgatgcacaacattcttggcttcatcctcataaaatttcacaatttttgagatgtgtagggtaagattttaacagaacaccaacgagtgtaagagtaaagaaagaacttattaaaatttaccctgtaaagaagaatatttttaaattttgaattaaggggccattttaacaaaatttcatgagaaagcgatcttcatattcaattcttagagtacaaaataatatcttccattacattcgttgattcgtattctctaaggttaacacacgtcatcctctaaagtgccagccgaattttgggtataacagaaggaaagaccattccaatgtaacattagaaaaaaattaatgatttttgtcaatattttatgcattttaaatgttattttattttcattcctattcccattcccctgaaccgtgaaccgtgaaccctgaaccgtaaacccaaaatccctatacccctaaaccccctaaaccctgaaacccttaaaccgtaaaacactaaaccctaaatcctaaactctagaacccaaaccccaaaccccaaaccctaaccccaacaccctgaaccctgaaccctaacccctgaacacagacccttaggtggcatttggttagaggtaatgaaatggaatgga

SEQ ID NO: 336707 - DNA, 527 bp, Cannabis indica
tttttcattgaatattttaaagttaattttagaaaaacacttagttaaatgagatatattctagatagttatttctagtgactaattatattttctaatatttaattaggaaatattttaagttgaaaactaattttttattaattaattttggaccaacttaaattagaatatttttcctagtattaaattaaaattaataattaagtttattttataattgattatttagttcttttatttaacatttaattaaattgaaaattaaatatttaagttgattttattcttgacacttaaatattattattttcagaatatttaattgaatagaaaattatatttaagttgaaaattttaatttcacaaaaatttaaattaaaataattttcaaaatatattttattttattttattaatcatttttcccaccaaaatttcgaaattgcatttattaaatgcagataattttttaaatttttttttgaaaaatagattaaagttgaaaattaattttagatcaactt

SEQ ID NO: 336708 - DNA, 1171 bp, Cannabis indica
atattaataaaacttaaagataaattagctaaaatttcaaattgctaaccatatcagattttcaaaatttcgatatttttaaaataatttattaattttattataagattagaaaaatgttagatttgacattttacattattatatatttatatttttctaaccataaaattttcaaatttaggatattttattttatttaatttttttaaataagattgatagtatcctaaccataaaatattctattttcaaattttgtttattttgttaaaatttactttattaaattataagatttgaaatataatattagaaatatctcaattttaaattacgatattatgttatattattatattagatatttaattaatttaaattatttaaataaacaagatatttaaaaattagttggatatttgaatttaagatatttatgagtttgttagattttaaatatttttcaaatattttctaacaacctaatttgaattcaagttaagatatattttgaatattttagtctaaaatggaaatcttaacctactttccagatattgctacatgttcgaagggagtgaagcaagccctcagagagttgtaccaacatccttggccgtctaagaggagcctataggccggtgagggtgagcctataggtcggccagggtctgtgcacaagctggccgaccaagaagtgacttctggacccaaggagcctctgttcgaccaagggaacgtggcctcttcaaggaaacaatgtacaaagctgtcctcaacttgcaaaaggctagcctccacactcaaaggctggcctccacactcaaaggttggcctcctcttggtggagctatagtgacctgccaggtcttggaggccttgtcctgccagatcctgcaggcctagtcttgtcaggttcttgcaggaccatggccaaccagacttccttgtaggtctatgggtggccaggattgacctagcaggactctatgtacaagcccaaaatgttgacacatggcatgggctggaaattgggccctaaaagcccaacataatggctaaacaatatctagattcaagggcactttatctattgtagttatctaacaaactatgtaaatatctaggatttaacttataatctaggtttaggcttcctatataaagg

SEQ ID NO: 336709 - DNA, 741 bp, Cannabis indica
gaaaagcgatctattggaaacaacgagcaaggatttcctggctcaatgaaggggataagtgctctaagttcttctttctttctgccactattaaaggaagaagaaatgccattgagagtttattaaacaaagacaataagtggatcactggtagggagcttattggcagagagtttattgatttcttcgacggtatcttcactagggtggatatcgggcaggactatgattgtagtcggttttttcaagagggaatttctttggaggagtcggagaatctccttcaatgccctagtgtagataagataagaagcaccctctttgccatgaataagcataagactcctgggcctgatgggatgtcatttctgttctataagcactattaggagtctattagcactgatttttgtgaggcggtgtcagattttttataacgggtaatatgcatagaggtatcaatgctactaatattgtactcattccaaaggtccataacccgaagagaaccagtcatttcagacccatctctctatgcaatgtcgtgtacaaggttatctccaagattctagcgaacagaataaaacctttactaccttccttgatttgccctactcaagctgcctttgttccaggaagaaacatccatgacaataatgtcattgttcaagaagttattcattctttcaacaaaaagaaaggcaaggaaggtttttttgctattaaaattgatcttgtcaa

SEQ ID NO: 336710 - DNA, 971 bp, Cannabis indica
aggcaataagagatttgaatggaaaaatgagagtttaaaggcataaagaaacatttgtcaacactcccaatttttgccaaaccaataactggagaaactttatacctatatctagctgtctcggagcatgccattagagaaaccttagtgcaagaagagggtaagcactggtaacctgtttactatgtcagtaaaaggttactgggggtagagtcgagataccccccctagaaaaacttgcattatacctaatccatgcatctaaaaaattacgaccatatttccaggcgcatccaattaaagtcttaataaatcaaccactaagataagttttatcaaaacctgatgctccaggaagattgataaagtggtcaattgagttgggacaatttgacgtggcctaccacctgagagtgtcaatcaaagggcaagatttggctaactttctaattgaagggataaactccaaagaagacccagatgttgagcatgaaacagaaacatgaaaattatatgtagatggggcttcaaatgagatggcttgggggcatgagttatattgatgtcgcctgaaaacttcaaattccactacacattgaggttccagtttgatacctcaaacaacgaggtagaatatgaggccttgttggcaggtttgtgaatagctaaggcactaaaggtcaagaatcttacatgctttagtgactcacaactgattgtaaatcaagtcttgggagaataccaagcaaaatgattaaaaatggaaaaatatttaggcaaggttcagaagaatttggaaaagtttgattattttaaaatcaaacaaattccaagagaacaaaactctaatgcagatgcattagcaaagctaacatcccagtttgatctcgacaagttgaatttgctaccagttgaagtcttgagtgacccaagcatatatgaagaagaagaaatcgagatgatagatactt

SEQ ID NO: 336711 - DNA, 634 bp, Cannabis indica
tctccaagcgatgtgggattgcacaacttacccggtatttccctcttacgtatcacacgactactgactgtcacaatctatctctttaacactatatctcagctcactctttcttaatctttcgacctatcttagtgaatggccggacctcatcatcgagaaaaagcatacacattcacctcaataatgggtaggtgttgtaaaaaaaattctttaatatttagattagtatgtagtttatttttgatagatctgtgtggttgttgtttgcattggtgttattttgctggtgttttttatcaaaatggcgagatctggctttctcgcaaaactaggattcttatttgattattaggggtgttcgcggtgcgggtggtgcagttcttgactattttttcaaaccaacccgcacatgcaatttttttaatttttcaaatcgcactcgcaccgtgaaactaaaaaatcgcaccgtaaaaaaatgtgcagtgcggtttatgcggtttttacggtttggactatcactaaataattatactatcacaaatacaataaagtttgagcaactcttctcaaaaataccataaggcttgaaaataaaaatgacaaaaaagtttcaagtttcaacaatacaata

SEQ ID NO: 336712 - DNA, 582 bp, Cannabis indica
ttttaagcgctaggtttttattagttctttatgggtgttcatggctataggctcagataagttctgagcatgatttcttagttgaattaggtttgtttgtgcatgttttatttgatttcatggctattgagattatgttgtgtttgaagaagttaaaggaattgattttctttcacttgagcatatgaatttgagttagagaatgaactattgtaatttgaagcttgggatatgttatatttatgttattatactgttttggaaagtttggttaggtttggcggatgttggattgggttttggggtgaaaaaccagaaattttcatggctgccaggaaaaaatggccgaccgtttttcctagttaggggaaatttcgggtttttctcctcaagtctgatctgattcgaggtgtcctttagagtgaaattcagggtgttttagagatggttaagcttgtttgatccgggggaaagtatggtgtgttcgattgtgacaattagagtcgattatcaaaaatttgattaaggtttttattgagttttgattgttgtgacatatgactgggatcgcctagcttgttt

SEQ ID NO: 336713 - DNA, 732 bp, Cannabis indica
ggtgtttccaaaacccaaaaagggcaaggagatgttggcccattatatgaaccggctggttccttaggtcagtgagcaactagctggtgcgggcaatgactcatctttggaattactggtggtctgagtcttgaaggagttcaccggggtaagtctttcttaatacatccctttaatcttcaatacttagctcaaatgctaaagttctttccttgtgcaggtcggtctgaagttggcctacacttacttctgggctaagtctgctgcttctaagaacacgactcagtgtgacaccctgagggcagaggcagacttggccagaaaggatgctgaagaagcaagggcggaagtcagagctgttcggttggaattgggtgaagccaacaagaagttatttgccgctgagaagaaaatcattgtgctgactaaggatctcgaggttgctgaccgttttgaggagaccatcgagaccttatctgctgaggtaaacagtcttcaggacgagaggacttccctttgagcagttcttcatcagatgaaggaggaaaaggaatccaaggaggaggagctttcggctgaggtggacaggttgaaggagaaggtcaatgccttggagacagtcggtcttaagctcttctttgatttttggaaggcttatcctcaggccaattttgactgcttgggcaatgataaggacatgtaccttgagttctgcacgtcccaagtggccta

SEQ ID NO: 336714 - DNA, 884 bp, Cannabis indica
gatcattagcttgttgagtacttctcctcttcgagttgatcgtggggtcttaaccgcctcgaggccacacttgcttcttcacgctctgttctttccccctgagagcggtttctcgtatttcccccatcagagtctgtacgagtcctcgctctatgggtttgggaagaacgttggtgatttctagcaggtgacctatgttctcccggttgagtcccaagatcttcctcattgtcatgagggatttctcgttcatcagtttccggttgtctcccttctggctgttccttttgattttcagggggtatctcattttccctgggttgttcttctagggcattttcctgtctcttggttcgtgagccacgaggtctgcctcgtggtcttcttactccaggttcagattgattttgaggatttgtcccatgtgccaccttggtcgaggctgcatcacgctctaactcagcgtttcaatgctgcgcctcttctagacggcgtctcaggcggcagttttctgcttcataagtaccttctcccatagattgggcatctccacgattgaacttttcatccctcgtcccagggttttgaccactcccacgttgagttatcctcgagcgtgttgtccgcgtactaggaccaacatcgggttgggctctccaggaacgtgtggtccgtgtaccagggccaccctcaggttgagtcctcctggaacgggtggtccgtctggaccacgggttggtagaccttccggagcccatgggctctttcccagaataatgattagtttcctcatttggggtgttaacattttttggattttcagccatgaaggaggtggtttttcttcaaaagaagggagggtttttctaagctttttcacagag

SEQ ID NO: 336715 - DNA, 509 bp, Cannabis indica
gtaaaaatgatagactttaacaaagagggtaaaaataaaagaggacaatataaaaaatgtatagagtgtaattttctccttcaattttgcagccatgaatgattgccattttacccaatcaattccaaggtctcatacggaaccatgatcccaccaacacagttgatagcttcaccccaccattactatcgggattgaaaaataccattttttatacattaatcaaatttactttcaaataaaacataattcaaatatacttcttttttatgagtattgtacctaaattatcctcacacacttacataactaagctataatttaaaacattatagatttattttctttatagatagatgtgtaggtttgtgggaaagttagggaagaactttgattagagaagaataataattatcgtgaagtgataagagtaaaatttgtagagtagttagaaaagaaataaacataataaattttaaaagagagtaaaattaaagaccatcaagtta

SEQ ID NO: 336716 - DNA, 865 bp, Cannabis indica
ttacggtttgagtttttaaagtaattttgtcggtagtttctatgggggttgctatacgaattttggttgctccgttagttgcaataggagtttttgtgtagaatttcaaaaaattgccaaaaaaaattgtaatttattatttgggcattgactttgacgcattaaattatttttaattttttgaaaatttgtaaaatattttatttaaagagtaatttgcagtgtaaatatttaagtttaattctcagttgcagataaattataagtttaattttttacagtaataatattaatacataaattatatttctaaatttctatagatattgttaatggttaagttattatctacgtgttatttttatattagtatatttaattaatttttaaataagaaataaaaatttaatgacctgaaccaatcataaattgccaaatgactaatatttgacacttaggtcaagtatttacagaaattttaaaaatataacttaagtattattattataaaaaaattaaaattaagtatttatttataattaatagaaattaaatttaaatatttatagtgcaaattaataatttaataattatatcaaatattatcatataaaaaaattgttaattaaatctatctagatatcaaaaatatgaaatctatataccaattaagcaccctatttaatgggtggaccatataagacctttccattaatttgggttatagtgtctatttatatatatatatatatatatatagtaggacaagtactagtggtaagtaacttagcataaatctgtaccaataaagaagtctttttgactattaattttagatcatctgatcattaagatataaggtgta

SEQ ID NO: 336717 - DNA, 884 bp, Cannabis indica
tggactcacaacctccaccgcacaatgagaaaaaactttcgtgactacaaagggtcctatccaccaagacttcaacttccctggaaagagtttgagtcgagagtgatacatcaaaactttttgaccttctacaaaatttttccgatgaatgttcttgtcatgaaaggactttgtcttctctttgtagattctcgagctttcataggcttcattgcgaatctcctccaattcatgcaattctagcattctttgttggccagccaccaccatgtccatgttacatttttttaccgcccaccaagccttgtgttctagttcgactggtaggtgacatggttttccataaaccaaccgatatggtgacataccgataggtgtctcgtaagcagtccggtaggcccataaagcatcatctagccttgtactccagtctttttggtttcgattcacattcttctcaagaataagtttgacttctcggttagagacttctgcttgtccattggcttgagggtgataaggtacagctaccttgtgagttacactgtaacgacgaaaaagtgcttcaatactcttgttgcagaagttggtgcccctatcactaatgatagcttttggtgtaccaaaacgaataaagatgttagagcgaatgaaatccaccaccgtttttgaattgttagttctggctgctatggcttctacccatttagacacataatccaccgccaaagtaataatttacattaagtatacaaccattgcatcattctgaaattgtattaccatagaaggatttaggtaacgactggtaactaatcatcaatatgcaactcaaaatttctggggaggtaagtttggatataattcaaaaatcaaattaatga

SEQ ID NO: 336718 - DNA, 555 bp, Cannabis indica
tgacctaaacgtaaatgccatagataggtttgatcatcattatcgatgttttgctttttgtggtttctatgtttagctacttttaaacagttcgttatgtagggaaaatggtgcgtctggtcttagaacataaagcccctgttccatggatgcaacacaaatttcaatgtcattttgagaaatggtagaaccagaactcaagaaatctaatttgtgttgatgcaattgtaagcatgaaacagaaatcatgtttctattgaaattttgaatgaataagacattgtctaattccagaattctgtttagtaacttgagtttggcatttcttctagctctaaccgataccatttcgccattacaaactttaagtttcaactctccggatttcaaataattcgacttttcaagcaattgcaatgaacaactgacatggtttgtagatccagaatgaagaactagatggatttatcattctctaaatcacatgattcaaaaactaaagcatcactgcttaatcgtttttgaattgttgtcattgctggttcaatctgttgt

SEQ ID NO: 336719 - DNA, 697 bp, Cannabis indica
ttgattgtatgattatttattttaaataatatttaattaatttatattctattatatacaatggtggtatataattttgttgtcatgatatatatattttttaattgtggtatataatttggttagtatagtatacatctatatatattagtaaaaaatatttttattattattatttttagtatatatattttagtgaatggtatatgtattttttgttacacggtatattatttttttaaaataatattttaagttctgttgacccaggttttcagcaaccaatataataataataattaagagagctataaggaatttagagagggatttttacgtggttggggcgttaatgagccttagtccacgagtctgtgtatttatgatagtatttattacagagaatgttcttggtggatttttcctcttctagttcttatgaaacccagaattctcgacccctctttaatgagtttcgagggtatttatagtgtttttgtggggtgatccctagaattaaggtacatgtatttctgtaactatcagtaaagccacacattcccaatgaatatatcataggtaatgcatggtctaattcctaggcttgtaggggatttatggatgtagtcctttatccttttcgactgatgtgagtcctcataaagtagccgtcactagactcattaatcatagcata

SEQ ID NO: 336720 - DNA, 823 bp, Cannabis indica
tttatgccaaagcatggatgatttcaattctaatcttgcacgtttggaaccaacaacaacattaagagaagaagaagaaggacaagagggagaagtaacaggaacaacatcaagcaaatcaagcttatataagtttccacacaaagttccatttccaatcaacatagagtcacgatacaaagtcagttttccatttccaaaatgaagactataacctagtctatccaaaatagatacagagatcaaattcctcctaatagagggtaaataagcaacatcttgcaactccaaaaaatacccagtattcagctgcagattaacagtcccaaaaaattcaactctgactttagtatcgtgtcccatatacacatactcctccaacctactcggccttcttcgacttgtgactgcctgcaaggaattcgtaacatgaattgtagcaccaatatctaaccaccaagtgtttgagggcacatcaataatattggattccaaacaaaccatcacaagacaattacctttcttctctaagtgagctttgagctttcggcaatcggctttcttatgctcgaagcattgacaaaagttgcacttccctttgaaaaactcattcttatgaccagttgaagaagagcttgcttgtccatttcccttaggattggtggctttcttcttatgaaacctttggtcactagagttgttgggagtgaactttctcttgtgagaattgtttggattggtcaccatgaagatacttcttgctctcccctttttcatgtcctcttcttctttggcaaaaaagcagccatctcctcaatggtcc

SEQ ID NO: 336721 - DNA, 662 bp, Cannabis indica
ttacgcttgttttctttggtttcaggtttcacacttggaatatattaattgatcaaatttgggaaaacaacattctatataatagacaaaattctacaagaaaataaagcagaaacatcaagccttaatttgactaggttctgattagattttagaaaaagtcaaagcatagaagttttagatttatttttcttctttccaacgcatcttcaatcaactcgtttcgagttcgtatgtgaaagttatgcatattttactgaaagatactgaagctgtcaaatttgcttcagtatcgcgaccaccattttccatggtcgcgaccctttttcatggtcgcgactaggaggccaggcagcgagcttatttttgtattttgcctatggtcgcgactaggctttatgtagtcgcaataaggggcgaaacacgagatttttggccagtttttgactttcaccatttagaggtagcaactctaatttctatctaggggctcgtgttttagaataaagggagggagaaaatggacccaaaagttaaagaatgaggtagaggaagcaattgtggcaatccggaattcaatcgcgaactagttctttcttaaactcttaatttctatgttaatttctattttagttttgattatggatgttattatggatttt

SEQ ID NO: 336722 - DNA, 554 bp, Cannabis indica
aacctagaagatctgaaaagagctaggttaatttataatctgtcattcacttcaagagaaggatagcaattagacattaacattggtaacttaacaacaggattcgtctccctattctctcatcttgattaatattcacttgtttctttaagtttcttgaatttctttcttcctttttcaatcataaatacttttgatttgccaaatagaattataagtatagtttagtagtaattaatccaattccctgtggttcgacctcacttgcgtgagtatactacttgattgcgtgcacttgcgtagtaattaataattttcgcaacaagtttttggcgccgttgccggggaattgtataaagattgatattacataaaattatactaacttctactttggttaattctttttgcttatttctaatctgtttcttttagattaaattttgtaatattattaaaaattaaattttgttctaatttggtttttctttttagttttagtattaattttgttgtttcaaatttttatctttttagtactaatttagtttttt

SEQ ID NO: 336723 - DNA, 701 bp, Cannabis indica
ttcttctttaatttagcaaaggttctataaatttacgatttaggttttctatattaaagcccttttagtattctattttgatttgtaatatatatatttcttgagtgttttataaatcctaacaagtggtatcagagccacctttgttgaattaattgaagatttgatgattttattcatgaaatttgagaattttaataattagggttttgatttttgtttatataattcttccactgtaattttttttgggggctataaattcaattgcatatatcaaatcaatcaatcatcaatttatataaaggagaggaatgaggcggtgatgtggcggtctaaaaacactagaaagtattatttcttttttctcattttttctattcttttattaaagttaattattttatataaataaaattccacaaaataaagaatatatacgatttaattatatacatgtgatacttaaatttctttttcaataaaatataattcctaaattttctctatttttatcttattttgaatttaattaaaaataaataaaattccacataataagaaatatatacggtttaattatatacatatgatattaaatttctttttcaataaaatctaattcctaagttttctctatttttatcttattttaaatattaaaaataataaaatattcttacgtattctcatttttttaa

SEQ ID NO: 336724 - DNA, 878 bp, Cannabis indica
tttttccaaacccagaacatggaaaagtttgtaaattggtgaaatctttatatggattaaagcaagcaccaaaacaatggcatgagaaatttgaccacactatgatggcaaatggattcaaaatcaacgaatgtgacaaatgtgtttatgtcaaagaaatagataatgactatgtcatcctatgtctttatgttgatgacatgctcattataggaagcaatgataagatgatcaaatctattaaaaatttgctgaaatccaaatttgacatgaaagatatgggcctagcagatgttattttgggaattcaaatctctagaacatctgatggactcattctaagtcagtcacattatgtggacaaaattcttgagaaattcaacaaggaagatactggtgtttccagaactcctattgatttaactctacatttgtttaaaaacaaaggtgagagtgtctctcaggtagattactcaagaattattggaagtctaatgtacttaatgagttgtacaagacctgacatagcctacacagttagtaaactgagtagatacacgagtaatccaggtcctgaccattggaaaggaataacaagagtattgaggtacttacgttttactcgaagctatgggctgcattatacaaaatatccagcagtacttgaagggtattgtgatgctaactggatatctgatataaaagactctaagtctacgagtggatatgtgttcacactcggtggtgcagcggtgtcatggaaatcttctaaacaaacggtcatagctagatccacgatggaatctgagtttatagcgttagataaatgtggcgaagaagcagaatggcttcgtcaatttttagaagatattccaaaa

SEQ ID NO: 336725 - DNA, 1195 bp, Cannabis indica
tttttttttttgaaagaacttcggttcgggatagattaactccaaaggatatcgggatttacagggggaaatccctcccctttacagttcgaaaagctgctgtgagagtgaagagactcattagcaagcttgtccacattggagatgaaacatcattttacaaaaaagaaattacaaacagcaaaggaagataatagacataaaacagaagaaaaagtagcaaacagatgccagtcaggacacttcttcaggttcaatgcttgaactaggatcttagagtctgaaacgatggagacttcattcaagtgatgatcggatgcccaattcagagcagaccaaatcacctctaactcaacggccagggcatttaaacaggtaccgaacgacgagcaccaaaaccaatcagaacttcctctggtttggaccaccaaggcacatccaaaggaaccatcaacaattatcacattgtcagtcggaacggacagagacggaggaggctcaaatgagggcgtggccatccgaaagcaagaagattcttttggaatcatttcatggaatctattaaatacactgaagagagcctgattgaaacggggttgaatctcagagggagagtgtattacttgatttctaaagttctagatggtctcaaaagtggtagcggcacaaattaaaatggatgttctcatgtcaagactagaattgttgcataagtctgagatgaaagccaccatatccacgcaaggaagggcattgacacgcaaaggcaggggaccaccaaaccatatggcagaggcaaaagggcatttaacgaataagtgccaaggtgtttcagtatcagacttacacagagggtaaaaagtttcggagctagagccgaatttgtcaccagaaggaagggagttagcacaaacacgccagagcatcatactcagacgtgggtgaatagaatgatcccatatcaaactccaaatcttcctggattcaccaaatctgttttcctgagcttcccaataggcacctttgacagagaatctgcccgaggttgaatgtttccaaataagagtgtcctgatccaaatctttagcaatttggatttccccaatctttccaccaatttcaggaccaaagaggaagttttggtagtccgtgttccacattttcgtccttcgatacatgagatcagcaacatttt

SEQ ID NO: 336726 - DNA, 514 bp, Cannabis indica
attttgcctctctgagtgactccttcttaatctttttcaacatcttattcttcacatccaagtaatccttgttacaagtttccatcagcttagtgtaagaaatctttccccaggggtactcgtagaagaatggaaggttatcaaccattcttatcacaaaaggaggaacgacagtcttctcctccttaccagtgaggacgcccataacaaacaaggccatccccaacttgtagacatcatcagcttctgtgcagctctcaaaaactctgcgcagttggccgaagctgatcgaagcactaccgttgaaatattccataatcaaccggtcagaacttcctttttctttgatgtcttcctcagtaaggccgggcaacaagtttagcccagtgaccaagccgaactccaccctcccaaatctacatctcatccttccaacatagaaatgcacctcgtccggcttgtcagattttaatttgtgaagcatcagctgatgaaaaaatgctccagaaaattg

SEQ ID NO: 336727 - DNA, 1247 bp, Cannabis indica
agcatggcataatagcatctatctttcaagtgatgctgtctttcttctttagcctttattaagcatgtaactgagaaatgctaaggaccacggtcctaagtactgcaaaaagtaagcatattgtttgtgagattataattataaaattcttaaaagatgttatattattagattatttttaaaaataagtgtaaaaaataacgtgaaagaaagagaaaataaaatattatatctaatatggagaagtataatatttttagaattctgtttgttacgttgtattatactgtattgtattatatagtatcatattaaattataatttatgtaatatttttatataaaattatataaagtattaatttatataacatataaatatataatattttattataaattaaagtttaatataatataatataaaaaatatgaatgtaatctaattttatataataggatacaataccatcatctaaaaggtataaaacaataattgattcaattagtggaatggggtatggcgtctcatccaacatgatgatatgacaggcgtttgtgtagatatgacaagtgtttgtgtacacacactcattttccattaacaaaaaatagaaaatgtaggacaaatttaatgcatctctttatattgaatattgtgcccatttttattttaatattgtttctcatacaaaagctggcctctctcgctagtgacatatggttcatggatggtatatgtgcttttttcatcatcaagatcgcagcaaaaaaaaaatgatcgctataaaacaaaatttgtagaagcaatctcattgcagatttttggtgggaaagaaagataatattaatttttgtttttttaaagtgcagtttggtaatatttttgttttttaattttttaatcacaaaatgaaagtaaaatttttatttttaaaaaatttatttttgaaaaacaaaaatacattatgtaaccacttttgtttttcaattttaaaaacagaaaacaaaagtgtgttcagtaaaattcatttttatttttatttttttgattttatttaagtcgggtctaggtccggggtcagattcgagttcaagttaaaagccggactgtggggagaggatttgggtccgggtctagtcgtaatccaaaagattgattaaaaaaaaaactgtttaaaaaaatattgaaagtaaatttttttgtttttaaaattttgatttctaattataaaattgaaaagtaa

SEQ ID NO: 336728 - DNA, 518 bp, Cannabis indica
cataaaacccaacagtatactcttccttaatctaattaaccttatatatatatatcaaattctagagaaattattataaaacactaacacttaataatttaatgcaggcatctgggagaccataaatgatttgagaaaaattttcaagttttacgacctagagcttctcgcagtgaatggtatcaacgatgaagagaagagtcagtctgttgacaatgcggcaagatgattgactgcttggttatcattgatgaataacaaccaccaaatgttctttattccctggaatatcgggtaaacactatttaattttttagtgctaattgtttatttctatattataacttggaagtatttttatactatcttacctataacccaatataattttttagtgcgcattggatgctagaggtcgttgcgctaaggaaagttatccatttagaccctatacgtggccactaagttcacgaacaaattactgcattgttaaaaaggtaataatttaatgactattt

SEQ ID NO: 336729 - DNA, 852 bp, Cannabis indica
aaatccaaataaaaactagttcccagtaacaatctaaaatgcccaattatttcctgtaatatcctagaaaatataataatatttaattagacatattttattaaatatgtgattatatagacattagagtaggattataatcttacttaagtaaattatgagttaattagtgaaatattgagtaaatgaataaataaagtttaatttattaattaacgagattttatcggtgtggatattgtatatactatttttgaaataaaatatttttgagttcgacgaccgtggaaactcaacggagcggtcagaaatgtcacgacgataaaagttaagttgtaatggatatataccagactatagaatttttttagatgttgctttattcaggatagttagaaaatgacaaaaatacacttgaactttatttaaacttaattgtttaaaggaggggcagcattgccttttactaagttagattattaatttgttttatgtgacttttgttacgaaaattaagaacaatacgtaagtgtacgtaatcaagtagtaaactcacacaggtgaggtcgaaccacagggaattgaactgaataccacttaactagatttatgattctatttggcaaataaaaataattttaataaagtttgaaattaagataaacaagaaaattaaagaaagcagtaaagttgtttaattaaggatgagaaattagggaaaagaatcatgttgatttaattacccaattattaatgctaattactactctctttctcaatgtgaatgacagattatgaaaattaacctactcttttcagatcttttaagtcctaaatcacatgttatctaat

SEQ ID NO: 336730 - DNA, 743 bp, Cannabis indica
atagttgagaaaaatagcaaaaccaaacttgtgtgtggggcccattaagtggccggccagcatttgctcttttcgctctaattttataaattttttattcccaataattcaaccctaaccctattggaatttagtataaaaggaaggctatggtctcattatccaactaatgcctccaaagctaaaaacttagtttttctctctaggtttgatgagacctcttccttcttctttctcttgaattttcgaaaataccatagcataatcttcacaaaccgaaattcagccattagtgattgagtacatgcccacacataagaagttggtcctcaatcatagtatgtaagactgtgaagaatccaaacaataaggagaatcgggctcagaccttggtgatactctgctacagaaagcatacaagggttagagatctgagagggaggagtcatttaattctgttgcaaccactgtaaggtttctcatacctgttatgtgtttattttcatcgttttagaaattcatattaggatgttaaaaacagacttgttagtaaatttagatcttggtaaaatatattctaacaactagcctcaaagccatggtaattgatttactttcaagtaatgtggatttaaaacgatgtatgtctgatttggatgtgattcatgttcatctatgtgtttattggtgattgactgatgtttgcaaaaatttttataaaaaataattggattttcattctg

SEQ ID NO: 336731 - DNA, 1061 bp, Cannabis indica
tcgcacaccgacacttcctcgatttcctcaatgggttctacaattttttcagatctcacacggggatccaactcatcttcttccgccattcctgggataatagcttcgcgaaccattacaacagctaggtgggcagtgacgttgtaacactgcctggcctctccctggttccctcttatggttcctatccccgtcacctgagtttggaattttagacacaagtgcctaatcgatgtgactgcaccgaaatccaccagggccatccggccgaggattgcattgtaagctgttgggcagtccaccaccacaaatgtgcaatacttgaaagtgctttggggtgagtctgggcacaatgtgactgggagcctcacttttcccattgggataagtgttgttccattgaaccctgtgaccgcttggtgagagatcccggtccgtgaggcctattgctgtgaaggcttctttgaataataaattcacagaacttccgttgtcaactaagattctagccacaatcttgttggcaattggagactttatgaccagggagtcatgatgagggaagcgcactgtcttagtgtcctcttctgtgaatgtaatggggtgatccattagccggggcctttgagctgggagttgagtaacctcccaaacctcactgtgctttacggcccctgcataacgtttcagttcctttcgggtagttcctccgatgtggggttcttcggagatcatggctactcttccgttgggtctcgacggcaggccaggaatttgctgggcctctcctgggggagcgactagtgtcaatgctccggctgcaccccctggtgttccttggggcaaaggtcctggtgcttgaaccgaattgagatgaggcagccggttcttgatccattcgtaaaggtgtcccaatcggatcaagttttcgatctcgtccttgaggttttcgcattcattggtgctatgtccaatgtcgttgtgatactcgcaccttttgttgggatccctccgggagctatccctatacaaaggaggcaacctccggtagtgcgtatttt

SEQ ID NO: 336732 - DNA, 707 bp, Cannabis indica
gccccagagtcaaataacacagagaagtaacagttgttgaccgagagctaacctgttaccactgaagggctagcttcaacatcagcccgagttatcgaaaacaacccaattttacagtgtcgcatagtgggatgctgttgtttaagaccaaagtttgtgttccaagtagtgtgaaacttagaaatgaaattcttgaagaggctcatacaactccataatccttgcatcccggcaccaccaagatttatcaagatcttaaaccctacttctagtggagcggaatgaagaagaatgtggtagaattcgtatcgcgatgcctaccctgtcaacagatcaaggttgaacatcagagaccgacaagcttgttattgccattgaaatttccttagtggaagtgggaggatattaccatggactttatggttgggttacctaggaccacatgtttatttgattcaatttgggttgtggcagattgattcacgaagtctgcacattttctaccagttaagacaacctttacagtggatcagtatgaagatttgtacgtcaaggaggtaataagattacatggtgtgccaaagtctatagttttggatagagatccaaagtttacttctaaattctggcagagtttacagcgggctatgggtaccaaactgaaagtcagtcaaactttccatgctcagattgatggacagtctgaa

SEQ ID NO: 336733 - DNA, 1892 bp, Cannabis indica
agagttaacactggagcggtaattaaacgttgctttatctccagaaaacttttctcacaccgattagtctaaacaaacttcaagttcttttgggtcagctccgttaagggtacaacaatctttgagaaacatttaacgaaccgacaacaatacccagctaaacccaaaaagcttataacttcagtaggcaattttagtgttggccaattccgaacagcttcggtcttggctgaatcaaccatgatcctatctttatccactatgtgccctaagaaagagacgcgagataactagaattcacactttttggacttagcgtacaacttgtgatctcgtaaccgttgcagtactgatctaagatgcaactcatggtcctcttctgattcaaaagaaactaagatgtcatcaataaacacgatcacacatctatctaggtaatccttgaatactagattcataagatccatgaatggtgccggggcattggtgagtccaaaagacatcactagagattcataatgtccataccgagtacggaacacagtttttaggatatctttctctcaaatttttcactcaaagctttagctgagatagcctgagcgaagatcgatcttagagaagaccgtctttcccttcaggttatcaaaaagatcatcaattcgaggtaaatgatatttgttcttgatggtaagcttgttcaactctcgttaatcaatacacattcgtagtgacccgtctttcttcttcacaatagtattggagcatcccaaggagagtagctcggtctaatgaatcccagattcaataactcttgaagttgtatatttaattctttcaattctgctggagccattcgatacggtgcttttgatactggttctactcccggaactaactcaattacaaattcaatctctcggtttggtggcaatcctggtagatcttcaggaaagacatcaaggaactcacacaccaatgttgtattcacaggtccagatgtcacaggttggctggtatccactgtagtgactatgagttccagaaaacctctgctcatcagatccttagattttaaaagtgttattcttggtatgcccgtcccttaaacttcaccctcaaacactgccaggttagcactatcaagtttaaacaccaccatcttccgcttgcagtcggttgtttccccacacttagacagaaaatccattcccaggatcatgtcaaaattagacagttgtcacttaattagattggcaattaattcacaactgtcaatccaaaaggacaaggaccgaatccacctagtcgatactgtaaggtctcccaaaggtaacagggtaccaaaccccgaagcatacacatcacatggtttatgaaaaatttctattactctactcgacacataataatgagtagctcccaagtcaaataatacagtataggaacagccctttatagataactgacatgtcacaactgacggactagcatctgcgttagcctgagtcatagtaaaaggttgtcccaggatctgagtagtattctttgttggctcctctttcttggcctgaggacaatctcgaatgaagtggcccaccatgccacactagaaacaagtcttggcccgacattcaccctgatggtgtttcttgcatttcagacactcaggataagattagaatgaagatccgcggccctaacggccacctctatttccctaactttttgttaccccctgatgtttcgaaagcatcagccttccgtttatgatcagggttaccaccgtcggtccccttactgacattaccaatagcatgaggattcgatgccgtggtggcatcctttgcactctgctcttttattacatgttgctcaacctcctcagcaat

SEQ ID NO: 336734 - DNA, 598 bp, Cannabis indica
caaccacctgctccgacaagtcttacaaaaaccagaggcgtctgggagacttctcaaatgggccatggagctaagccaatttgatctgcactatatccctcgcacttccataaaagggcaggcgctagcaacttcatcacggagtgccacgaagcagaggctaacgcgaacatacccacatcgtgagccccgacatggaaagttttgtggatggcgcctccaacaaaaatgggttcggagcgggagttgcaatgatatccccaaacggacttcgacttcaggtagccctacggtttgaattcacagcttctaacaatgaggctgaatacgaagccctgatagcaggactaggattggaaaaaaccgcgggggccaaaagagtagaagtctacagcgattcgcaactggtagtaaaccaggtgtcgggagaatatcagaagcgcggagaaaagatggctgcatatgtggcaatagtccgggaactgctatacaagttcacagactataaagtagaaagaatccccaaggaaaagaacgctcacgcggactgtttggctaaagttagcttcagacattgaaattcagaaactgggggtag

SEQ ID NO: 336735 - DNA, 463 bp, Cannabis indica
gaaataccatatgttgaagcaattggaagtgtgatgtatgttatgatcagtactagacctaacatagcatatgctgttagtacactcagtagatacatgtctaaccctggtgaagaacattggaaaggagtcaaatggttactaagatatctgaaaacaactactcactatggcctgaagtttaagaaggcatggatcaaggtggaacttgaaggttttgttgatgctgattatgcatcaaatagagatacaagaaaatctctaacaagttactgcttttagctaaactcatgttacataagttggaaatctcaattgtaacctgttgtagctctctccactacagaagcagagttcatggcaacaaccgaggcatttaaggaagctttttcgattaaaggaatcttaggagaactacagatgataaagggaaatgtaacgccctaatgctaaggcacgctac

SEQ ID NO: 336736 - DNA, 882 bp, Cannabis indica
ggatattatccagttgacctccgttgataatctggtgaagtacagtctttatcgtgatggcttttctcctaagtctgtggcggggaagaagaggaagtctggtgctggccgacctgaacgaactcatccggagaatgaattgattcaactgaagcgtgaagctaagttgaagggaggtgtcagggccaagcagtatgctcaagatcctttatatcctaagcatgaggtcggggacgagcatgtgaccccattgaagaggaagaagaaactctcggtcacgcccaggcctgttgaacatgcaattcgcataagggaacccccatcacctgttcggccatctcccccctttgctcgaaaaagggaaggcttttatgtctgagataagatcaatgtcagatgatgatggacttctgagtttctgtgccggcggtttacattttactttgcttttgagcttcttggcattcatgccttgtgtttttgattgctgttttctaaccatactatttttgttctgtgcaaacatgtctcggtagatgattgatgctctgaggaagagaatgggcggaagctctagcgcctctcctccggcctagaagtctaagggcggtgaggggtcctcgaaaaagagaccttctagagaggtcattgacctttctgaggagttgactactgcaaacccttctacccccaagtccgccaagtccaaggagtctggaccaccaacagttgggtctgaactggtcaggagtctcctgagcgggtgcaggcaccaactccacctttgcccgtgcttcagaggccaaaaagggcaaggagatgctgacccactatatgaaccggctggttcccgaggtcagtgagcaactggctggtgctgat

SEQ ID NO: 336737 - DNA, 855 bp, Cannabis indica
cttacttataaccacttgaagctagctcaagtggccataggggagagtgtgtgtgttgaaagttttgggttcgaatcctaaattatgcattgtaatatataaacgtttatttcaaaaaaaaaagtattgtcttacttatttgtcggaccattcctatttctttttctttgagaagaaattctaaaacacctccctaaatagcacaagagctctaaggaaagagaaataaggggcaacatcaaattattaattaataaataaccttagacataataatgttttaaatacgtacaacgaaaaaatgtgagacttaatattaaattataacagtaacaatatatataacatattatattagtattgtgcaccaccgataccctttttaacatttttttatttgtctagctagaataatatatacaaaagaatagtattagtggtgctattaatgatatattataactctattctctactagttagtaaataggtcccgcttcgtgtgtagttatttaaaaaaatttaaattatatatatataaatattaattaaaaaataaaattatatcaaataattataaatatgcataatttttaataaatatttcttaaaaaataataaatctatatagagaactctaaagatttctaaaaaaatcaatcatataatatctatataaaaacgaaagacacgcaaagaaatatcttcaaaataattgtcatcattgtaactcgcttgtagtcactactacatttaaagttgatgtcatcaccgtatcttatttgtagtcattattatatcaatttcgatagattttctctgtacataaaataaatcaaacaatgatcggtaagta

SEQ ID NO: 336738 - DNA, 562 bp, Cannabis indica
ttttttcataactcagacggacatgtttcattcaatacactatactttaattcaggagccaaacttaaacgaatagtgcttatcgcttttgttgcaactcctcccaatcttcatcaatcatactctcaggcttctttccttgtagtgcctttaggagcccttgttgtatcaacacatctttcaccgtgctctgccataaactgaaattattcttcccatcaaaaagcttgatctcaaattttgtaaaagacaccatccttgatatttttagtgtagatctaaaccttggttctgataccacctgttatgaaaaatgataataaacttcaagtgcagggaaataacaaagaaatgaagcaaagcaatttactcattttggtaaaattatcaaacacacaaagagagagatatatttcacttatcacttcaaaattacatatgctctctatcttaatctctcaacccaaatctcaatacaccatttgcttcttttcacacaacaaactcacacacacctctcttttcacaactcactatttttctccacacacatacctctctc

SEQ ID NO: 336739 - DNA, 756 bp, Cannabis indica
gtaaatattttcccgagtttcattaagctcagtataaatagtatacactggcacgtatttgtcatgcttattttgttttcttctatctttcgacggttccctaattttgtcctttctttttagaccagaagcccccaagttatcaattctcgtggaagtggtccctcttgagacatttctgtgtttacttcccgagcctattttcaacaagttcatttcctttcaggcttcttccttctggacaaacacctgagctctttcgttgaactcggtgatgtttcttatcggacgtccttgtaaatcatcccacaaatcgcccccgacggttagtggatcagtggagatccccgcctgtaaagctctaagttatgtgctgtaatccaagtttttaaccctagaggtagccgtgctaaaatgacttaagtacgccttaagtgtttcattaggctgctactttatattggtgagtgaggtcgcttcgggtcgcctatccctagcggcttgaaattgcttcttgaaatccctggatagctgctcccaggaaaatatatgatgagtgaacttgttaaaccagctactcgctgctccaacaagagaggtggggaacaaaatacagcgtaaattgtttgtcacgttacttgttcgcattatcgtgttaaagttattcaaatgcgagaccggatctgtggttttgtcataggacaagacatgcgggtttttgaatcctgaaggtaaagaggtattcataatatctgg

SEQ ID NO: 336740 - DNA, 529 bp, Cannabis indica
aaaaacaaaaaacaatactaaacatgctcttagaaactcatccaactcgcaaatatctttcatctcgtaaatatctttcattattttacatgaatttcttcagcatagatttttattataattaacacaatgccctaatttttcattaagattgttgtcacacttttaaagttttaagattttaattactcaaataattgtttatccaaatgtatgtgtttcaaagtttaattttttgaatggattgttaattaggaaatgaataatttatgtatatattgtttttaaggtaaatatcattttaaattttgtgttttgtaaaaattactgattgaactttctattttataaaagggttatttgcggcaaaacctcctaaagtggacaggtttttgcaactaaccccctaatctaaaattttggtggtaaaactacctaaaccactagtccgttagcagttagccctttccatctatttttggctgttaagtgccaggttggaatgtccacgtgtacacagtgtacacgt

SEQ ID NO: 336741 - DNA, 665 bp, Cannabis indica
ataagtaagagtattttctatatttatatataataaaggtaagaatattaaaataaatttctttcatataaatttgtgcatggaaattattgataaaaccagccaattaattagagtatgaatttatgaaaatgatgaaacctgatagtgacatagctgagatcgatatatgaagcacaaacaagttttggtatatatatcctaaaccacaactcacaactttgttaattaaacgatactgtacaaatggttatattatataataataataataataataataatttgttatttttttatttaaaaaaaatcacccaataattttttataaactaaaaatgttatatagccatattttatatagaatagatatcatacctctaaattattgaaataatacacatgatctatatatggttaatataatttcaagtaagttatctttattacttgaaattatgtaatccaataatctatttcgttatttagaaaacaaaattcatcaactttttttttatatatatatatatatatatataattttacatatgtagttgtttaggattacgcataaaatttttaaaaaatactaaataatttaaagtactaaaaataagaattcaaacagttacttattatacgtactaggtgattgttacgtgtca

SEQ ID NO: 336742 - DNA, 778 bp, Cannabis indica
atagaaaagattacattgaaatagagttttatttagggcacaaagcccaacaactctgactaggcttcccttcagtttttggctaattaatactctgatcaatttgtacctcgagacgcgcctttcactcgcacgcttttgatggttactcttctccaatacttgattgtttttaatttcccaatatttactttttggggggtaatcgaagcgtttgagattttaattgattacaccctttcactaattttcttataaatagggtagaaaatcctcataaacaacttttacgaattttcttgctaagtaatttcagaacaaaagtagtttcttctctcgaatctgtcgttgaattctagcaaaaaaatctgataaacttcatctgaacaacatcaaagtttcaaatatgagtaagtttctcatctttctcttctttaatttcgtatcttcaattttttgggtttccattatagagaattcaattgttcttgacttgttttaggaaacatacaaaatatctaggcttgagactttataattttaactaaaatagatcataggacttcgttgtttgtaacattctgacttcaacttcacaatgttcggtcttaactttgcccattcgaggtttagtgaagattaacccctaatttaaaatttttgaactcctgggttacaaacttaacctttaccacattttttgtctttttaatctgtcaagtcgacctggtcagtatatttgcttgtttttgttcgatatcctggccaaatactcatc

SEQ ID NO: 336743 - DNA, 526 bp, Cannabis indica
tccaatttaccaaagattctggcagccacacaaaaacatccttgacctaagcactcacccggaggatgcctcttactaaagagacattcctgtaggaataacgggtctcaacactaccctgacgaccgccttgattctggttccctcggaacctcttgttctgccccgagccactggatgcagtggatgaattccttctctaggccatggccgaatcactacctcccctgctgaaacctgacgcaggaggggtaggagccccgccacatactagagtcctaactgattccttcatacatctaactgcgtcctcaacttgcactgccttctccaccatctcagcataggtggtcttgtcgtcggtagtaaccataaggtcatacttgatcttcacattaattccatcaagatattttctttcttactgaaatcggttggcataaatcccgaggccaacctcgccgaccgatcgaactgagtagtatactcggtcacgctcatattctctcgctgggtcaggtgggcg

SEQ ID NO: 336744 - DNA, 1050 bp, Cannabis indica
caatcaaatcaaaatacatccacaagtccaagaacatacaagtttccagacaaatatgggtctatattgttacgaagtaatgtcattcggtctaaaaaaatttgaagcaacataccaaagattggtaaataaaatgtttaaggaccagatcgggcgaaatatggaagtgtatgtggatgacatgctcgtcaaatccaggaaggttggggggcacatagatgacctggacgaatgcttgaatgtcctcagaaagtacaatatgaaactaaatcccttaaagtgttcctttggggtcagctcgggaaagtttctgggcttcatcgttaatgcccgaggaattgaagccaatctagagatgattcaaggcgtcctggatatgaagtcgccaactaaaaccaaggaagtgcaaagtttgactggtcgaatcgccgcactaagtagatttgtttcaaaatcaatagacaagtatgtctgtaacacccaaactatgataggcatgttagcgtgacttttaacgtactgtgcagctcgttgctaatcaacgaggttactgaaaatcgtgaataattaaaatattgattatttaattaaaacataacatataacacttataaaattctgggatcctgtttacaaaatacagttacaaaagtttactattcatttacaaaatatttgtcgcctagcgactaaatagcaaaagccttgatgttctgaggatcatacgctccaggcataaccgccccggcatgtacaatcttcacctgctcgctctcacgactcctctactttagccttgcaattacctacacgtagcaatagcactttgagtcgacagactcagtaagaaaagcataccataaaaacaaactaatatcccgggttataatcatccgcccatacacctaaccataaccctaactgaatcaggaacgttctcgataaaatatgactaactgcaaatctagcctatacttagaactctattcataccgatgaggtagtagataactcatactatctgatggcctagcatatatctgttggcat

SEQ ID NO: 336745 - DNA, 628 bp, Cannabis indica
ataaaaatgtaactattgaatagtcacgcttactaaaatatataaagtaagaataatttaaaaaatatttaaacctaataaaatataattaaagcacaaatataaatatcaataaaaggaaaagaaaaatataatcatagtaataaatattcaaaattcacccaataaatgctcatcaataacaataaatacaaaaaattcagctattccactaaggctcgaattttgatggtgaagaacactaagaatttcgaaaatagtagagagaaaagaagaagaagaagtctcaaaatactagttgtctgacagaattcacttagggttaggattgaattatttggaataacaaaataataaaataatagcaaaaataggacctaatgggcagccacatgtgggcccatcactagttagattattgttatttttctcaatcatttatttatttttcacaaatgtcacatattgcaatgtcaatcctataaatgccaaaattatttatttaataataaaattaattatcaaataaattatcattcatattatttattaattagtctccacaaagtctcttaattaataaataaaccttaaaattctaatttcttctacaatcaagccatatctt

SEQ ID NO: 336746 - DNA, 543 bp, Cannabis indica
agtgactcacagttggtagtaaatcacgcgtttggagagtatgaggcctagggggaaaatgataggctatttaagcaaaatacatgatcttcttgtacaattcaagagcaacgtcctcaagaaaattccatgagaagacaatacaactgttgatgccttagctcgacttgcaagcaacaatatagctgataaggctaatcaaatcccaatttaattccttgaagaacccagcatcacctgtacagaagaaagtgaaatgattgacgcatcttcaaactggatgacaccaatagcagcctacctcaatactaggaaacttccaaataacagaaatgaagctccaaaaatgaggagaaatgctacacggtatatcatcgtagaaggagtgattaatgctcaaatttatacaatttaaggttttaattttgtacataaagttaatttaagttaaatattttcataattttatttgtaaaattaattaagttgaaaatatttaatttcgtgttatttttaaaatttgagtaaattgtgtaattgaaa

SEQ ID NO: 336747 - DNA, 495 bp, Cannabis indica
ctgataaaataaattccaacagggacgtgactgagccgactggcgaggcgatgccactgctctgggatgggactccgccggcgaagagaaccagtcgctggtcttggagaagaagaagttgcgtggtaatggtgggtgacaactcaagtcgactggtgtgggtgagtcggacgagtcgaatcagtcgactagtgtgggcagtgggtgtgggacggtgagtcgtgtgggtgtgggacggtgggtgtggccgtggtgtgtgggtgagtgatatactgtgtgtgatagtgataatgaatactgaatactgatattaactattaagtgaagattgaagaagaatagtagattacgaataggcagtgagactctcattcattgatttattgaaatttgaacatgattaaaaatttaaaatagcatttacagaatacgaataggcagttaggcacggcagcaataaagtaattactttaattatttaaagtattatttttt

SEQ ID NO: 336748 - DNA, 594 bp, Cannabis indica
ttcatcacactcagaatcgaaatcatcttcatcttctacaacactcttcatcttcttagagcacctatcatcagaagaaggctttgacaatccactcctcttcgaaatgcaagcagtcttacttttcttctccttatcgatatcgacatccttcaaagaaatccatcattttttgttttttgaattactctcctctatcttttgttttggttttgtttttttttttctttacattagaagcctctggtgaagacgacggcgacattgaattccttgtaagcaccatctcctccgaataactatccacacacaatgtaaaccctagcagagaaaatgaaaccctaacaatgctaatgaaagagaaaaaaagagagaaagaaataaactgagaacaaagagaatatgaatcaaactgaaaaagttggaaatgatatgttgaaatgaaagacagagtaaaaaatcgtgtataacacgccaaatacccccacgtatacacgtgtccaaaaaaattgaaaagtacggctacttttcattaataaaattagtagcggtaattgtgggaataaaattaaaaaatagtctttgtgcgtaaat

SEQ ID NO: 336749 - DNA, 1075 bp, Cannabis indica
accaagaaggttgacgacggacaacagcttgcacttctccaagcaggcatccgtactgggactcctttctggaatgagctgcagcaagaaggagctgctagcctccaggacttccagaagagagtccaaaaatatatcaacctcgaagaagcccaaatcgtggcttatggaggctactatcccaccggaatagcagggtacatgcccggagtatcgccctcgggtactgccccgaccgcaactccacaagcaagtggcatacaattctctgctacccccggatatagccagggccaagccttggcaccagcatcatcccattttggcaacccgtccggagtgaatggacaagctccttcacactctgctccggctgctagcctgacaggcccttcccagggttcgaggagtaaaagatcctccaaaggcagcacccggacgggagagaagcgccagaaaaaggggtacaccccccagtatactcaatacacggagctgtcggactcccaagagcgtgtgtactttgctactaggcaaaatacacactaccggagaccacaaccgttgtacaaagatagctcccggagagatccgagcaagagatgcgagtaccacaacgacattggtcatagcaccaatgaatgtaagaatctcaaggacgagatcgaaaatctaatccgattaggccacctctacgagtggatcaagaataggttgccccacctcaatccgggtcaggcgaccgtgggtatgcctcagggaacaccggggggtacagcaggagtattggctccagctgctcccacgggcgacgcccagcatatccccggtctgccgccccggcctaatgggagggtagccatgatctccgaggtccccatatcggagggactactcgcaaggagcttaagcgatacgccggggccgcgaaacacaatgaggtgtgggaagttactcaactcccagctcaaaggccccggttgatggaccaacccatcacgttcacggaagaagacgccaagacggtgcgtttccctcatcatgacccgttggtcatagagacccccatcgcgaa

SEQ ID NO: 336750 - DNA, 606 bp, Cannabis indica
atgacaggtgtccggagggggccatttccagcggttaggggacccccattccctttttcttggtttagggtttggtatggggcctaactgctggaatcttaactctttttacagaatcgaaacatgtctacttctggctcaaaatcatctaagaagagcggtaagcgcctggctaccctcgaggaggtctccctgggtcctgttgcccaggaggggtacaagtctcgggcgaccggatgggaggcggccgagcttcactccactctaacttgtccccatcagttggagaacatcgtggaggtagctggaatcaagccttccacatcagggacctaccaccggccacctcgtgacgcggagacgcccaatcataactacggcggctttggggcctggagccagacgcatttgatggccggggccatgcttcctctccaagattattttgttaatttcttagtttttgtcggccttgcgccataccaacttattccccaagcataccgcctgctttcaggctaattaattttttactccgcccggggatggggctctccccgcccggcaaagatattgtatttttacgaacttgtttctgtccccaag

SEQ ID NO: 336751 - DNA, 886 bp, Cannabis indica
acctggagtgttcggtctcgggacatctgggaatactattttgtagtcgttgtgcgaccggttatgtattttagtatattgtgtatgaaagcttttaaacgggatcccgatacttataaataggtttctaaattatgaaatttattaattaatataaaagttttaatttgacacgttttttaagaaaattctttgattagcaaagatagcactgtaattgaaaaagcactgtagcgtgtctaaacattaaggcgttacaattttggtatcagagccgccaggtttgtctactgaagcttgccaagacatgtacaatcttcatcaaagaaagcttgattcacgattcagtaagcccctacttttttagtattttaaatgattattaaagtgtgataggaagcatattagattatcattattaattttttaagtgtgttgcctttaagtccataagagtggtattaagttatattatcgctgtctaacctgcctagcttatgggttcgtaggctaagtcctataaaatggacgcccagcgtaatacaagaagtcaagttaatatggtttagaccgaaggcggtcagggaaactaaattccccagaatccccgtggtcgcggtcgtggccgtggcatagctcagggtggtcgtcctataaatccaccacaagctcttctcgattgggagcagaggtttgcggaaatgcaagatcgaatcctccaacaagatgaagaaattcagagatgaaggcagcagggtctacctgccgtgccccctcaacaagctcaggtcgttgcatctccagcggcaccagtagaacaacctgctgctggcaactgtatggagtcgttatacaaaagttttcgtaagcaagcacctccagtgtt

SEQ ID NO: 336752 - DNA, 1151 bp, Cannabis indica
cgcaaccctttgtaatccaccttgttaagctgatctctgaaacacatgatatagtgaactcccttctgctattgatgtgtgcttacttcctcccaaagtaaggcttaaaccaatactctctcgaagatatatgctcactttctcccaaaatgagacttggaaaagtcttctcccgaagacccacgcttgttcaaagcttctcttcaacctattctataaatagtatgagatcataataagaaataaagataatttgatttgttctaataaaggcaaaaccgaaatgatccattagaaaaggggaaagtcaagtttctcaaaattagacaacattccataagagaattccttctcttgcaagaagtttcctaaactaaaaagagatcagttgagaaagaatctttccttagaagaaaagagtaattaaaacacaaaatcaatgtaataaaaacaatttaaacgctcaataaaaatgcacattaattaaaaaatattttgacaactaaattgccaaaaaaataccttacacaataactcaaatctaatccaatccaatttgcaaaaatgcagattggatcagttactttttaatattaaattattttattatgaaaaatattttttttaacataactacaacaaaataaaactaattatatttattttcttcaacagtacattaaaataaataaaatagtaaatcacaaattcaaaggaagaaaaaaatttcatgaacaaagacatgtttaatttaattttaaattgtatgtagaaaaaaattatataggtaaagtccttttttggtaagttagatgacaaaatatttttcttttatggtaagatattattgcattcatacctgattgtctcaccttgtatattcggttttagttgctcttttctatgttaggaaagatgcattttacagctgaagttttctttgtttggaaacttcttgtaagagaagcaattctcttatggaaagtggttttttaaggaaactttgattattgccttttccttattaagttcgattgtttcttgatacagtcagaatatataatctatttatggcaggaatcaagacttaatagaggatcagacccgattatagcaagtttcctttttctggtcagatttgctgcgtcagc

SEQ ID NO: 336753 - DNA, 902 bp, Cannabis indica
acattcctagcagatacaaaataggaaatacatgacatataccataggtatcttaggagttaggtggatataatattttatcccctcttgactgatgtgattcctcatagagtagccgtcactagactcatcgattctggtataatagtcgtaaaaggggggtacgctacctgtcatgtcgtttatggaggttttaatacgtcttcccccatgcggcattaaatgcgaagtgactgttcaggagatctctatacctcccagaattgccttagcatgcctttggcctcctggagagtaaagacacttcttatgccctcctctgggaggcaccttctctgagaaattcctttttttcctaagacttagttgattttcataaatgatggctgttacatatccacgtgtcgttcttatccgcgtccacgtattttgggaaaaatcaagggcaacagaaagtattgttagtattcttaataaacaaagtatgatcattaggagattgtttaaaaccattagctaaaaggtattgactaagtttagtataccattatctagaggcttgtttcaaaccatatagacttttgtttagcttgcaaacgacatttttggggacaatgcccagaggtgtatatcctttggggagttgcatgtagatagtttcatgcaaatcaccatgcaagaagtcgttattgatgtccaattgatataaggaccaatttttgattgttgaaatagcaaataatattttgagagtattaaattttgcaacatgggcaaaagtatcaaggtagtttatcccgtgtttttgggtatagcctttggcaaccaaccgggctttacacctaacaacctccccttttttcattatatttatagttatagacccacttacatcctatagc

SEQ ID NO: 336754 - DNA, 488 bp, Cannabis indica
taaattacataaatgaaaattttatttgataattaattataattattaaatgaatagttttggcatttatatgattgaattggaaaatatggtattattgaaagaagaataagtgtacgtccatgaagtgtatttttcccaatatttttttataaatccatataattccgtcgtaaccctagttaaaacactataaaagaaacatgatgctttcatttcatcctcttgtcaacttgactattaaaccaacctagatgagagagttccttccttagtgatttcaaagctccttcattgttcttccatattcgaacccatagtgaaagagtgccatgcccacacatagcaagtcaagtactcaatcatataagatggtggtaaccaaacccaaaggagagaaagagatctagggctagagatcttgagcgaaaggagacattatattctgctgcaatcaatgtaaggttttcttaacccttatgtgttta

SEQ ID NO: 336755 - DNA, 509 bp, Cannabis indica
atttttctttatttttaattgtaatcggtttgagttattgcgtgttacttgtttgtattcattatgttatataaccagttttattttagttataaccggtttgagttatttcgtgttatttatttttattcattataattctgttttggaaccggttatactttaattataacaggtttgatttattttatgttatttgtatttatttattatgttacataaccggttatatttcaattataaccactttgagttattaatttttattcatataaccggttatatttttagttatatatgagacatttactttggtgacttttccaacgacgttgacttttccgttgactttttcggcgacgttgacttttccgttgacttttcggcggcttttccgacgaattttccggcggccgtgattttccggtgacttctccggtgtcggtgacttttccggtgccgacgacttttccggcaaaacttattgttgttttacaaatatggaattt

SEQ ID NO: 336756 - DNA, 1282 bp, Cannabis indica
aaacttgtgaaaatttaaaaactttgaaaaattttcattcattataataatcaatagtacaaaggtaggctataccccttatacttagaaaatttatcaaagtaaattggcttagtataattataatgcgagtacaattgataataatactttaaactttcgccattccaagctcttttgatcgtggtttcatcgaggtctaatagtcgataggttgcactaccaattttttcagcgatgaggtatggtccttcccaattgtcaccaaaaactcattgtgctgagtttcttgtgtttggcatgacctttcatagaacaaaatcatctactcgcaaacttcgttctttgaccttggagttgaaataaagagttgttcgctgttgataggctgcattcttcaaatgagcctgattgcgcttttcctcgagaaaattgagttgtaacaattgattttctgtattaccgctaagtttaaaaacatatctatctccttagagatcctgctccaacctcgactggcaccatggcttcgcacccgtaagagagcaaaaagggggtttcaccaatcgtggatcgaggagttgtattatatgaccatagaacttaggaaagttcttctggccatgtacctttacgttcttcgagcttacccttaatggtatgcttaatgatcttattcactgcctccgtttgtccattgctttgcgaatatgcgactgctgaaaatacttttttaatccccaattcatcgcatagttggcacatttccttacagtcaaattgttttccattgttagaaattaacttataaggcatacgaaacctgcaaatgatggcgctgtatacactcgcacaatttggtagcagttatagtcgcaagaagcttggcttcaacccattttgtgaagtaatcgacagcgactacggcgtacgttactcctcctttaccttttggaaattctccaatcaaatctatgccccagaccgcaaagggctagggacttgtgataggatttaattggctaggtggtctattaacatatgtagctatttgttgacatttgtcacatcttttagcaaagctagatgcatctgttcgtaatgttggtcaatgatacccttgcctcatgatcttttaagcaagggaattacccccccgcgtggttatcgcagattccaccatgcacctctcggagaatataatcgcactcagtcccccgccggaaaaatcactgaaaaaatcattaagaaactggtttcttcttggtgatttttccgttga

SEQ ID NO: 336757 - DNA, 656 bp, Cannabis indica
aaaatttttatttaacttattttattaattacacttaacgaagtctctcaattaacaaataaaccctaaaatctcttttcgtcatgtcacttctatgtctagatagaagctatagattctgtatctatgattagcgctctagctcaattgtactatcatgttctcaggatttatttgttactgaactaattggttagctttaacgaacacttacaagaatataaataacaatcttgagattgaacctaaccatatgaggattaagatcttttgatctaagatcaacttggtgatattaacttagaaagatacaatgataagagtataatatctttaccaagttcaatatccgtctagtccaatatatactccatactatcaatactagcatactttaccaatactatggaaaggacataacacttatccaaggtgtaagtaaactttatcgctaattatcacatcggtgtaaattcagtatactgatgaatcatgggacataagctctgaaacatataatcacaattaccttccactgtgttaacatcgctgtaattgtgaataactatatgttctggttttaataaaaaatttatatcaaaccgtaagcatggaaaatacatgttaacttaaatgacttctaatcttttattgat

SEQ ID NO: 336758 - DNA, 819 bp, Cannabis indica
tttattacgaaagtaataattaatttaaaatactaacatattaaaaaaaatacaaaacatcaataataaaattactaatatcaaacaaaataaaaataacataacactaaataaggtcgtgttaaatattatagatgccatgttctaatttttaaaattaggctcttataaaaaaaaagtataatttataaaaaaaaaaatattttttaaatattatcatatggttatatattttacaaaataccaaaaactccaattatttataaaacttgttattgattccaatccaacaaaaaaattaatagaaaaaagaatatgaaaatgtttgaaaaaggtaataaataacaaaaattattttgtttaaaacagtaatagaattgaaaatagattttagaaattagaatgaaattgtccaataacaagttgttagccttgggttcattaaaaaaaattgaaaggcattaaagaaaaaaaatgtattggaccttttattttttgggggggcctgtgcagtagcccaaagggacggccttgacactaaattatgaaactaaaagaacaacataaataaaaacaaacattaaataaaataataatttaataaatattaagtatcattctatttaagttttcttttaagaaaatgtgtaatgtttaattaatataagaaatattttattttattaagctatttaaaaaattaaatttttaaataatataatatctattctatataaagtgtgcttatataactgaattcttggtttatgagaaattcatgggtgtgactttttatttatatttaataaaataataaaa

SEQ ID NO: 336759 - DNA, 1096 bp, Cannabis indica
acgactattccggtttgctgttggtgccagaaaagttgttggagtagctaccagtgtcgaaaaagtcgatggagttgctgccagcgtcaaaaaagtcgtcagaattagcattgtcgctagcaaaatcaccagaaaaatcaccaagaaagtggtttcttcatagagaaacgagttccttcaccaagaaaccagtttcttcaccaaggaactagtttcgtcacacaacaataataaagattacgaaaacaaaacaaaaatgatatgcgatgaaaataattgaaaccagtttcatcattcaaccaaatggagaaaaaaacaaaaacaaaatactcataaatataaacaaaacaacacacaatgcacaacaataatctaaaacaaaaaataagtgtgaaaactagtttcaaacctagaaacaaaataataaaaagaaacttaacataaaaaatatacaataacatcataaaatagagcaatctcattacagaacctttaaaacttgtaaaaccagtttcgaacttattcgacactattaaaaatcataatgaaatataaatgctaaacaataaagttaactgaaccaagccatcggaattgacatagtcgctggaattgctgctgacaccgagaaagtaaccagagttgctgccggcgccgaaaaagtcatcggaattagcattatcgccggaaaaatcacaaaaaaaaatcaccaagaaactagtttagaaaccattttcttggtgatttttcgataattttttcgacgacaataccaattccgatgaatttttcagagtttgctgtcgatatcgaaaaagtcactggagtagctgccggtgtcgaaaaagtcattggagttgctgccaatgccagaaaagtcgtcagaattggcattgtcctcagaaaaatcaccaagaaaccagcttcttggtaatttttctggcgactatgccaattccgatgacttttccgaagtttgatgttcgtgctggaaaagtcgtcggagtagctgacagtgtcagaatagtcgtcagaattggcattgtcactagaaaaatcactaagaaagtggtttcttcatcaagaaactggttga

SEQ ID NO: 336760 - DNA, 608 bp, Cannabis indica
tagtatgtaagactgtgaagaatccaaacaataagaaggagaatcgagctcagatcttggtgatactctgctatagaaaggatacaagggttagagatctgagcggaatgagtcatttaattctgtagcaaccactgtaaggtttctcataccttttatgtatttattttcatcgttttagaaattcatattaggatgttaataacatacttgttagtaaatctagatcctggtaaaatatattccaacaagccccctttttcttcttccctttgcatgagggtcgaatcccgaacaagcaaatggagttgtaccctcacaaatcatggccaaaacgttgcctagtgtaaccctttattcctgctcatcctcctccccatcaaggctagaagggagagcataacataggtcatggtcaccctagggaggaggatctgggataggcgcaagaattgaaactggaagcagagtatttgtaacgccttaagaattaggcatgctacgacaaccaataatacaacctaatctagctaaactgggattactagaaaataaaagcgggaaaatttaaactttgattacaatggaataaaaacataacttgtaat

SEQ ID NO: 336761 - DNA, 611 bp, Cannabis indica
gcctcgaccggtggctagatcacaaccagcgccaccaccaagagtctcatcgaaagtcgtgcccgctttgtcgtgcgtcgttcctgactcaagaatagtagcagagattgaccatgggcaccgcacctcagcccagctgggccgtcgaacgcctcctctacctctttgggaattatttactgttgctcttctttctcccctttgtcttctttattttgtaccaaaacctccatagccaccatggtctaaagctcttcttgcttagatatgaaattttttgagcaacataggtttctagcgagaggtctaaaaatgcctcgtcgtcgaagtctcaccctacaatggctccaatctgggtatcttcaaattccgaccagtcaatctctaattttgaattttgaatcaatggtggtggaaggcggagaatgagagaagatgctgaagaaagagcttgcaaaaaataaaaaacaaaggtggcagttaatcatatcaaaatgggcagtgaggttgttccttggcctctccatcaatggagtttccatagtcatggacaggtctatccacgaagaagaagaaaaataaggagagagaaagtaaataaaaaagaaaaa

SEQ ID NO: 336762 - DNA, 759 bp, Cannabis indica
tatgtttttgtttatggatactttaggcggttataatttccatttcatgacactcagatgatatcaacctttcactttcctatacattggtgttcatagatgtcacataaattcacacaggcgtgcttctttaagtttttcttcttctacaatattattagctgcttgattacttttttctgcaatgataatcatggatgcatgtcctattttttttttttttggattactttaggtttctttgtttttggatactttaggtactagttatggatgaactttccttgcgcagattttacagcagaatctgaccatgaaaaggctccgtggtcatgaaataaaggtacttagctaaataatttatatttatcactgttggatatttttatcatgcacttaaaacttttctactctgtattggtgtgcaatatattgtgcatgttgcaattttttgcagccttattttctcacccatgtgcttgctgccacttaccataatctgcgtagcttggaagatacaaaaatgtgtctgaatcttcatttaagaattgttagagtattagctgtatattaggtgtaaaagaattagggtaacttgtattttgtagtttcctattttgttggtagtttcctatttcctagtctcctagctttgtatataaatatgtactattctatgaaatacacaattaattcgattcactattttctacatggtatcagagcattgtgattcaaaattcgaaattcgaaattagg

SEQ ID NO: 336763 - DNA, 572 bp, Cannabis indica
aaaaaaaaaaaaaagaaagtacaaaacattttattaggctaaaccaaaaaaataaataaatcactattcatttaaatttctattgtttactaatagcttcatttgtgtgtacatatatttatattatattaaatcaatatgtgtttgtcttattgcatgaaatgatatgaattacttaaaaaatttctatactcaagcacatgtaatttgcgtgcaaagatatttcttgctaacttttaatttcccaaaacaaattacaaacaaaaaccttttaaattccaaccatttcaactattccaaaccaaactatttcatatcaaaccaaataaattttgcatctatggtttagttaatacaaaccgtttataattttctgatttaatcacatttaaaattctcactaataattacaaccaaaccaaattgcctttctttatttgtactgatattttttttttattattattatgaaataatgatatttgagaaatgatataaaggaaaattagatttttttttcccttacattaagagaaatttttcccttagacctaaaataccctatattggta

SEQ ID NO: 336764 - DNA, 962 bp, Cannabis indica
tgcatgcgagtatacatgttaatataatctaaaaaataattaaaaaaaatcattgctcatttataacttcaactaaaatatttatttttcaggtagaaacatcaaacctgcttgtatacaaaatacatgattgtaccgactcatacatagtaaacctagataacaaaacttgcaactgttagaaatttgaatatgatgaaatgccttgctcatatgcaatgtttgtataaagctcaacacacatcttcttcccagtaaactctgaaccagactcatatccattaaacttcttcctcataccatggacaaaaagctcaacacacatcttcttccgaacaacattcatattcaaagatttggggacatggttgatcatttcatgtataaagtattcagcatactttataatgaatacaccacagtcaaaataaaaaaaaaaaaaataacacacatttaatatcattgtaaactatatattaataaatatatatatatataaagtaaacaacatagttaccactgattttgttgtgacagtttatccacaaacacaacttccaaagaatctgtctcacttattccttaaaaatactttgtgttcttgtcaatatccgacctctgaccatagaagttcacatgagatagcaaaatgaacagaataatagcaaaagtttttcacaaaattagtgttcccactttggcaaaaatattattattagggaaaaaatcatcttaccctaaacacgattctcaggtttattaaaatattactcccacttctgtaaaaacataaagaacaacacaacaatataaaatattataaactatcttgtatacatattcaacaaatacattactatacctcaatctatctaagtatacatcgtaaatcgaattctacaatatacattatctaatacgatttacacaaaaaattaaatcggtataaacaatatacctta

SEQ ID NO: 336765 - DNA, 1277 bp, Cannabis indica
gttctaaacccagttgtcgcgacaagatttttggccgtcgcaactgggtttggcagtgagaaagtctgtttttcccgattttgttttggccataacttttgagtcgggactctgttttggatgttctttatattgttggaaagctcgttccgagatctatttgattatctatgttttgaatgtcatgtttatattatgtgaaagtgaaattagggattaaccctatttgtgaaatctcggattgtgtgactaggattaccggcacctgatcaggagcacccaggggtttggaatctctgttattgcgggacaacaggtaagacagtagtttgcacgtagagtatgcgcggtggcgcttatgttgaatatgatatatgtgagtaattgtaaccgggattagggttattaccctaatatgagcggttaatagtttagggttattaccctagtgaaatgtattgtgtaaatgctatgccatgctatgtataatgagattatggattatgcgttcaaggcataattaagctagactcggtaaactagtaccttgagtttaattttaatgcggtcttgggttattaccctagaatattatgaaagtaagaaagcgttaatatatggtaatgttattaatccaatgaaaatatgagttagggttattaccctaagttttatatgatgtgataaatattgaatacatgcgggtatgttaagcgttatgtgtataaaacataactgggttagacctggtatatatcaccaggataaaccaccgaaagaacgtaatgtaggaattatatatatgagtagggttatgcgagaaaggcataaccaggttaggctcggtaactagaaccgaggtaaaccctactaaggccttgttgtatatagacgtgtgagagcaacacgtaggtctacgccacgtagacataaataggcatgtgagcgtaacatgcaggtctatagcaaatagacaaatagtgcagtggcaccattaattatgtgttatacatattgagattaagggttatgcgttcaaggcataatcaagttgaactcggtaaccagaaccgagatgaactattctaaggccttattgtaaatagacgtgtgagagcaacacgtaggtctacgccacgtagacataaatagacgtgtgagcgcaacacgtaggtctacgacacgtaaacataaataggcatgtgagcgcaacatgcaggtctgtgtcacacatgcataaatgaatggcattactgtttatatagtatgataagcat

SEQ ID NO: 336766 - DNA, 706 bp, Cannabis indica
gagtcagggtcccgggtcggggaccgagttcaggtctgggtttgggccccgtgtctaggtccgggtctaggtctgggtctggctcccagtgccgggtctgggtcccgggtctcaaattcgagtcaaggtccgaactcgggtccgggtccaagtctgggtccgggtccgagtctaggtccgggatctgtgtccaggttcgagtcccgggtccgagttcgagtctgggtttgggtctgggtccgagtccgggttcgggtcagagattggtgtttactctaaatcttttataaatataataatacaagctaatacggaccatttattatgtattaaataatacaacatacattgtattaaaaattttggtcgtaataattaatacaatacattgttttatccaaatatagtgttatttattatttaatacaatacaatccttatacggcgtaccaaacgagtccaaaatagtgcgttgaatgcagtctcgttagaggatgaatcacaacatacatacatataggggtgggcatccgatccaatccaacctttttttcctcatccgtttcaatccaattagtaattggatttggaaaatcatcataattggatttgatcgatttttaattggatatccaattacacacataaatttcaatatttgcttaaaaatataaagaaaaatgcgtaaaaaactaagtatcacttt

SEQ ID NO: 336767 - DNA, 700 bp, Cannabis indica
gagcctgatttggacctagactgaaatccggacacaaaccaaaactcagaccaggactcaaactctgacccaaactcaaacccaaactcgaaatcagaatcgcaaatggaattagaatcgaactaggactaggaccaggacctggacctaaacccaaatcaaaacccagatcaaaacccaaacagagacctaaacctgaaatgagcctaggactcgaacccgaacctagaatgggactcaaacccacataataaccgggacctagaccaagaataaggatagggacctgagaaacggaattaggaccagaacctagtacccaaccaagacccgtactttaacctagaacccagctcgcgtcctggcaccagaaattgaaccagactgggacccgagattgggatccggatctggacctagggcttggacataacgtgtagtcattgtctagatttgggacacagccctggacccgaaccctgacaaggacctgaacccacacccggacctgaacccagccccaaacctaaaattggaccagaacccgtaccctgtgacccaaaattgaaaccaaaaccagaagttaaccgggaatggaactaggacttggacttggaatcataacttaaattggacctagatctagaaccatgaaaagacctagacccagactccaaatcagacctagacccgaattggg

SEQ ID NO: 336768 - DNA, 1039 bp, Cannabis indica
gggagccagcattaacttgatgcctctgtcattttttagaagattacagttgggggaagcaaagccaaccatgataactctacaattggcggatcgatcactagctcatcctaggggagtcattgaggatgtgttagtcaaggttgacaagttcaactttccagctaattttattgttctggacatggaagaagataacaacgtcccaatcattcttgggaaaccattcttggcaactggccaagctttgatcgatgttcagaagggtgaattgaatctgggagtacaaggagaagaagtggttttcaatgtgttaaaggcgatgacttacccaaaggcaagtgataactgtttctttgttgatctgattgataccattgtgaatgagaaaaagttgatagaagatcctctggaactgagtttaattgaaggtaatttgacagagcaagacggaaaggaggtaatggagtacgttaaatggcttgattcctatgggccattgaacagaaagtattacgaagagctgggagtagtaccaaaagagcttgtgccatctactgagaaacctccagagcttgagttgaaggtgctccctaatcatctacgatatgagttcttgggagaagataagaaccttccagttatagtgtcagcttcactttctgatgtggagactgatagattgcttagagtactttgggcacacaacaaggccattgcatggacactgggtgatgtaaagggaatcagtccctcaactgtgatgcattgaattttgatggaagaaaacgccaaaccaacaattgatgcacaacgtagactcagtccacgtatgaaagaagttgtcagaaaggacgtggtcaagtggttagatgcaggagtggcctaccccatctcaaatagtaaatgggttagtccggtgcaagtagtcccaaagaaaggggtgatgacagtaataaaaaattagaagaacaaattaattcccacaagaacagttactggttggaggatttgtattgattatagaaaactcaacaaa

SEQ ID NO: 336769 - DNA, 509 bp, Cannabis indica
tgttgctaaggtatgttagtttttttatggttgttttctagtttatttttagttgtgttcatctgattttttattgcaggacaaaaggggtgattcttccaatgatgatggtggaagtgataatgaagaagatattgattcagaggacattgaagaagtagatgataatgaagaagaagatgctgcaagtgtagatttgaatgaaggtaatggtgatgaagaagaggagggtagtgacggagaggagagggatgatgatgataatgaagatttcaagtccaaaggaaaagatgataagggcagtgatgatgaatgcgctgatagtgagaagaaggtagataattggacaatataactaggttttagttactctgtatgtttgttttattttgttgtaagtccatttagttaatggattagtatttttatgttgttgttatgtcgttttatattttgtagtcttttttttgtattaatttgccactaatatccatactcttaatttgtat

SEQ ID NO: 336770 - DNA, 464 bp, Cannabis indica
taaaataatttccaacactacaagcctccaatcagtttgaagccgccattgcctccctttctaaggatgtgaacaaccttcaagaggaaagggaggttctccggaccgtcttccacaggttggaagtagagaagaagactaaggaggaggagcttaaagttgaggtcgagaagtataagtcaaaggctaggcagcagagagccgaagtggagaggcttggcgggaaagtgaatgctctagagatagctggtctcgacattttctatgacttatcacatttcaatataaatgtgagggagggctgagttcagtatgtcgtacccactacaatggccccctaactctcaacagaaggcccaaaggagaggaattaaaccattaaataaataattgttattcattgaataagccaaattctaattgggcctaaatacaattacttaagtgaaattttatttgagcaa

SEQ ID NO: 336771 - DNA, 830 bp, Cannabis indica
tagtgtggaagattgtgaagaatccactcaacaagaaggagaatcgggctcaagaaggagagaaagagatctaggttcagatcttaatgatgctctgctacaaaaggaatcaaaggctagagatcttaacggaaggagtcattatattctgctacacccaatgtaaggttttcttaaactcttatgtgtttattttattgttttagaattcatattaagatgttaatgaaacatacctgttagtgaatctagatcttagtaaaatatttccaatagccctaacttcaaaccgtaagttattttcttcttcctcatgttcattacatagtgtggatcagttgtttgattcgcttgtatcgttatcattgcatctggttttggtacttttttagggttaaaacagttcgtactaggtttcaggtaatatgtaggttgttctaagatctccaactcattactctctagtttgataaaattctctccatggattaggactactttttgctggtagcaatgtcccactctggttcaagagtttatcatccagaagccttagagtttgagtttcctatagaattggccatcccatataaacacaatccctcaaaacccacctccaaattagagataaacaattctagggttagggaacacacagtgagaacccaaaaggaagatatttctagtcgccacaggcacttcttgcaagaaatatccgaaggcagacgccggttcttacgagaagcagcctggccagaacactcagcgtgtcctttattcctgtggcaaagcctttgtttttacccaacgtcacaattgcttttgaacca

SEQ ID NO: 336772 - DNA, 594 bp, Cannabis indica
aaccgtggcttgatgtagtttccaatcaatttcgttgtagcttgtcttttgtcggcaaatcttttgtttagatcacaagtgtgtatcaccttcctgtcatactttcgaatgatgaatgactttgttggcccgtttgtggatgcctttagtgcccactgaattggaagttgttcctaattgcatagaaaccaagcacactctggagtgtttctttgtctttgtatatttgtgcttcttctatttcaggatgttgcggatctgtgattagtagttcgtcataatctgtgatttctggttccctgtttttgttgttttccagttgctcaaccatctcctctgccacaagttttgcatagtccatgaagtcaaaattttctcccccatcttccggttctgtagcttcaattgtatgttgttgatttgttgagtcttctgttgttgctgcattgtattcgatcggttcgaaggcgcttgtatgtgtaattaatgaattgtcatttcccaagaatgatgcattgatggttgttgttgggttgttgatgacattcacacacaatgggtatgttgtgaagtcggggtccttcagtttgagtt

SEQ ID NO: 336773 - DNA, 805 bp, Cannabis indica
aaaagggaaagaagattaaagctgtcaattcggatagaggtggagagtattatgggcgttatgatgagactggaaggaaccccgggccttttgccaaatacttgctggaatgtggtattgatgcaagatatacaatgccagggacaccccaacaaaatggaattgctgaaagaaggaatcgcacacttcttgacatggtacgttgtatgttgattcattctagcttgccagaatttttatggggtgaggcattaaggactgctgcttatatcttgaatcaagtgcctagcaagtctgtcccaaagacaccatacgagttgtggtcaggcaagaaaccgagtttgcgtcattttcatgtttggggatgtaaagctgaagtaaggccctataacccacaatctaagaagcttgatccgaagactatcagtggctattttgtaggctacactattggttcgaggggttctagattctattgtccttctcacaccaccagggtgatagaatcagatagagctgtctattttgaagatgaatttggttcaagtcaagggtcaagagaaattgtgttcagggaagaacgtatttatgtccctgtacctgttgcttccgcttccgctcctactattgatcctgtgattgaacaaattccaacagaagctcatgatgaacctcagaatcatatgcaagatgaaaatcctgatattgagggtggtgaagttgtgttgagaagatcagagagagctcgcaaacctgctattcatgatgactaccttgtctatttgcaagaacatgattatgatgt

SEQ ID NO: 336774 - DNA, 1308 bp, Cannabis indica
agaaatcatatttttgtcataacttttgactcgagtgtccgttttggacgttctatatgccgttttaaagcttgcagcgagctctaaaatatggtatatgtttcagtaccaaaataatagtttttattttagtgtatttataccgcgggattttgtagaaaaccctagattgtcttatgtaaatattaagtagtgttttgggataaacacttatttgtttaccgttgttgtgacgtaggaccgagattatcggggatagttctccacttgggttggccgacatgtatgaacctgtattaaaggtaagaaaattagattgtactacatagtacattgtatgtaatacaattagtattacaatgaattgattaatattgagatatagttaatattgttatacaatggaaagattaatcggtcaagtatcgataatgtgatgatattatgcatgtgatatatgggctcatctgattaggtgatgcaatttttctggcaacgtactggcgtaagtacgggcgtcagggatatatgatgagtaccgagcgtaggtacggggtcacctgattaggtggtgtgatttttctaacgacgtactgggcgtaagtacaggcatcagtgatatatgatgagtaccgagcgtaggtacgggcttagctgtttaggtgatataattttcctggtgacgtactaggtgtaagtacgggcgttattgatatatgatgagtaccgagcgtaggtacagactcacctgattaggtgatgcgattttcctggtgacgtactgggaataagtacaagcgtcagtgacatatgataagtaccgggcataggtacaggctggtctgattagatatgatatattggtgccaaattgtggcacgggctcacctgattaggtgatgaaattattgatatatgggtgcaggtttttggcacaggctcacctgattaggtgatgcagttatgcgacatatgggtgtcaggctatggcacgggcttgcctgattagacaatgcaatgcatgattatcagattaaagcattgacttgcctaattaggtaatgtgatgttctgaagatggttactttatgaggtaacatatatatattatttatattattaaatgaatatgaattctattattgttataatagttttgtattaccaaatatttgtatattaatatttattcgtggtagatgctagtagtgatttagatttcaccttatgaacaatatgtgatggtttgattcttattgtgtataagtgaaaatattcgaataataaactatatgattgttattatta

SEQ ID NO: 336775 - DNA, 661 bp, Cannabis indica
agtgcccacacacaacaagtgatacctcaatcataatgaggaagatcgtgaagaaagacattcaacaagaaggagtttcagcactaaaggaaggagagaaagaggtccaggttcagatcttgataatactctgcgacagaaaggatacaagggttagagatctgaacggaagaagacatttaattccgttgcacccaatgtaaggtttctaatactttatatgtgtttctttcataatcgttttagaagttcatatttagggtgttaatcaacatagttgtgagtagatctaagatcctggtaaaataatttccaacagctcaatcgcacgcaccaggcttcgaacaagaagcccatacgcgcgcgcatgacagggacaaatcatgtctgaatgccgcgtgaaccccccttcagatacgcccgcccacgtttcacgcacacaaaggctgcattgaagcctcctacgtgtgcggacgaggttgccagcaacctcctacgcacgtggataagactgcacgcagccttgtgcccagcaagtgtgttggtcacccgaaaatccaatttttttacccaatttcagatttttcaattttggattttttcaatgataaaatattatttttatcatttaaacctaaatatcaatattttaaattaataa

SEQ ID NO: 336776 - DNA, 672 bp, Cannabis indica
tatttcaagttggctcctggaaagtttagttcagggtaaactttctctttggaattccatgcgcaattctcctcctcgcgccagctcccattgcatttcggagatttggtcgaagtaaagcaacgaccaggcgaaccactccgggcatacatcagcaaattcatgaaagcgaccaaagttttgcgggtaaccgaggatggaaagttatccgcgatactgggaggcattgaagttctcggtgaactttgtaaagatataaggaagaacgggccggtagagtgatttccttaaccgagctgaaggcttcatcaagcttgaggaagccattcaacgagcagaaggtgaataaaagccgggcaagttgaaggctccttccactggaacatccgcccatcttcccaactatttcaataattcaagctcaagtggcaagcgttcaagcaacaaccaaaagcaaggaaacgggaagaaaggaaagttcactgacacatctggacagactccccgagagaatcatacactgcattcactattctgactgaagatatatagagtttatatatggaaactcagtcgttaatctcgtacaagaagaccgggcccatgaagaaagatacgaacaaaagggacatgacgaagttttgttggttccacggagactacggccacgac

SEQ ID NO: 336777 - DNA, 564 bp, Cannabis indica
cctaaaccttagcctttaaatactacatgatcccttcaagcaaagggttagaaattggttactcaaataatatagcaaagagctagagttcttaagcttgtcaatggtggatttacctcgggcggcagaggctcattactgggatcaactgggttgccagtgtcgacctaaccagttgtgttggtcaattttgttgtgtctactgggttggcagggttggccacatccgttagattcgtggagattctagtggtggctggaacacgaacatcaagatcaacagtcatatggtattgaggaagacctaatgaggcagaagctgtagtcgaagttctccttgtgttaaccatggtgatagatcagatcaattaagaacactctcaatgaaagcaccaagtttttaacctcagatttggctaaccaatagcagagtcatatttatgactaataccaccatgtgtacacaataagaacaagaaaatcaaagagacacaatatttttataaaagttcgacccccttagctagcgggtaaggactgttggaagttattttaccaggaact

SEQ ID NO: 336778 - DNA, 1095 bp, Cannabis indica
tcatgtttaattatgaaaattatttattgctatttaaataattattatactgttattattgacttctgaaatgcattttatgtcatttagtaattttcataagtttgcatttccggtgcccggtaacatggaactcggtgtttggctcagtaaaatcacaacttagtatattagtagattgggacggtttattagaaattgggaatgtcgggaatggctgggaatttagaatttcccaaaatacccctttagtgttatttatgttattttagtgtggaggggcaaaatgatcatttttccccaatgatattttgtcctttagtggaattagtaaatgagtttaatatgttatttgattattattttggctgaagtaaaaagggttatgtggcatttctcttcatttttccaaacttagaaaaattagaaaattttcaaaggaaagctctctctctttccctctctttccctatagaaaagatggtgtttccatgcttagtttaggttgttgttgctgctgtgattttgttgttgtttacagagatttaagcatgtttatttgagttgaattgagctgctagtaatgcatgattagtggtttttgctttgattcaatattggaagtttttagttcaaaagcttaagttttcaaagagaaaattggaaatttgttgctgtgattattgcatgagcttgtatttgttttctgcagctttagtaagcatgtttaagtagttttggtatgatttgaatgcatgataggttgcttagtcaagttttgagttttagaactcaatctttgacctttaatggtgaaatgagtttctgtggttgaagctcggttttgttgctttagaaatgttctatgggatgtttagaacaggtctggaaggttttgtgtgatttggatttgatttgaaagagttatgaatttttgagttctgcctgcgaggaaccggaattccggttgtgcatccggaattccggatggggttcaggaatttccagaaccggaattccggttgtgcaaccggtctgccggttggggaattttctggaaccctagatttcctcgtttttatgttatttggggta

SEQ ID NO: 336779 - DNA, 941 bp, Cannabis indica
ttggtcagctttaatgaacaagtcaaggaacactaataatacacttaaaccaaaacctaactatctcagaattaagatcattaatctaagatcaattaagtgatatttacttagaaaagatattacagtaagtttatgatatcttttctactgtgaatatcagtccaatccaatgtataaccatacatccaatacaagcttactttactaatgccttggaaaagatataccactacataagtgtaagtaaaccaaattattgattatcatatcagtgtaaatcatgtgtactgataaatcatgggactaatagtttaatcacataatcttaattattttccagtgtgtatacaacacaataatcatgaataacaatgtgataaggacttaatagaatttatatatcaaacaaatgatcatgaaataaactctcacttgcactaacataaaacaatcagtacattttaactaatcatggatgctctctgtgcttttcaaatacaatctctgtcaatgtcttggtgaatgggacgactaggttatcttcagtatcaacattttctaccagtacgtctccttttgctaaatattctctgatgatgtgatatttcctctcaatgtgtttactcttgttatggcttctaggctctttactgttggcaatagcaccagtgttgtcacaaagtaacaccgatagtttttccatagatagaataacaccaagctttgtgaagaactttcttagtcagactagtttcttagcaacctcagcatcagctatgtattcaacctccatggtagagtcagatactacggattccttgacacttctctgaacaattgctccacccccaagagtgaataccatcctagatgtagacttcctgtcatcaagacaagcatagaaatctgagttggtatagcctaagggattcaaagca

SEQ ID NO: 336780 - DNA, 667 bp, Cannabis indica
ccgtcttgatggtccgagaaattgttgagccaaaaatggcggaagaggaggggatccgaaaaaattgtggaaccaatggaggacgtcgaggaagtgtcggtgtgcgacctcgactccaccaaagtcctccggctaggaaagagcctagaaccggaggaaaaagaaaaaataataaagacactgaggggcgccacagacgttttcgtgtggtgtcaagaagacatgaccggcataagtccccacgtcataacgcacgtccttaatgtcaatctggacatgccaccggtccagcagaagtgacgtcccttcgactcagtgaaggctgaagccttagaaaaagaggtggacaaactattaacgaatggcatgattcgagatgtgtactacccagaatggctagccaatccagtacaagtgccgaagcccaacggaacatggcgggtttgtatagactttaccgatctaaacaaagcctgcccaaaagattgtttccctttgtcaaggatcgaccagatggtggatgccacctccgggttcaagctactgtccttcatggacgcgtacgccggttataaccagattaagatgcacgtagcagatcaagagtgcactagcttcaggaccgataagggggtatactgctacctagtcatgcctttcggactga

SEQ ID NO: 336781 - DNA, 644 bp, Cannabis indica
ctcataaagctcatttttctggcgggtgtaatctgcatcacccgcctgttcaaatgtttcaacagaagagacaccatcagattcagactcaccagcacgagctcgcttgagcatggaacgcaaagaaccaccaatttgagcttgaaaaggctgaaaacatggcctttttacaccagaagcacaagccacccttaacctacagatcaggctgtaaagcctcctccacagcagcctgagaaacaccctccgcatgtcccaaacccaaacttggcattgctgcagccaaagaatgagcagcatggaccatatcaggggtaacagaggcaggggtgtcactaacaatagtggagtcagtgacaacaggttgactcacaaagagattcgggttcattggggtgggaatcataacgctagaagatctcccatgagaactcaagttagaaagagaggccatttgagaattaagtagagaggtgaaaccaacagaatgggcaaggaaagggttgtttggttggccctcatgaggatagtcagtgatatcaagatcagctatagtaatagctggagcatgagggtactcaaaaggcaaaggtttctcagataacttctctttaccacaaagtaacctatcatagagacagtgt

SEQ ID NO: 336782 - DNA, 740 bp, Cannabis indica
agtgtagaaacctgaaatcaaagaaaacaagcgtaattctattccaaaaataataataaagaagaaaaacaactataaaatgtgacccaaaacttaggctaaaaatagcctaacaaccattttctcatgatcagtggtattgccttgtggtttccccaccttttcttaccacccattgctacttttgactactatttttccgacaatcctcagtcttgtactctattcctttgcaatttctacaaattaatggattccattcgtaagtatctctaatagagactctttgatccatctcacccacaaaaatgatttaagtcagggagctcttgattcaagcactactattaaaaatagacttttggtgtcagttcgagggacatttttttttttcaaaaaaacaaacattaaaggccaccccacctctttggtctcagtttataactaacacgtgtaatgacttttagtgtcggttagtaaaccgacactaaaagtataactgagaccaagaaaactttaaaaaattatatacatacatattgaatttaagtgtcagtttataaccgagacgaaaagatcttttggtctcggttataaactgacacttataagacactaatttaaaataaaaaaaaggccaactaaaaaagcccacttcaaaaccctaccctaatgatataacagcaaaattaaaaattctacccacatctcaaaactactcagcttctctctctctctct

SEQ ID NO: 336783 - DNA, 1000 bp, Cannabis indica
gaaaggacggttctaaggaaccgtcaaaggataaaaagaaacagaagaagcacgataagtacgtgccattggcatggtgctagaactttgtagggatgtttttgctggtattgacccagatttggatgctcaatgtcatttcttattatattttttttaactcgcacatgagaaaaaggttgccttcggcaagcctgagcccatgaggaatgcgaggagcaaaagagatcttaacaagtattttaaattccataaggatattgggcatacgatcgatgaatgtcgccaattgaaagatgggatagaaagtctcatcactcgaggccactttaaatagtatgtgaaaggacagggccacaaatacaacaagcctagtctgcccaataacctaaacaaccaggggttacaacctcttcctgttgaaggggaggacatcctggttatttcacgagggcacatatctcagggaaaagcaataacgctcagaaaagatatgtgaaagagatcaagaacgagctgtcggcatttgccccagaaccttccaagaaggtgaaaaccgaggaacctcccattatattcacgaaggaagacgagaaaaatgtgagatatcctcacgtcgatccattggtgattgccattcacctcgccaataaaaggatcaagagagtgttaatagacaacgagagctcattgcatatcctttataaggaaactctatggaagatggggctcaaaaagccaaattgaggccttgtatggtgaatctttgcagattcactagagacaacattgccagtcttggcataattgagctcgcattaaccttgggcgaggcacccctattcgccactgttatgcaagatttcctagttgtcggcctgccatcggctcacaacatattgttaggtcgtccaacattgatcggaataggggcagtcagttcaatcaagcacctatccttgaagttccaaacaccagaaggtgtgggagtggtgcgagg

SEQ ID NO: 336784 - DNA, 1002 bp, Cannabis indica
aagcatggcaataccctaaaccacataaaaacgagaaaaactagggttcctaaaaatcccctaatcgacagaccggttctgcaaccggaattccggttctggtaattcctgaacctcatccggaattccggttgcacatctagaattacggatcctcacaggattcaatcaaaaattcataactccctcaaatcaaacccaattcataccaaaccttccagacctgttctaaataccccaaagaacatttctaaagcaataacacagcccaaaaaacacagaatcaaaaatcaccattaaagctccaagctttgagttcaaaactcaaacttggttaaacatcaataacatgcattcaaaccagctcaaatcttcctaaatatgcatataataatctcagaaaacaacagcaagcaacaacaacaagtgcagcaacagattcttcattttttctttgaaaacatagttttgagtaaaaattccatatattgataaaaccaactaatcaccaacacaatcatgcttgaatcaacatttttaaatcataattgaactccagaaatccaaagcaatcacaaacaaaaaccacagccacaaattcttaagcatgaaacttaaaagaaagctaaaggaaacataccaacaacttgtgatcactaaatttgattaaaatcagcttgaaatcgaggaaaaatggccagcttcttgctgctcaaagagggccgaaagagagagagagagttagagaggaaaatggttttgcttttcttttctaattttttcaattttgtacaacgtgacaaaaataatttcttttccttatttcagccaaaactaagaagtcaaagtcaacaataaatcaattaattgatccacataaagacaaaacactaaaaggcaaaaaagaccaaaatgcccttgcccacacaaaactaatttaaaggattctaagggtattttgggaaattctaaattcccaaccaatcctgacattcccaatgt

SEQ ID NO: 336785 - DNA, 814 bp, Cannabis indica
aaacccaacaatggtttctatcactcaaatataaattctactccaagcattctcttcaacatggtcaaaaatagggtaggagaccttgtcctcaatttcaaagacctttgaagcatcaaaacaacatctcaaaagcttcaaaaagagcacccattgcccaggttgacgtatggcctagtgcgctgggttcttcttatctaattctgattcagtgtcgagcgttcgtctagtttttcatagtaaacaagagatatgaactaatacaagtcaaattcacaacttcatattttcacttttttggcaaagtgacttagtcgcaaattgggtagtttctagtctcccaattctgtgaaataacaacatctccgagaactgtgaacgacttaaccagactaaagaaactagctaagtaatgtcaaaatatcacttaggcatcgaaaaaatacatcataaacacattttcccttgaactagcgtccaggtggacatgatatgtcaacctaggcaatggtatccaagtagccttcagtaaaagggcaataactcactcaataataattcgattgttgcgattcaacttgaatttcaaagatattttaatgatctgtaaagtcatgtatcatactctaatcataattttgaagatatcaactccaaatttcatcctcaagagagttacgcattttaactataacttaccccaaatgggtcctatagatgcgattcacgctccaaaaattgacgaccgacctctggagttaatttcaccattagatcatcatcaatggttgaaaatatcttaaatgtatttttt

SEQ ID NO: 336786 - DNA, 596 bp, Cannabis indica
cttgtcattcctactttctaagtgctaataatttctgaatatgattttgtgtttgaaccttacttgatttctatttattgttatttgtagtatccaacatgataatgaccaaccccatggtgtcactattgactgataataaactgaatggatctaactttatcaaatggagagataacattcacattggtctcattggtgaaaatgcgctatttgtgttgactgaagtggctcctgagcagcctagtgagaatgcaaccaaagcagtaaaggaaaagtttgagcgttggcagaatgccaacaacaaagcttgatacttcatgctgtctagcatggttgacgcgttgaagacaaggtttgctaacactttcacagctgcagaaatcatgaaccagttaactgagctattcgggatggcatcaattcaaactcgctttaaggcgactaagaatttcatcaatgcacgtatgagaccttatcagagcgtgcgtgatcaccttctccagatgactagttacttccaggaagctgagaatcatggagctgttatagatcagacaactcaagtgagtttgatcttaaacagtctgactcca

SEQ ID NO: 336787 - DNA, 843 bp, Cannabis indica
gttaaggtatttggctttaagaatacggcaacagaaatactggttacctgtcagaaggttcccaccccacttggcaatgaaagcttggttcatttctttagagtttacggaactccacgtaccccctaaagagtttggggaggcatattttgtcccaggctttcagatgaagtctgtggttacccttctccgaaccccaccagaaatcacgcaccagaccatcaatcttgtcggcaagtctattggaaagttttgtagtttgcatagcatatagaggaagggataaacccacagacttgattagagttgctctcccagctttagatagggtcttagccttccaaccatgcagcttcgcagttaggctatccagaataaagttaaagtctgcatccttttatcttgatctaaaaagaggaagccccagatacttaacattaccctcaggcgagcgaagacccaacatctcccttatcctttgtttagtaccgatgggagtattcttactaaagaaaatggaggatttcaatttattaactttttgacccgaccaagcacagaacttctcacgacaatcccagaaccccttggcctcctccgcattggctttacctacaaggatgaggtcatcgacaaagaaaatatgggagataatagggccccccctatcagcctgatcccacttatggttccgaacttttgggcagaatccaggattcgagcaaaatttccgcagcccatataaaaagctagggagacaatgggtcaccttgacgcatgccgcacgaggggagaatcttaccacggatcccccattaaggcaaatattgagggaggtagtag

SEQ ID NO: 336788 - DNA, 605 bp, Cannabis indica
tgaggatcctgcgggatttgtctaccgaaaggcgggcgttctaggaggaggctcaacaaagggaggccgttgcagaggcaaagtttcgagaggaggccaagcaaagggaggctgaggcggaggcgaggcacaaagaggcgctgaaggcggagggcgaggctacagccagggccaaacatgagcttcgggaagccagggaggctatggacgagatggctgccaagttgaagtccttagaggagttgcatcaggcggacttgcagtcgacggccaacctgaccgtggaggtgaaggagctaagggatttcagagatcaggccttgaaaaaggccaaaagagatgagctcctgacccccgtcgtctgcaagcattgcgtcaagcgcttcgatgatggcgtctatatggcctggcagtcgaatggccagagtatcaaacttgacttctatcccaagcctgaggaggctcttgctaagttccgggagaagaagaaaaggcttgatgctttgcttgaagagcgtcggggccctcgtcttcctcctcatattgaataggccgcggagtccaaccaatttcaccattacaactattttttttcttttttattt

SEQ ID NO: 336789 - DNA, 611 bp, Cannabis indica
cagtgattagccctccttgtgtctattcgtatttagtttttgttaaattatcattttacctttctaattctttctttatcctttagtaccgtcaattcctagtgaaagtataatttaaatccaatccaaatttgtacacaacttttcagttctaaaattaacacttaaagggaaccaagattcgatccattaggaaagttaggatatcataattgtagatcttgttctcagccatccacattattagattcccaaaatagaagttgtaagaattatattttctgagaaactttaatgagtgaatcaaagaaactaataatatgaataagagttcatgattactcagaatttaggccgatctactagtgatcatcattatgttatcaattagatctttacagttaacggtatatttgataaagacaactttatttatattggtccttgtcatatataatctatattatataacacattttcttagatgtcatgatacatcagtaatctgaatatagattacttacaccgaataacaggtattagtgaaccgcactagcaactattgattaaagattcctaaactttaagatgttgttgattgatttattcat

SEQ ID NO: 336790 - DNA, 589 bp, Cannabis indica
gcaacatatcaacgattggtgaaagagatgttcgcaaataagatcagacaaaatatggaggtttacgtcgatgatatgttggtaaagtcagtgaaaagtgagaatcataccacagacctcgcagaatgcttcaaaatattaaagaagtataatatgaagctaaacccgaaaaagtattccttcagagtttcctcaggaaattttttgggattcatagtcaatgcaaggggtatcgaagtaaaccttgaaaaaaatcaaggcattgatagacatgccatcaccaacaaagcctaaggaagtacaagccttaacaggaaggatggctccacttaacagattcatttcaaagtcagctgataagtgtttgccattctttaatgtattgcgaggtaacaagaaatttgagtgaacagaagagtgtgaataggcctttcagaacattaaaaggcatttagcggcgcctccaattttggcgaaaccaataagtggagaaatgttactcctctacctggctatctcgaaagatgcgattattgcgactatagtgcgagaagggtaagtaccaacaacctatttactatgtaagtaa

SEQ ID NO: 336791 - DNA, 559 bp, Cannabis indica
aatcatccactgtatctggtggcacggggcataacaagaggttctgagggaaccagaattgaggcggtcgtcagggtagtgtcgagacccgttattcctacccggagtgttccttttgtaggaggcatcatccgggtgagtactaaggtcagggatgttcttttttgtgtggcagccagaatctttagtaaattggatagaccgtatgatagttatgaatcagggttttgaaccctattaactggcgtagagttagttacctccaaaaggtggattaggtctatgccgatcagaatagatggtagagagttaagtgctgacttgatagcgatgagcctagtagagttcgatattattttaggaatggaattcctatcgaaatactcagccagtattgattgcaagaggaagatggtgattttccaaccggaaagtgatgaaccatttgtgtttgttggttcagttcggggatctcggatcccggtgatttcggccatgtcagctaaagagttattgcatggcggttgtttagggtttctggccgtggtgatggacacca

SEQ ID NO: 336792 - DNA, 704 bp, Cannabis indica
tggttcgattcacacggctcggttagactttgcggatgcattatgaggagaagcagcagcttgttgttcagctatttcgatggctcttgagcaaggcttcaagtttgttttggtggagagtgactcgagaatagttatcaatgctctcaatgggacggagtcttattgggcgattgagagctatgtctccttttgttctaggtcttctctctcttttattagttgtaattttgtgtatgctagtaaaacttgtaattttgctgctcataatgtagttaattgggcttttattcacaagttgtatggaactatcccgaatcggttctggtggacctattatgtaatgactgagaggtctagtttatttatttaatggtacgaatacgcttattttcaaaaaaaaaaaattataaaaaatgcaaatgattcaaataatgaatagatctaattgggtaactaagtggcacgtgaaaagttaatagcttttgggaaaatataactgaaagtcaacatctcttatatgaatacactatatccagtactagtcacaaaatattctcttttttcttttttgttttcttcaaacttagacaaaatattctattcagaactcaaaaatttaataaataaataaaaaaaattccattcacccataataaaaattaagagttttttcatttatacttttaaaattaatttttttt

SEQ ID NO: 336793 - DNA, 1425 bp, Cannabis indica
agagattcttggcttcaaagttgccgaagtgctcttatacagactgcttgtttgattgacgttgctcgcacacagacatctgatcttcgagtaagtctttggtttcctttatgcttatctttgcatgttttatcccaaattttgcactctgacgtggcatcacgagaatggtgacacgtggagtccacttggaacatctgctcggcaagataggctgagcatgatgcctcgctgacatgttcagagtaagatattcagggatctgtgcagagcaatcaacacttagtgaattcagctttcacatcatgagtcatcagctcaatccctataactcagggatcaatttacgtgatacgacatacacacgatcccactattagtgtattcagcctcaatcccacgatccttgcattctacattgatcccactatctttctatttatacgcattgtaacgagagaggaaactcttcctcctcaagtttcctagccctataaatagtgatgcatactcactgggcaggggatcggtcgaaaagcacctaagctaagacaatactattatctaacaattatatattcagagatattgttgtaagagctataagaaaaggaatcttcttccttgatcttaagccaatacaaataacgaggattaggctattaccgaactgctcggggctgatatcctttatcgcttataaaatagactcattgtcattggctaaaagtgaagtcaacattttggtgctttcattgagagaaggatcacaaatcgctctttatttgacattcaaccgccaacacgatggtgcaaagtcgtagaggtcagtctgacccagcaaattcatagacgctggatcctgcatcataggacacagggagttcaagggttccgcctgctattaatcccggacagacgggaagcgtggtgaatggtgaaacagttcctattactggagttgcgcctggtctgcaagacactggaaataacagtttcgcacccagccagggcattcataatacgactgttctgcctggaaccaacgcccagacgaccatcggagacgcaatcgaattacaatgggaaattgaattgttaataaagaaaaacaatccgcacttgcagaagtatgtcaagaccaacaaaggtaaaacaaccaagatttgctacctccaccagtagatggacacttacaagtcattattggaggcccgcacattgttggagattcaggcaaagctcgggagatgtaggcccggacagcacaacacgagcaagaacaagtcatcctagccttggaagaaaggaagcccaaagttccacgagtaggagagccaaccataactttcaacgatgaagatggtgtcaaaatttgatttctacacaacgacccactggtcgtggaagtccagatagccaata

SEQ ID NO: 336794 - DNA, 628 bp, Cannabis indica
ttagctttagccttgcccttacctacacatagcaataacactgtgagttgacacacgcagtaagaaaagcataacaaatgacatatcaataactcaggttataacctggcgcacatacacccgaacataaccctaatccccgtgtcccacacggtactgagtcaagaatgttcatacgacggttttatggaccataatatcagcctatactcggtatgttagtcatgctctaaccataccgatgtgatactgtcaaatagtatggtacaattgaccataatatcagcctatacttggtacgctagtcatactctagtctcaccgatgtgatactgtcgaacaggacaaaagccaacatacatatctaatgtaatctaacatgcttactaacatgcatgctaaacatgtaatacatatgcatagtgttatactaatcttacctcgattctgaattccagtgtgccggtcaacctgagtggaacaactgctcggcgaattacaggctcctaaatcacatcaatcgtaacataagtaagtgacacgctaaatcactttcttgggacttaaacttgaaactaaaagtttctttgtcgataaataacatggcaataccctaaatatctcaaaa

SEQ ID NO: 336795 - DNA, 1165 bp, Cannabis indica
agaaattcaaaccgtaaatttgaaaaaaaaaaaatttaacagtatatgaggtaattccccaaaaacaaacttataactaataattacttaaaaaaaaaatataaaaaaatatattcaattaattaataatttaataatttataaataattaaataattaaaaataaaaataataatataaatactttttaataataaaaatttaaaaataataattacttaaaaaataaatataaatgattaataattaattaattaataacataataacttataaatgataaataattatttttagaaataagtaatagtgcatggtttttttataaataccataaaatagcataagatattttgacttaagatatcataaaattttgtcacactttttctttatacaataaaatcttaaatgcttctataaaactttagatggcaatcgacaagtcttggaccacaatgtgaaatcgtagatgtccacaattttgaaatggtcaaaatgtatttttagagatggcctcaaaatgtaaggattgtgatagtaaataggtgcccgtgtataagctgtggaatatctaaagaaagagttcgaaatgaaagatttaggaaaaacaaaattttatcttggtctacaaattgagcatttaaaatgtggaattttcattcatcagtcaacttatactgaaaagattttgagacggttttatatggataaatcacacccattgagtagcccaatggtagttaggtcacttgatgtagaaaaagatccttttcgacctagagaagaacatgaagagctccttggtccagaagtaccatatcttagtgcaataggagcattgatgtatcttgctaattgtacaagacctgatatagctttctctgtcaatttattagcaagatttagttctgctccaacatatagacattggaaagggattaagcacatactccgctatctccagggtactattgataaaggattattctattctaataattgtgggtcacaacttattggctacgcagatgcaggatatttatctgatccacataaagccagatctcaaactggctatttgttcacttgcggtgacactgctatatcctggcgatcaacaaagcaaactctggtggctacttcctcaaatcatgctgagata

SEQ ID NO: 336796 - DNA, 1068 bp, Cannabis indica
tgtttaaacaacatacttgtgagtagatctaagatcctggtaaaataaattccaacagatagacctaggcctgttgtaatgaacgcattagtaattttgaatagaataggcaattagcactaatttttgatatttctataattatttatgaatttgattagttgtgggtcccattgttagaaatgggcatcagagagaatcaagccaaggtaagccctaacatcactatttcttagttcttgaattttaaggtttggttgagtatatgattttgaaaattgggggctgttacggtttggtttttatgtagttcgaattttagggtttatttgagttagatttagctcctggcagctggttttggtgtatgggattggatttctgcaagtttgagcttagaaacctaaactggggtctttaatgcatatttgaattcagtggcttttttgggatgttttggttggattatgttatgtatacattttttaggtaatctgtaaagattggtggcatttggatgagttttgagcaagaaatgaattgttggggaaaacctggtgcaaactggctaaccactttgccagggcctgtaaaactgcttagccggttttggtagattccccaagcaactcgttttctcaattctcgatcatttcagtgccttagttgggtgtttccctatttcttgagttagtgtaatccctggtaattatagcaaagcctagagttataggtttgggtttcccggattagggtttcgaacatgtgatttacccagttttgttatgtgattagggcatccatcaagcaggagaccttctcttcaggtcagctagcacacttgaatctagaaagaaggttaacgaaaggcgaaagctaaacttgagtgaacctgggctaagatgaggttgtacatgtcgtggcgacgcgaccttgagtgtttggtctcgggacatctggggttattattctgtagttgttgtgtgacatggttttgtattttgtaaattttggataaaagtttaaaaatgggatcccggtgtttgtaaatgggtatgtaaattataa

SEQ ID NO: 336797 - DNA, 506 bp, Cannabis indica
cctttttttagacaattttaattattatctttatggggagacaatttttaggcccgtccccaggcccttaatgtttttttaggacctgttattgggtcaggacatctttacatttacgctaaaatacatattttgcttaaatacatattttgcttaactttgctaaacttttctcttgttttacatttggccctgtggtatgccttactacccccatgagtggcacgaaaaaattgtttttggggcactcaactttatacatgaatttggaggttgcatatactttttggtacaaattttcttaacaaagcctaagtttacatttcctaactattggtaatactttcagaggtgatcagcgttccaggccctaggcaccatggttccatccattctctttagcttgtaggtcccggagccgatctcatccgcaatttcatatggtccttcccactttggcccaagtacccccactccgagttcttgagtggctgggaagactcttc

SEQ ID NO: 336798 - DNA, 941 bp, Cannabis indica
ttctttaattgttgacgagatagcttaggagaagttatgttggcagccaagaagttgacataattaacataccaaggtaccatcaggttttccctcaaactaaagagttgttcatcaggaaattcttcatttatttgcacctctttgcattctgggtttcttctaattctagtcttgacacatgatctgataccagatttttagtccccttcttatcctttatctttatgtcaaattcctggagaagaagcacccatcgaatcagcctcggttttgcatccctcttggtcataagatacttaattgctgaatggtccgtgtaaactattaccttatttccaattagataggggcgaaacttatcaaatgcaaacacaattgccagtatctcttctccgtcgtggcataatttagttgagcatcattcagggttctactagcatagtagattgtatgaaacaccctatcaacccgttgacccaagaccgctccgattgcgtagtcacttgcatcacatatcaactcgaagggcaactcctgatttggtgaagtgactattggtgctgaaatcaatttctccttaagaacttggaatgccttcaaacattcttccccaagctcaaaaggaaccccattaacacgtagattggacagcgatttagaaatctttgagaagtccttaataaatctttggtagaaacaagcatgatccaagaaactccttactcctttcacagaaactggagggggaaaattctctattgttgacacctttgctttatccacctcaatacctgcttttgagatcttctgtcccaaaattatcccttctgttaccataaagtgacacttctcccagtttaggaccaagtttgagttttcgcatctgattaacaccttctccaaattctctaggcaatgatcgaatgaagagccaaaga

SEQ ID NO: 336799 - DNA, 850 bp, Cannabis indica
tgaaccatgcaacatagaatgcagtttctgatctttattaattagtaaatctgattatattaaaataaattttatttagggcacaaaacccaacaagatcatcccagcctccgtgctagtccatcttcgtctagtgacgatctttcaatttctagtttcaaagattagaaagtaagtagcgagcatacaccttccccggaacctgaggtgcaacactatttctatcccgaccaaattcatggcgaaggatacgaccatttcatctgggaacttaaaaaaggttggagatgctatctatttgctagctggacgtatagggtccatccgagcgtagttgacactttacccaagggctgcccaatttcagctactagagtaaattctatttccaaatttattgttactattgtaaggcacacttctaataaaacttcgtccaaacgtaaaatgatggcacaaaccaagtagactgtaaaaaaaaccttcatctgtcgaccctcatatcgcccatctagctactctagtccgagcaaaacaggccccctgcggtcgaggacgaggagactattggagatgttgaagtccaagaggtggaagaccaaggtgaggttcgtcccacaactccttctaaggccaaaggcgatgaggaagagggggtagctcgggtgctgccttttggtggcttcaatgaaaaaggagaacctgtttcttagacaggggatgtcttggaggctggctgggactacatcgaggaggagtacaccgaggctcatcccataaacaagagaggtccaagggaagttcgatgcatctctccaccatccgtcctgaccatgaagagattgactaa

SEQ ID NO: 336800 - DNA, 1323 bp, Cannabis indica
agtttgaacttgtgattttgtgaaatgagggctgttagggttaggtttgtttagggttagaattttaaggttcatttgagttggttttaggtcgtagcagttgataatgatggttggattaggttttgtgcaagtttgagctttgagttcaaagctttgatctctaatggcataatttgtttcattgagtttttctgtgaattactggctggaatatgttgtatatgcattgtttaggtactctggaaagtttgttggcatttggtggaaaattgagcaagaggtgaaaggtttagggagaactggtgcaaactggctagccgattttgccagacctctaaaatcggctagtcggctttggcaagatcccccaaacacttcatttcctcaatttttgtccatttcagtaccgtggttgggtgtttctctaatttcagagtttgagtaacctctagggagtataacagaacctagggctatgggttggggttttcctggagtagggttttgatcatgtaacttactcgatttaataaggagattagggcatccatctagcacgagactttccgttcaggccgacaagcacacttgaatctggaaagaaggtaagaactgcatataatgcgtgatatcaatatctgagtgtatgtatatgttatgtgtagatgcatgcttaaagtgttagttgcactaccaacacttgtacagttaaggtacagagtgcattggtatagtgaatgttatttgagagtatattacagtgataccagcacaagtattgaaaagtactgagtgtttgtggtatatcacccagatgtactcagggtatgaacaaaccctacaaacactcgtagagtgacggacgtagtgtatgtggtatagtggcaataccctagtatggaacattcttactcatctgttgagcctgtaaataggtgtatgggcgcctaaatacaagtcgggaattacatgatatgttatatgcttttcttactgagtctgttgactcacagttctgcttccatgtgtaggtaaaggaaatgccaaagctaaataggagtgaacctgagctaggatgaggttgtacatgtcgaagcagtgtgacctggagtgtccggtctcgagacatttgggaatttcattttgtagtccctgtgcgacctgaataatatatattttggtatattatattttaaaagtttgaaaaaggaataccggtacttgtaaataatttggtataatataaagtctaatatttaatataaaaattttaatttgacacgtttttcaaaaaaaatctttgattagcaaagactgcac

SEQ ID NO: 336801 - DNA, 732 bp, Cannabis indica
atagcacacatattattttaataaaacaaatcattcgcatgatcatacatttagatacaatctaaataaaaaaacacaaaattaaattttaaataaaattaatatttacgtgtctcggcacgtaacttttaactagtatatttaaataagcatatatagaggtagttaaataagtatattttaatgatatgtccattattccaaaaaaaaaaaatgatatgtatagaaagtatatctaaacagaagcttttgtgcatttatttttcatatacacacatgcatatatgatgggcaaaataaaaataagtttgagaataacctgattatagatttcacaggattgttttcctatggcagacccacaataataaatttttgttttaaagttttataatcactcactctaccataatcaaaattaacacaaactaacaaaggtatatgatattataacgacgttaaaaggctcgcaacactggacgatgattgccacagtaatttgagtagtagataaaataataataataactagtatattatgaatcgaatttgaaactttggttttacacaaacataattatttatcaaagagtataatgtgtgaattaaagtgaaaaagaaaagatcctactgtaggtgaaattccgtattttaatattcccagtttgattatttaattaaatgattaattaaatgcggaataataaaactggtactgaaaacagttttctg

SEQ ID NO: 336802 - DNA, 391 bp, Cannabis indica
tttgttagagggtattttttaagcattaaaaatgaaatttctctttttatattatttattaattaaaatgtgtgtgaaaaaaaaaattatcaagaaagaatgtcattgtactgtatcctttacatcttctctttatttttttattataattttgtcttaaagtaaaaaaaaattatttaatatatattatataataatattattattttaattaatttttagatgtaaatattttagaacaaagagttatacaaaaaaaaaatgtgaaagtcttattttttccttctgtgtgcagaaggattctcggctttgataagagactgaatgggtgggggaagattcgggggtgcaaggttgctcgaggggctcctgtgttatctcacatgttctt

SEQ ID NO: 336803 - DNA, 951 bp, Cannabis indica
tccatcgatcagatagggatctcaagttcactttaaagttttgggaaagtcaccaacaagccatggtacaaagctaaagttcagtagagctttccatccatagacagatggtcagtccgagaggacaatttagatattaaaggatacgatgcgggcttatgtgatggattttgaaggctcctggagtaagtatttggcattgatagaattttcatacaacaatagctatcagagtactatagggatggctcccaatgaaatgttgtatggcaagaaatgtagatctccaattcactgggatgaaattagagagaaaaaaacttgggtctagaatcagttcagcaaaccaatgaggcaatagagaagatcaaggccagaatgcttgcctctcagagcaggaagaaaagttatgcaaatccaaaatgcagaaatatagagtttcaggtaggagatcatatcttcctacaagtatctctaatgaaatggattaaatgctttgggaaaaagggcaagttatgccctagatttataggaccttttgagattcttaagaaagttggattggtagcttatcgtctagccttgcctccaaccttgttagcagtgcataatatatttgacatctctatgctaagaaaatacgtttcagacccaacacatgtcctgagttatgaaactctagagctggaaccaaatttgtcatatgaagagcagccagtgcaaacccttgacagaaaggataaagcccttcaaaataagacaagatctttggtcaaggtaccctggagaaatagcaaggtggaggaagctccctgggagttggagttcgatatgagggctcagtatctagagttattcaagttagattttggggatgagattcttttaaccgaggaataattgtaatgactgcttagttttattttgagaattagcagataattatggttt

SEQ ID NO: 336804 - DNA, 587 bp, Cannabis indica
aaagccatgtctgggtactaaagaaagagccagagtgttttaaaaaaaaaggctttatagtaaaaaaaaaaacaaacaacattcttagatattcacatattagtttatgctgaattgagagagtggtccagctgatctactctcttcttggaccacatgagatcactgctcacacacgtatggagattcaagtcttagtgatcccatgagtatcattgtggatggatgtgatgaaatgatatgttgctcaaggtgtgcatttttttaaatactcagaagctctattaatgttcattggtcagttgatccctgtttgttcttctaaaatttttagtgtctctaagtgtatattttttatctgatttgtcaagtgtgggttgtgtgcaaatattgctggcatatttgaaatatttcaggtctctatattactctcatttcctgatgactttggtttgtttcgttttgtgttccgtattatgtggtggaaactattcaatttgggcgtgtacattttctttggcaaagttcaattttttttaaaaaaaaaaatcatcattatttttctttgcctggtcagttgtgtcagg

SEQ ID NO: 336805 - DNA, 663 bp, Cannabis indica
caattttattttatctttaagaatgttgcagcagatatggtctgcattattgccatgaattgctgggcaacaaggtagtttggaaaaaaaaaaaaaaaaaaaaaactcatctatcagcacaagtagctttgagtcatggataaaatctgttgaaaataccatcaagattaatgtggatgccgaaacaggtagagagtgcatcagtacatctcttttatgggagtgcattgtagaagcaccctatacttttatatcggtatatattaaaggacaaaacttaatacacatctctaaaggggtgttttggtagacagcctttcaacattcatgagaattttttagtcagtttttttttttcataattatgtacgttgtagttatataagacctcatgtaaatttaatatattttatgtttataaaatcgtaattatgtaaatatgttaattttattttaactcaaaataagttttttttttttttgttaaattaaaatcatcatctctattaattgcaatccatagtgattacatgattaaaacctggagtaacatcactactcctgataacacgatcagcaactaaatatgatgctcgagctaagaagtgagcaacactatttgcagaacgtctaataaattgacataaacatctctcaaattat

SEQ ID NO: 336806 - DNA, 898 bp, Cannabis indica
gggtctctattttctgcatcctgtcttatttagactggaagatctggctaacatctccgctgacgaagttcttcatcctgcctacgaatgatccctccatcatcttggcctctgtcacggccttggccttggcctcgacctcaacctggacctcgacccaatctgactgaccttctaggaggcttttctaaactcctgaaccacacagaccaaaacacatcaagaagggtcattttgatcatcaattttacatgaaaataatattacactcccgcgtgcagaaattaaaggcaacttaattataagtaataaccacttacagtacagtgagtccaactcgtctcatggcggtgaactttacatgttagggctaaccacattctttaggaccgtgttgctctgataccatattgtaacaccccgatttcccgagatgtcacataagatagtcggtataaaacaatttaataagataaagacaataaaatacttctttattgaaaaatttctaagcatgagatctcactgtttaaaacaaaataatattagtaccataaacttaaaaaagatctagttaaatcaaaataacggttccacaaaatatataacttttaaaaacattaaaaacaaaatactgtgccagccccctaacatgcagtccacgcctcgagctcttcaatctcactgcttagccttacccttacctgcacacagagtacccgtgagctaacgcccagtaagaagagctatgtaggacataaccctcctaactagatacttgacataagttactcttaatattaatcaacaataattcatattccataaatatattcacgatgcatgttgttctcacattcataaatcaagtctcataccgcacattatactcacatac

SEQ ID NO: 336807 - DNA, 819 bp, Cannabis indica
ggtggacccatctcgcatcactttccatgaatgtgatatcgtcacccttttgaacagcttcttcggccgttcgctcaagttgttcacattggtgagcggcttatctttggcttctctcgcatatcgctcctgcaacttcatggaatctcctgcgatatggggtccgccaataatagtcaggatattgcgaggagtcctcgaaccactcgcattttggtctacttctttgtcatccgctcagggatgactttcttcatttttcttgtatttgttgaattttcctcgcctgattagttcttcgatctcgtcctgcaaaaaccaatattctagagtagtgtgaccaatatctttgtgatactcacaaaattttttagggtctcttttatcacggtttcccctgattgggggaggctttttgaagaccccgttcttttcttcaatggcgtagatatggtcccgatggactgccaattctgtataatttacaaagcgaggactacctttcctcttcggggaggattccttctttggaggggacttggctaatttcgaactttgctgtctctgtggacttcgtcttctcggactccttcctctggaattcttccctctaggacttggagatcgtgaccgcagcactggtgacttacgtttgtctttgcccttctctaacttagctagagaattttcaatcctcttatgcggctccgccatagcgaagaactcaaccaacgattcaggtcttagagcttgcagttccttccagaaatcggttcttggtaggacacctgttatcaacatacatactagcgaagactc

SEQ ID NO: 336808 - DNA, 709 bp, Cannabis indica
ggttaatcatacacacacacatatatatatatatgcctctcaagtaattttaaagagtaaaactttgtaattacttgaaaaatgattcaactttattaataattgaagttcaaaatattacatcaaaaatagagattacagcatcaatttatttgtagtagggtcgcaaatgctccacgttctagtggttctttattagcgagcggttcagccgagctaatttgtaaacccttgttcctactattgcctcgatcacataaggacccacccagtttgggttaaatactcctgcagatgcatccctcgtgtttgtaaacactcgcctcagcaccaaatcaccgacattgaaaagtctcttcttcactttcttgttgaagtatcttgtcactcggtgttggtaggctgcattactaatctgcgacttggtacgtttttcctcaagtagatccaagaacaattttaaaagtacatggttttcttcttgattatagaagccttgtttgtgggttgcaatattaacctctactggcaacatcgcttccgagccaaatgtcagcgagaatggagtatgccttgttgctattttctcaattgtcctgtgagcctaaagtacttgaggtagttcatcgacccatctaccctttgcagcatccaacttctttttgatagtatccttcaaggttttattaacagcttctacctgtccatt

SEQ ID NO: 336809 - DNA, 425 bp, Cannabis indica
agtttcatcgctctgacttgactcaaatatgaaactttatacaccttaaagttcataagatagaacaaaaagataattttgttgaggtccttatactcattacgcttagcattgaataaatagaatattcaccttatcagtatcacaaatcaatgatagattctattttggcatccgtttaggcgcccaaatcgaactaaaccatttgtcaggctattgttctcttcttttgttccccaaaagcatagagtaagacatccattgatcaataagatcaaatcttttgattgcctcctctgaaacacattggcgcgcgtgtgaacgaggtgctctaccaactgagctacagcccttatgcttgtgattcatatttttgttggaaatattttatcaagatctagatttactaccaagtatgttttatt

SEQ ID NO: 336810 - DNA, 702 bp, Cannabis indica
tcctaatgttccttgtttgattatattttagatggctcccactaaacaataagagtctgcttaagtccgtacactagtgtacacttaacctcttattattggttcttgagcacctcttgttgtgacatattatcttagtctgaaactataggttccttttagattaagtcatcaacatagcattctagtattaacattaatgtaaaatgcttgcttaagattaagtaatcattagagataccataaaacttttcataaggattaggtattttgcctaagtcatagacattgcaaaatttcctatcttatcctcataattctgataagttatttctatccaaatgtacgtatcaccctgacccgaaagtaggcttaactaacaaatcaaagagcatgtataatactcttgagatcgaaccaaaccatgtcaggattaagatcatttgatctaggatcaactaagtgatattgaattgaatacatattacggtaaattaaacatatctaatcaaagttcaatatcggttccatccaatgtatactccatacatccgatactggtaaactttgccaatgccctggaaaaggacataacacttatcaaaggtgtaagaatacctatcgctgattatcatgccagtctaaatctagtgaactgacatatcagggaattaaaactttcgaacatataaacatgattat

SEQ ID NO: 336811 - DNA, 733 bp, Cannabis indica
gtcgagaagtctacttagaaagatgcttgtcaatcctttccttttgcttctcagacggatccttgtatactggctcccgatgaaggctggcgttctctggaattaacttgtgttccctcagttttaaggtcgcgcacagcaatcgctagtcgcgatcttaaacagggagaaaaccgagaacctcagcgacttctttgctaggcgagtccaatacgggtcgagccggtctatctgcgaacaataattaagagcgtgttagatcataccacaaggtaacatgaaaattaactaagtgttaaaatgtgcgacgtactaggtcgacgattaaaatcagtcctaattcctggaactttaaacacataaaaccacttagatttctaatctcccatattggaaacaatgccttccaccccgttgatttcaaaagtggcccacttgctgaagcaatagaaatcgttgtgagggcccacgttctttatatcgtaaaattagctaaaatcctccatcgaaggctccctatgcgcatactccatgtacatcgcgtaaaaccctaaagttatgcgatagctgttcggggtcagttgaaaaggggacacatcgtattgcttgagaatagcggagatgaattgtaaagcccgcttagtttaatttggaaattagcagttaattataattatttatgaaattatttatagctatttaaataatttattatgctgttatttatggaatt

SEQ ID NO: 336812 - DNA, 623 bp, Cannabis indica
tcactatctgaagctaacttagccagacagtctgcgtgagcattcttttccaaggggattctttctactttgtagtccgtgaactcgtggagcagctcccggactattgttacatatgcggccattcgctcgccacgtgtttggtactctcccgatatctaatttacgaccagttgggagtcgctatagacttcaactcttttggcccctacgacttttgctaacctcagccctgctatcaaggcctcatattctgccttattgttcgaagctgggaagtcaaaccatagggctgcctggagtcgcagtccggtcggggatatcgttgccactcctgctccggatccattttcattggaggctccgtccacaaacactctccatgtggggaccgatggtgttggtgcatttgtagttgtcgcggcttcattgcattcagtaataaagtctgccaaggcttggccttttatggagattcggggaacatagtgtaaatcgaactgacttaactccattgcccatttgaggagccttccgaacgcttcaggtttttggaggacttgccagagcgggtggttggttagtaccttgatcggatgtgctttgaaatatggccttaattt

SEQ ID NO: 336813 - DNA, 632 bp, Cannabis indica
tcttgttgccaagggttatgctcaaacatatggaatagactattgtgatactttttctcctattgctaaactcacatctgctcgactattcatttccatggcatctacttattattggcatttgcatcagcttgatactaaaaatgcttttcttcatcgagaatttaaggaagaagtgtacatggagcaacctcctaggtttgttgctcagggggagttagggcgagtttgtcgtcttcgcaaatctttatatagattgaaacaatgttctcgtgcttagtttgataactttaatcaggctgttgagaaatttggtttgttgaaaagtaagtcaaattattatgtgttctataaaagatcaactgttgatatcattttgttaatggtgtatgttgatgacatcgttattactgaaaataatactgaaagcatcacatcccttaagtctttcattcatacttagtttcacacgaagaacttaagggtgctcaagtatttcttgggtattgaagttactcgaagtaaacaaggtatttttctatctcaaaggaagtatgtatttaatttgttaactgagatagaaaaattggcagcaaaaccttgtaatgctccaatgaatccagttgtgcatc

SEQ ID NO: 336814 - DNA, 561 bp, Cannabis indica
gatttcttttcaggtggttgatatgtggtatcccgtgaggacttttgttttggctgaaccctttcactggtctgggaagggatagaaaccttagatggaggatgaggaggtcttacgggtttggattgaggctatagactagacgatgaacgagtgactcattttgacaaagacgaaggaggtgacgatagagaaggactaacctttttagacaggggaggagccttcactcgaaacgtacgaggtttctgactgactggaggtgaaggcagagacagagtcgactcaggactcgagttgcgaacaaccaacctccgacttgtagaggacaatgtcacgatagggattagacattgcagacacgactgtaggttcgactgtagggtcaacagtagttgccactgatggaacttaaactatagccacagggggtacaacaatgggagtggtattctccatttgagagagaaaggtgtgaatgttgcaggacttaggctttctgagagtaaagtgaaagagtgagactaaacactttccttaggccttaagtataggctccct

SEQ ID NO: 336815 - DNA, 686 bp, Cannabis indica
aagccttcaaacaaagaagcaacgaggcgtacattgttgacctcaaaaagataggggcaaaaagctccagctcgctatcaaggtcattggaaacgagttcctgtcaagacatcccagaacgctatgatctaagacgtgtttaaacacacgatcatttttgacccagtaaaagcagataaatcacagttgtttaatattcaaataataaccgcatttatactacgtgatatgtaatcaaaccccacgattttaggggataaacgttgtaaagattacaagcaactctgtaattaactgcctactatgtgattataaatagaagcatgttagatccaaaaagtttggtgctttcattgagagcctttgtgaaaaagctccgagaaaaccctcctattttaaagaaaaactatctccttcatggctaaaaacttaaaaaaaaacactaatacaccacatgaagaaactcatcaccgttctgggaaagagcccatgtgctccagaaggtcttccaacccacaatccaaacagatcacccgctctaagaggactcaattgagggtggtcccaacactcggaccactcgttccaggacgaccaaacctatgttgggttttatgccctaaataaactcatttcatataatcaaatttacttattaataaagatcagaaataacattttatgtt

SEQ ID NO: 336816 - DNA, 543 bp, Cannabis indica
tttatatataaagataaaaatatgacaattagccataattttttatatcatcttattaaaataattacgtaactagttcaatatgataaacttataaaattataaaattagttcaattatgaaaacaaattttttataaattattttgcaattttttaggggtttctacgaaaaaaataaaaaaaatactagattttaggcaaaatttttcaattttattgtcacacggaatttttacaaaaatgttgtctttttaaaaaacatccgcaaaataacaaaatagaacaattaaaacaacagtggaacaattaaaaaataaccgtgaaaacttaacatagtacacagtattttctgagcctctgaggatagggtattttcacatggtgatcaatgctaattggtggagactgttgtggttgtgttgggctgtcattagccttctctgctgttggtgttggtgtttgcactggttgaacttttatcgcctcatctacctcaactggttgtggtaactcaggcccatcatacttcttaccgctcctc

SEQ ID NO: 336817 - DNA, 591 bp, Cannabis indica
tagatagggatccagatacttacatggactcggacaaccacccacactgggatcgaaatgttggacctacatctggaccgagatcctaacccacacccaaacttggacccgcactcgggaccccaacttcgacctggacccgaacctagacccagattggggtccagacctggacacaaacctggacacacactcggacctgaactcaaacccacaccttaaatcagacgcaaagctagaccccgacccgtacccaaagtcgaacctagaccaggatcagaactaaggacttagacccagaactggattggaacttgggactcggacccaacatagatcaagacccaggacctgaacccacactcggagcctgatctggacctagactgaaatccagacctgaacaaaaactcagaccaggactcgaactaggacagagacctactacctgacctagactcgaacttgaacctgagacccaacccggcactagaaatggaacaacactaggacccgagattgggatacggatctcgacccagggcttagacaaaaccagcagtcagtttccggatttgggacccagccttg

SEQ ID NO: 336818 - DNA, 656 bp, Cannabis indica
gtcaaaatatttaaaaaaaaattaatttaaaaaatttaatatctgacattaaatttaaaaataagataagatataatcaaatttaaaaataagataaataattaagcagaaagatagatatttactaatttcaaattcaaataacactaatatcttgaattaaattaaaaaatattaaattagttcattatgataattagagttgaatttggaatagtaaatctataaatacaaactacacaaaaaatcggaagttaattccatgaaaaagcatgaaataacaaagaaaaacgaaaaaattgcgagctgtacggacgggatgctgtgcatacccgtctgcgctcgcatggggagtgacagccgagaaacctcggcggaacaggggaagttgcagccttcccgcgcgcagaatgaggtgtcaccaggcgtccgcgcgcgttttcagacaaaatcttgtctgaatgcgcgtgttgtccgaggctgactcggatccgcgcgcgcgtgaaggtgcacaatcaccttatcttttttttgaatcttcaaaaaatcataactaattcaaattaaatcgaaattgagttctgtaaaaaagtaacttgcttcattttttccatactatccaataaaaatcattccagaaacagatattcaattat

SEQ ID NO: 336819 - DNA, 1225 bp, Cannabis indica
ttttgggggaaccgaggcgtctgaggttcttttgaaatgattacccctttctgttgtttgcctataaataccagtgagcatttttccacaagctcattttcaccaatcttccttcctaagtatgttcaaagcgaaaagagaagtttttggcttcaagcttgctgaagtgctttcatcaaaactgctcgtttggcttgacgcaacttgaacccagacgcttgattccttgagtaagttcttgatttcctttatgtttactttgcacatgtactttcgattttgttgtagaagagatgtagaaaccctaagtttaggaactctgcgattttcctttgtcacggttcatgcgatttcatcgtccgtaatgcttatcttttgaactgcataatgcctgtctttcatcctgcttattctaagcttcacgagatttttttccctaactcgtgaaaatttcaaacttcctgagttttgactttttgttgaatattcttattctataatctcctgagtactcctagtcggcatatttgcttgttttatgcttgttttaacattcgatatttcaaccaaacactcatcttgtgtgttgtcttttatagatgaacctaggcgagttttggggaagcaagcaccaaatcgaacaggatctgcttcaactcttacacgaggatcatcctcgtcttcgttataatccaacttcttcaagtgacatacattcttctttaaatcttctgtccagccatagaatgatggctcataccaaaaagacaatgctgagggttggcgcatccgactctcaagttgtccggcacgccaccttacccagcgccgaacaagatccaactgtctaggagagggatgatcatgaaggggacgctgaggtccaggagattgaagagcaggacgatgtccgccctagcagtacctacgagacggaggaagaggaggaggtttcacccctaaactatgggggatacaatgaggtcaaggagccagttgatgctgatggcgacgtcctggttaagggcgtggctacgccagtgaggaacttactgccgcggttcctcatagaaggtaaggtaccttgggtgccaggtgggtgagccctccgtccaaggttaccgaggcgcacgtgcgggatctcgaccaggatggccaccttaggaaattggactgttacattcccgcccacaataatcgaaccacaaaccctgaaaagggaatg

SEQ ID NO: 336820 - DNA, 553 bp, Cannabis indica
taccttaggaaattggactgttacattcccgcccacaataatcgaaccacaaaccctgaaaagggaatgtgcgcctggtcgggtgctcatgcccagcaaggggcattattgcctttgcacctgtactttaagaatgtggcagacttcttccacctctgcccgacccaatttacgcccaagggcattaaatatatgtccgctctcttcattctctatgcctcccagaagtgggatatgccctctccccacgaggtaagctggtttttttattttgaatccacgcctaagcaaaagcagttcggggtacttctatttctctcaaccagacttcaagtagttgatgggcaccggggataaggccgtcaacaaaattaggtgttttgttgatgagtacgtcatggtggatggcatgggcaccacccatactcggttccagcagatccccacatatcaccgccctcccttcactcttgctcttagagatagagctcaaggcagtacgaaatcaacttccaaccccgaacagctatcaaaggccaagccttggccgact

SEQ ID NO: 336821 - DNA, 1201 bp, Cannabis indica
tcaaattcaggtaaattttttgccagaatcaatttttttatgttgttttttttacgataagtacagtgatgagattaataattttattcattcgagtatctatgctttattttgattttttgtatgtatatatactcagttagaagaatatcgtccctataactctataaaagtgaaattgattaaaatggtatctctttgaagggtcacaagttatagagacttaaaattttatcttgtcgaaattgattaaggaacacacttttgtttagtcttgtatacacttttgttccacggtaaacaaattgaattgatttcattatgtgtttagtcttgtatagttttacgtgtgtaaagaaagaaacacacttttatttctagtactagtgtttaatttgtcaaataaaccatacattcaaagggattatttctcttctctacaccttttaatttttattgtcattcttatatgtgtttcagttaatgcaattatactttcactctgtttattactaatttgatttgaagttcaagattaagacttcgcaaagctagataaggttctctcaatgagataaaaggtgatataatttgttcttagacacttggtagagataatgaagagtttttcaataaattgtcaaaaagttacaaacatgtgtgtaaatctatttacatataatatgtatgtatattattgtttatgtatagaattatacgtgctaaaattgctttgaattaaagaatgtatggaaatttattttgaattagttgatgtgattttgaagtaaagtgcccacctatttgtatttgtgaattaggtgatttatacaatgtattttttaagggtcttcagcctacaaatgtatattgttctcaactttgattatatgtcatttttcagggagctattgaaaatggtagtcaaaggaattgtggctcaaatgagacttgttgatgttctataaagtagggccaacaatatatttctgtaactcataaatatttgaattttttttttggttcagattttgtaatgatgtctttaacagtttttgttgaatattatggattggtgttagatatattgtttataatgtattgtaatttattttttatgtatattcttacaattaatatattgtaacaccctaactaacttaggcgaattacgtgatttttttttaaacatgctgtgcag

SEQ ID NO: 336822 - DNA, 669 bp, Cannabis indica
aaataaataaaaaattaaaatataataaaacttataaaattaaagatatttttttttgccgcagtcgacacatctatacttcattccaccatctgtcatgtaattctattttctcagagagacagagttgctttattcgtccttctttgtagttataaatatattgtatatgtttcaattaatcggagtaaaatcatcaagaaagaaaaaattgtaagagtttgaaagttattaatcattattagttattgatcttgaatatagattattaaaagctttgaaagtcattaatgttattggtcattgatcttgaataaatattattaaaaaagtatgaaagttaataattgtgattagttattgatcttgaatatatattattgaaaatttgaaagttatttattttttttgaataatcaggggatttattaattaataacttgttcaaaacaatagaacgcacttcagaggaataattctcgaactcaagcacataacttgtagagaaacaagagtcccttgccaaacaatgagccaacttgtttgccattcgtttaacaaaacataactcaacaaatgataaagccaaacactactataaaacaagcctttagagtcgcttttttcagcataataattaataaccgacgccatagggttgaaaatttt

SEQ ID NO: 336823 - DNA, 923 bp, Cannabis indica
aatacaatatatttctttaatgaatcattattttacttttatgtataattaacattaaacagatataataaaaattatttttatttttaatttttaaataatatataaaatttatgaactcaaccaaacagtgtaataacgggaatatgattacatacagtttacacatttctctacaatcatattctccttcataatattccctataatcaaattattttgaacactttattccaaaagcatgttgtcaccactatattttaattgtgcatccaattaaacataatgtataaacttgtgtataaaaaaatcactctacaataattattattcatgtaagttttcaatctcaaattaaaaataatgtgtgtttaattataagaatatctttgtaaacttacatcctataatgggttgaccaacacagagctagactagtaagaagataataacaaataagaaagataatataaataccaaactatttacaccatctccttattaataattgaaattcagccaacaaaaaaaacaaaaaaaattaagtcaccccatcactctataaaaaagtcacataattataataaaagtaagttttataaaaataaaaattataaatatatatagaatagttataagttcttattatatgaattaaaaaaaaataaaatattagacaaaaaacacatcaacgaccagccatttaaaagaccaatctttagtcataattttgcaactttatttcaactagttattcttctttcaataatactatattttccaattcaatcctataaataccaaaactatttatttaataattataattaattattaaataaaattaccatttatattatttattaattagaccatacaaagtctcttaattaataaattaacccaaaacttcttttcttcac

SEQ ID NO: 336824 - DNA, 887 bp, Cannabis indica
tttccaatgtgttgacgacacaataaacaggatcaagtatgtgacaagggtttcagatgaattcatacattatgtacgtataatcatgaaataaatcatgtgaaccatgcaacattaaatgttataattgatctatattaataagtaaatctgattacattgaaatgagtttaattagggcataaaacccaacaagtagtacagtactatcagccataatattagcttatactcagtacgctagtcatactctagtcgtaccaatgtgatactgtctgatagtacttaagccaccatacatttatcgatatccaatataatactaaatatattgataccgctattataatataatttaacaggcttaactaacatatacgctaaacatgtaaacacatatactgtttatcattataataatcttacctcattttcgaattcaggtgtgacgaccaacttgagtggaacagctgctcaatgatttataggcccctaaatcacattattcgtaaaactaatgacctaaatcactttttggagacttaaacttgaaactaaaagttttcctatcgatggataacatgacaataccctaaatattacaaaaagaggaaaaactaggatttcctaaaatgtcccaactagtaaatcggttccccaactggaattccagttctgtagggttttttggggaccaaccgaaatcccggttcagtgcagaaactgcaaaaaaacctcaccataaactcaaatcgaccccaaatgcaactaaactttccagagtacctaattacactataatgaagagaattcatgcaataaaaactagaaacaacccctgaaactcaattcaccattaaagaccaaaatttgagctctaaagctca

SEQ ID NO: 336825 - DNA, 541 bp, Cannabis indica
gcgaagagttccaaggtttgtgcctttggtcctcgaagccaatacctaaagattttcattgtggtagactcgactaggaggagaaacgacttatcgttgcttagggccacaccatttggaaatgcaaggcctctgagcaaaactgttgttttctttgttcgtgggtcgtatttgattagtcttcctgttctttctccactcaggactgagtacaaccataccctttcaatttcacccaaagacatcataattaatacaccaaaaaaatataatattaataaaaaaaatgtaaaatgctcaaattttatttgttatgtactagcactgcataaatgtgatattttgtaaatggttagtaataataattaatactaaatactactatcttttaacttttagaaaaaatctgcatatgtggtggggcttatttgctctttatttttagggattttttcaataatatacttaaaatacaaactaattaaaaaaatctcttaaataaatctcaattataataataccttgacacatcatacaaaaa

SEQ ID NO: 336826 - DNA, 786 bp, Cannabis indica
cccaatttttatcctcatgatgtggcatgattacatggatagaacatgtgccacgtggaagtacaaatcactaaaaggaaagttaaatcaacatctgagccaacaaagacctcaacacttaaacggggatcaagtaagtccagctcgctctcggaagctggctagccccccctagctagttaagccaggaaacagcatcatggctagccagtttggccagcacaaggccatggccaaccaaggattgcagttaagtcccacaggactctcctacacgtgcacaacaagaatgggctgcaaatttggcctcaaaagcccaacagaatagttgagaatatctagaatttaagggcattttgatcttttgtaaatatctagctaactatcctattttcaagggatttaagttgtaaacctagggtttatgcctcttatataaaagccttaacctctagctaaaaacctaagtttcctatgcctccactaagctagaaatctcatattctctaagtgtcaaactctctctctcttccttactttctcacacgcccaagcctgggctgcccaacacttaagttctgccagttctcgattcatacattataatcctaagggcactatagcagatcccacctataacaatctggatagtgattccctcagtatcaatacaactgaaaggggagtaggtcatgttgggttttatgccctaaataaaactcacttcaatataatcagatttacttattaatataaatcagaaataacatttaatgttgcatggtt

SEQ ID NO: 336827 - DNA, 631 bp, Cannabis indica
aagtagttattagctaataaaaattatttaaatatcttattagctattctttaaaaagatattaaataaatatcatatatgtgttattaaaaaaataattattaactattgaaaaattagttattaataaatatttaatttaactttaaattcataaataatttgattattgtagatatatttattgatatttataatattttaaattttaaatttaagtaaaatttatataaaaaaatagaaaagatattatggtttaatttaaaatatatttttgaaatattctctacaattcaaaaataactaatgattaaagttttaaaaaatatatatatttcttagcaaaaaaaataccaataatttttggatgtggtttatatgaatattgcgtgaaaattatatattaagcaaattcatatttaattttttttctttcttaaaaaaatatattattcattttatttgtgtaaaaatattataaataattgtgtaaattttattaaagttttatcttcgtatagatattttgtggttctgagtaattgataattaattaaaaaaattaaaagtaaaccaaaattttacattttacatttttttttttatgtaaaaggaaggtgtctaagcacct

SEQ ID NO: 336828 - DNA, 1614 bp, Cannabis indica
aatgctctgacaattaatattttaaaatatgattttctctcaccaccgttgacggctacacttgattacttttgatttcccatattctcttttagagggaaccaaggcgtctgagattcttttgaaatgattaccccttttcgctgtttgcctatccagtgagcatttgttcacaagctcattttcaccaaccttccttgctaagtaagttcagagcaaaaagagaggtttttggcttcaagctcgctaaagtgctttcattaaaactgctcgtttggcttcacgcaacttgaacccagacgcttgattccttgagtaacttctcgattttttttatgtttgctatgcacatttactttctgaatgcactttcgatttcgctattgaagatgtgtaggaaaccctaagtttaaaaactctgcgattctcctttgtcacggttcatgcaatttcatcgtctgtaatgcttatcttttgaactgcataatgcctgtctttcattctgcttattctaagcttcatgagattttttgccctaactcccgaaaatttcatacttcttgagttttgacatttctttgaatattctcattcttcagtctgttgagtactcctaatcgggatatttgcttattttaacttttgatattccgaccaaacacttatcttgtgtgttgtcttttgttgatgaacccaagtgagttttggggaagcgaacaccaaattgaccaggatctgcttcaactcttgcacgaggatcatcctcgtctttgttctagtccaacttcttcgagtgacagacattcttccttaagtctttcgtatagccatagaatgatggctcgtacaaaaaagacaatgcgtagggtcgacacatccgaccctcaagtggctcggtacgccaccttacccagcgctgaaaaagatccagccatccaggaggaggaggatcatgaattggacgttgaggtccaagagattgacgagcaggacgatgtctgtcctagcagtccctccgaggtgaagcaagaggaggaggttgcacccccaaactatgggggatacaatgaggcgggggagccagttgatgctgatggcgacgtcctggttgagaatgtggactacgccaccgaggaacttactgccgcggttcctcatagaaggcaaggtaccttgggtaccaggtgggttagccctccatccaaggttactgagccgcgcctgcgggatctcaaccaggatggctacctgggcgaattagacagttacattcccacccacaataatcgagtcacaaaccctgaaaagggaatgtgcgcctggtcgggtgctcatgcccaggaaggggtattattgcctttgcacctatactttaggaatgtgacagacttcttccgcgtttgcctaacccaatttactcccaagggcattaaatatttgtccgccctcttcgttctttatgcctcccagaaatgggatacgccatttccccacaaagttagcgggttttttgattaaagtccacccctaagcaaggcagatcggggtacttctatttctctcaaccggacttcaagtggttgacgggcatcggggattcggccatcagcaaaa

SEQ ID NO: 336829 - DNA, 617 bp, Cannabis indica
gcataaaacccaacaggaacgacccatgacctaaggaacgatctaaacagaagaaggggaatagacgagcagaatactacaacgatcgtgcagcccagagcccatactcaaacccccgctcagaaagacgctgacgcaatccaacccaaacaaaacgccaatcaagtcagcccagccgtacaggcgcagctcgacgaattgaagaatatatttcatggcatggccaaacagcgtaacaatgatcttgagttagaccgtgcacgcggaactcgcttctcactagagatcaatctcttgccactgccccacaagttcaaaatgccaacgtggaagatgtatattgggagagaagatcctctctcccatctcaagtattttgagatgcaagtggatttacaaggagtgcgaggggatgtatgttccgaaatcttccccgccactctgtcggaagccgcacagcaatggtatttcaagttggatcttggaaagtttagttcatggaaaaccttctcttcgaaattccatacacaattctcttcctcacgtcagctcccattacatctgggagatttggtcgaagtaaaacagcgactaggcgagccactccgggcatacat

SEQ ID NO: 336830 - DNA, 822 bp, Cannabis indica
tcaagtagagtaattgaaagttttgataaaccatgtgatatttatgcttcggggtttggtacccttttaccttcaggagaccttatagtatccactaggtggattcggtccttgtccttctggattgacggttgtgaattaaccgccaatctaatagaattgcaagtttctgattttgatataatcctatggattttctgtctaagtatggggcaacgattgactgcaagcagaagatggtggtgtttgagcctaatagtgccaacccaccagtgtttgtgggtaaagttcagggggcacgcataacaagaataacacttttgaaagctaaggacctgatgagcagaggttgtctgggattcatagttactgcagtggataccagccaacctgtgacatctggacctgagagtacaagattggtatgcgagtttcttgacgtctttccagaagatctaccgggattgccacctacccgggagattgaatttgtaattgagttggttccgggagcggaaccagtatcaaaggcaccgtatcgaatggctccagcagaattaaaagaattgaagatacaactacaagaattactgaatctgggattcattaggccgagttactctccttggggtgctccggtattatttgtgaagaagaaagacgggtctctgcgaatgtgtattgattaccgagagttgaataagcttaccatcaagaacaaatatcctttacctcgaattgatgatctttttgatcaactgaaagggaagatggtcttctccaagatcgatcttcgctcaggctatcatcagctgagaattc

SEQ ID NO: 336831 - DNA, 672 bp, Cannabis indica
gtacaaaaagttatagcaagtcagtaatctttaaaagcacaactacaaattaaaaataacatttttacagaataaaaaaagattatgtgtaagagttataattattagccactgggtgtcgaactaccagggccaaaaattaaaagaagaaaaaactaatcattggatatattagttcatggagcaaactaagagaattggcttagtccatagcacaaatattaattatagttctagtctttcttcatgctataaatattagttaatagttaattttacacaatttctttttattctaaattattgtttggttgtatatgatgctttaatataatatattattatagcatgtcattcaaatagtactttgtcttgcctcgcttttaacttcagcaacaatttcataatttaaggttgtatttggttagaaagaattaaataaaatggaaatgaaaaattatttgtctcagtaatttgtttagttggagaaaatgaaataaaaaagaaggtccttgcaatataagataaaaaaaaaataaatattttatgattagaattcctctttctttattattatatattataacatagataaaaagggaaaaatgagagagagagagagagagagagagagagagagagagagagagagagagacgacgtagtacgtac

SEQ ID NO: 336832 - DNA, 778 bp, Cannabis indica
aaaagttcttttttaataaaaagggctttttaatgattacaaagggcagttttgtcatgctctcttttgaaaagacgcatgtcctgtgattttgggggttgtgtggtttcgaggtacatcagtattaaatgaccatcttttccacttcctctttgaattcaattcgtaggatcaaacattttcctgatctgacaaagttaatatcatataaagtaagaaaaaaggaaccagctttgcattatttcctccattttagaaagtctaagaaattcttaagccttttcactaagaatcaccatcgagtttgcctgaggatttgcatgccatctctgtccttgacattttttctacgagttttctccgacttcattttctcaaagcaatccttactagattcgatgatttgcagacagaataaccattcattgccccaagccctaactttaaatagtaagtttctttcctcctttacatacctattacattgtgtttaatttgtttgtaacgttgccatctcatttagttttggtagtttttaaggttaaaatgtatttaggtccatactaggttcaagcaatacgtaggttttttagaatctccaactcaccaccttctggtttgataagattctctccagggattgggactactttcctcttgcaacaatgtcccactctagttcaggaatttatcgtccagaagctttagaatttgagtttcctaaaaaatcagccatcccgaataaacccaacctgtaacaccctaactatcttaggcg

SEQ ID NO: 336833 - DNA, 543 bp, Cannabis indica
aaagaatgatggagggaaatatttttcaagattgcatagagttttaactatgtcatcatgcaatgaattcaatttcttcatttctaattctttcccacacaattgattaaagaatatgcaaacctttgtcaaagtttgtcgaacttttttaggtaagactgatcgaatggcaattggaagtaattgttgcattaacgtgtgacaatcatgcgatttcatacccattaactttaattcttccatacacactaagtttcgaacgttagatgaatacccatcaggcactttcatctttgcaaatgagttgcatacggcttgtttctcttctttagacaatgtgaaagctgcaggaggtaaatatgtacgtttgcctttatccacaggtgccaaactgtgtcttatacccaactcaacaaggtctaaacgactagacaaaccatctttacttttaccagggatgtcaagtaacgtaccgacaatgctttcacacacattcttttctatgtgcatgacatccaaacaatgtctaacaagtaaatcttt

SEQ ID NO: 336834 - DNA, 1016 bp, Cannabis indica
tcatttaatttttttaaaaaaaaccaaaatttagagaaaaagaaagaagctctctcgctccatagttctctctctcgtgaaccctagaaaccagcaaggaattcaattcttcttcagcaattcaagcaagttgcagcaagttttagtgtgaatccaagccaatgtaagtttctagcaattcctagttaggttttcttgagttttaagaaatggattttgcatgattttgagttggtagctgttgtgattattattggtgttcgaatcaagtttttgtagttagaatatgattagaaatgttgttttaagcatgaattggtagttgtttgaaggtttagccaagttttgagttttaaaactcaaacttggagctttaatggtggaattcaaatctgagctttgattgttgttttgttgcttataatatgtttattggggtgtaatatgtaggtctagaaagtttggttgagtttggaaacgatttggttagggtaggaattttttgttggttttcagggtaaaaccggttttacactgcttgtaaaaccggttacccggattttgcagtaggggaaaaccagtttttcaacttgtcgttttgtgccagtttcagatttctagttggttgattccctgctagtttgggatattaccatattaagttgctgtagatagggttttggttttaaaccttagtcccggttgtgatttagcgagtcacttatgtgtattgttatcgatgtaatttaggagcctataattcaccgagcagttgctccacttaggttgaccgacacacctgaattcagaattgaggtaagattagtataatatcatgcatatgttattacatgtttagcgtgcatgttgtttatgcctgttagattacattgatagcagtaatagtgtacatagagttgtactgattactgataaatgtatgttggctaaaatattgatcgatgctgtcacatcaatatggctagagtatgactagcatattgagtataggctga

SEQ ID NO: 336835 - DNA, 524 bp, Cannabis indica
catttactgttcgtactattttttctcacggagctgttgaaattgaaaattctaaatctggtaatgtattcaaagtcaatgaccaaaagttgaaaccatttttagaattaacaccacctgaagtggaggaaacgctctttcatgacccgatttaccaaggttagtgaattctttcactactggtcctatctttaattgctttctttattttccgtattttagtttattttctgtcatttgtttttgttagaaaatcaacatctatcactgtgcatattctctgttttttttcggttctcatctcatgttcttatcatatacatatttagacattgaggacactgtctcattttagttgggggtactgagtatattcttgcgttaagttcgataaatttcttacctttttgaaaattttgagtcaaattctgctgctaattatgtgaataaataaatattgtgttagactagtttatactatatttagttacttagatagtaattccagtaaaaattgcacaaac

SEQ ID NO: 336836 - DNA, 525 bp, Cannabis indica
gttccaaatattacatcagaaatagaaattacagcatcagtttactggtagtagggtcgcaaatgctccacgttccaatggttctttattagcgagccgttaagctgagctaattagtaaacctcgtttcctactattgcttcgatcacataaggaccccctagtttgggttaaatactcctgcatatgcatctctcgtgtttacaaacactcgcctcagcaccaaatcaccgacattgaaaagcttcttcttcactttcttgttgaagtatcttgtcactcgatgttggtatgctgcattagtgatttgcaactcagtacatttttcttcaagtagatctaaggacaattttaagagttcttggttttcttcttgattatagaaatctcgtccatgggtcgcaatattgacttctactagcaacatggcctctgagccaaattccagcaagaatggagtatgccctattgttgtcttctcagttgttctatgaacccaaagtacttgaggtagttcatcgaccc

SEQ ID NO: 336837 - DNA, 665 bp, Cannabis indica
ttttaaatgtataagaattaatgataaaaaaattgattatatttatttttgtttattttttttatatttttaaaatcatttttaaatatttaaataataaataaaaaaaataatggcatggaccaatgaacgagtgacacgtagacactaacttggcacataacggagaggtacctacggaagttccaagagtgtaacggaaggtatttttaccgccaaaaatacgacttaggtatttatctgctactcggcataaaacttaggtatttatgccgcaaattactctataatttatattacctcaatttttataagtttatttatttatgtctatttttttacgttttcctttattataagattttgaattttcaaataaagtttgtgtgtttaacccattaaacttgattaatataattaaatggacattagtaatttatatatatatatatataaagaaaatataatattctttgacgttaagttatactcatttattataaattaaatttttcagttttatgttagaaatttttacactaaaaatacaaaatagatactttattacatatatatatctttacacggttaaaccaacatttatatttatcaactttattttattacatgtaacaccctaactagcataggcgtattacgtgatt

SEQ ID NO: 336838 - DNA, 2726 bp, Cannabis indica
aataacaattatttaattaaggttaaatttctttccttttgggcattgtgtgagagttaggcgaccattagtagtgggtacgatatactgaacgcagccctccctcacatgaattgtaataaccgcattttagattatagattagtattaatatttagcgaaaattattgatatttttataattatttatgaatttattatattgtgggtctcattatttaaaatgggcattgcagttgtaatttctcaattctggagattttattaaactctaagagtattatttaagttaaatatgcattatgtaatttttatgatttttgctcggcggtgacgaaaaatgtgatggatgggcgtttgagtcacatgggtaagtctagaacctttttcttaatgtgataaatatttgagataaatagaataccgggtttaagcggggttgtggttttggaccattttactcctaggcttaaaatggcttaagtttaaggaacaagggcattttggtcatttggattatgggtgttggtggctatcttggagctttacagctggccatttagtgtcttaagctgaatattgaaattagactttattcatttagaggaaactaagaaaaaaaaatcaagaaaatccctttctttctctatttcctttgctcgaccaccaccaagaccagaaagaaaccagcaaaccctcaccattttttggaattcaacaagaaatcaagtagagggcatccatctagcacgtggtttttcgttcaagtcggccaactcacttgaattcaaaaataaggtaagaatagcgtagaacatattatataaatgtgaatgtatgtatgtgtgatatatatgcatgcttgttgtgattcgtacactaccaggtacagagtgcatttgtatagtgtacaatgtttaaaaagtatgttacggtgttactagcactagtacggaaaggtacgcggtgtgtgtggtacatcacttagtggtactcgaggtacgaaacaatcctaccaacactcgtatagtaatggtacatagtgtatgtgatacagtggatgtaccctagtaacgaacattcttacttatctgttaagccttgtggataggtgtatgggtgcctagatgcaagtcggtattatatgacttgttatatgcttttcttactgagtctgttgctacttccatgtgtaggtaaaggaaaggcaaaagctgaacaagagtgagctttgagctaggatggtgtttgtacatgtcgaggcgacgcgacctgaagtgttcggtctcggatatctagggttgtattttgtagtcactatgcaaccaaattttaatatattttgagaatatttgtaaagtttgaatacgggatcccaaattttgtaaataattatataaaaggttataaagtttagtaatttaatcaaaagttttaatttgacacaatttttaaggaaaactcctttgattaccaaaggtggcacatcatttaaaaaatccatgtagcgcgtctaagttttagggcgttacatgaataatctcaattgtgaaggcccatttcccttaattgaataattgtataggttaattacactaatttaacttaataaattttattagcaacataattaatttttaaaatatatgaaattaattttttatcagattattttgaaattaatttaagaaaacaacacttagtttaatgaaattaataaactatatgtatttttttgtacttaattaaataaagaagttatgactaattagatttttctagatacttaattatttgaatttccttagaaatatatttaagttaaaaattaattttccaaattaattttagagcaacttaaattagaatatatattttttttaaattaataattaagtagatttttctaagaaattagttattcagatattcttttaaaataattttagttgaaaatttgttagttttaaatcaacttaaatagggattttttttttcaaattaaggtgattagttcaagatacttaatttggtatttaattaaatattgaaaattatttaagttgaaaatttagttattttagaacaacttaaattagatatttttaggaatttattttattatattttatgtaatttcaaaattttatatatatatttagatttttgaaatttaattttgaaaagtattttttttaattaattttagaccaacttaaattaagtaattttcatcattaaaatatatagattaaaataagtgactaattaaaaatacattattttcaataatgagctttaagcaaagagatattcgatctccattgttggttctacatagttcttgttttagtgagattcatccctaatagatgttcgttcattagcaatttaacgtcgtagaatctcgaaagataagtattattgtaagtcttttattcttagtaacgtccaccctaatactggctgctaagagtagggcttacaaagtatgaaacaatggtagaagctcatgaaataagaatgaccttcactttcgcctaaacgggacaatattagattctcttttagattgaataaaatattgctagagtggtgtccattttatatgagatgactactctattcaatgaatgatatttttgactctcgcttaaacgggagactacatcaatttgttggaaactttggaaaataattgaatatgttttatttttggtattttt

SEQ ID NO: 336839 - DNA, 879 bp, Cannabis indica
tttttggtatttttgcaaacatgattcttacttgttattttttgaatctgtgtatgaatttatttgaaccaagtgatttatttctggttattgatatttgtagtgtcaaaatgaacaacccacaccccaatcctcatctattacatgcctttgcaaatgaactctatcgtgtgaagatgtctcctagtcagagcatcaatacacacttgctcatgatgaacttaaagttccagaaagaaaatctactgggaattgatctatcaaaagagtaatgggttcaattcactctcaacagccttccacctgagtataatagattcgttgtatcatacatgatcaactttaactcattcgacataggcaagcaagacgctaaactgcgtgcctatgaacggactttgctgcttgcaaggagggctctctccaatattacagataaaggtaaaaggaaacctgaagatattgaggatgacacctccgataatgttgcttctttgagttcaattttgagagctagaatcgaaatggaaccagaaattgaaacaattaaagaacaacagagcagacatactcttctatgttctcactgtagagagaagggacatttgaaatcaagatgttccagacttgtaccattggaacgaaggtaacactttagtttttgaatcatgtgttttagaaaatgacaaatcaatttggattgttgattctagatctacaaaccatgtttgttcttcattgcagctgcttgaaacttgggattacttaaatccaggggagttgaagctcggtccaagccaggggaaaagctcgcctcaagttttagaataaatttttgcttttagacaatgttttgtttattctaaattttagtagaaa

SEQ ID NO: 336840 - DNA, 825 bp, Cannabis indica
acctccacaacgaacgggtcgttgtgtggaaacctgattttgacagcgtcctcatcgttgaaggtgatggtaggccatcctgcccgtgggattttaggcttcctttcttctagggccaggatcacttcttcttgctcgtgctgcgctgttcgggcatacctctcccgagatttgcccgaatctccagctatgtgcgggcctccaatgatcacttgtagatgttcgtctaccggtggaggtagcaagtcttggttattgtcattcctctgattttgatcggtcttgacatacttctgtaaatgcggattgtttttccttattaggaattcaatttctcgcttcagattgttgcattcgttggtatcgtggccgtagtctccatgaaattgacaaaactttgtcatgtcccttttgctgacatctttcttcatggacccgggcttcttatgcgaggctagcgactaagtggccatgtaaagactttctatatcctcagtcaagatggtaaatgcagtgtaccttgcttgattctctcggggagcctgctcggttttgttggtgaactttcccttctttccattcccttgcctgttgttgttgttggaacgtttaccatttgagcttcaattatttgggtaatgggggagttaggcggacgttacagtggaaggagcttttgttttaccaggctttagttcgccttctactcactgaatagcttcttcaagtttaatgaaaccttcacaatgattgacaaaatcgctcattgagtctaccaaactattcttccttatgtccttccaaagttcaccgaggacttcaatg

SEQ ID NO: 336841 - DNA, 580 bp, Cannabis indica
ctgcggagcgtgatgatattaccacaactcggtttgaaccgaaccaaagggtgaaaacggcgccgtatttggttgccaggtggtggaagcatctgtggacaggtggctttattagatggagatggcctatgagtgggagaggataaggtgggcttggtggaaggtttttgtattgtcgttttggtgttttgatgaacagtttgtatattgaaacgacaatgaccaagccgatcagagctgtgtagagttgttcttgttccatttttgaatacttggaagaaagtttgaggtgatatattagtagtgattcatataactatgtatatagataacttgtggggtgtatatatatgatattaattgtacgacttgatatgggactgaatttgtgtggatagtagtatatgtcaaaagtctttaaatttaacaattttaatagttcatagagtatttttaacgactttaaaagtttaagaaacataagttggtacatgtcaaaattcaaaggacaaaaatcataattaacctttaaattaaaaaaataatgtgtgagaataattaacacgatttatgcctctct

SEQ ID NO: 336842 - DNA, 544 bp, Cannabis indica
agggtactttttttatgttgttagctacctatttgttggtcataaccatggtctagattggtgttgcgcacacaactaactctggctttgctttgcccgacacaccggttattgcggctatggaagctgggctagaggatctaggattgtagaaatcactctgcattctttttctatcagatgttggataagaatggaagatggtcatgtacatagtgaagttgtccttgaatgaagtgtttcccacttgattattttgtaacatgaattggtattgtcccacatagtggtgtttgtatgattgtatttgttattagatactatttatattcgttttgggtctaagctcttacaataacatacttttttcctatacaatttagaccaaaaatgaaaactagaaatgttatcttcaaccaaaccaaaaatgaaaaaacaaaactgccctatacacttacatactttttccctatacaatcaaattgaatattaatggcttaattttgtgttacttagacattctttcatattcttacttatatat

SEQ ID NO: 336843 - DNA, 876 bp, Cannabis indica
ttaagcgtttatatagtacaactatgttttacctaagattcgaacacaggacctccaacacacacacccacctatgaccacttgagctagcctcaagtggtgactaaatgtgacttttagtcacaacaaaatgttacttgtgatgattaaaacatactctttagatgcaaattgtcactaatttagttttagtcacaacaagtattgtgactaaaaatacatttagtcacaacaaattgtaatttttgtgactaatactttttgtcacggaccttttatttacaacataagaataataatgtataattagtcacaattttttcacttttagtcacaaattttattgtgactaaaagtaagattttttgtagtgaacattaaaataatattatgtgattctacacttcaccccattaaataggagtagacggatacacccttacctatttcagcatctacaaaaaaaattagtctatttttttttatattcgtttatgttatagttatttaagatatctaacaaaattttaaaaaaattcgaaaaataatttacaatattgaaagtaagtagttcaaataatctattttcacatgcgtatgaaataaaatagtcacgcgtgcaactacatttttcgaaccctattttcggcgtgttaaatttttttaaaattttacaagatgtcttaaatagaaataacgtatccatgagaaataatttgactaaaaaattattttagatgccaaaacagataggggtacattaatgcatctatttaaaggggtgcaatgtagaatttttcaataatattttcttaaaaaaaataacaatatgtatttttgtaaaaaaaaaaaaaataaaattcgtaaaaatatata

SEQ ID NO: 336844 - DNA, 543 bp, Cannabis indica
cttaacataaagaacactatttttgataatttgttgaagatatttcgagatacacaatttagtcattttttggacattttggagtataaattccatcctcaaattgtgcataagcttttattgagggaggttaatcaacccaatccgaaagaattttggacaaaggttgttggtcgttgtattcaatttagtgcataggaattctatttgaaatctaatttggaatgctttggtgattgcaataaaatgttatttagccaagaatcaaaccagttggtcgatatttgctttcttggaactaaattcattgaccataagtctattgaagatgtatttttggatcctaggtggggcaatgacgaatttcttggtttgaaattgattgttctgtatttcattcattgcttccttttaagtaacactcttgagaagaaagttcataggtcagaattagatattattgatagtggtcggtgggatgggtactgttagggtagtagggctgtacatcggtcggtttgggcggtttatcctatatatttt

SEQ ID NO: 336845 - DNA, 764 bp, Cannabis indica
atattacagtaaatttatcatatttaatccaagttcaatatcgatcccttccagtgcatactccatgcatccaacccaagcttaactttaaccaatgccctggaaaggacatagcacttatccaaggtgcaagtaaactatgttgtagattatcatatcaattaaaccctatgtactgataaatctaagaatatatatttaatcacacaatcttgattactttccactgtgctaacgacacaataaacaagaatatcaatgtgataagggtttggatgaatttgtaaattaaataaacatataaatgatagcatgaaccaaatgacacactaaataagtgatgaaaatacttctgtctctttattgataattaaatgataaagattacattgaaatggagttttatttagggcacaaagcccaacagatacaacaagaaacacaatcgatcctgcaattacaaacaaagaaaaggtaagtacaggaaaaaataccaaaacataaaaaatatcgacatcctatcgatatcccatcgataatatgtcgataaaaacatctgcaatttggttggtagtacatatcgagaaactaccgacaaactatcgacacactatcgatatagactccacaatgcacattgcatgtacgtgtacaattaaacatataatggtaattaatcttttctgccttttcaactatcgacaagctatcgacattgtatcgatattcacttgacaaatacacattgcatgcatttcacttgt

SEQ ID NO: 336846 - DNA, 2300 bp, Cannabis indica
ttttttttttgcaagtatactcttttgtctgttcagggttttgggttcgacaaaaccttttgtacgcactagatgggaaattaacaacatgctagtggattccactcaatttgaattttgaaataaacatatttattcattttattgatcgaaaatgtgtttgttaccgtagtaacttacaccagatctatttgatctaatctgatcttttagcttaacatgaaataaaacaaattgtagaattagaaattgtactttaaatgatggtcatctgacctgagtacttttcaattttatcttaacctttgggtgtggtccgcccagcaggccattcacttaaaagtaactgttcttttagtacttaatatggtcatccaacctggtacttctattggtagtattttcttaaatgttccccattccaatatcgtggtaatagaacaaattgcattttttcatcatactcacccaatttgtatgctcctgattggagaactttgaccacctgatatggtccttcccagttaggtccgagtacacctgccgtactgtctttggtgtttagaaatactcttcttaggatcatatctcccacaaagaatttccgagccttcacttgtttgttgaaatatcgagctactttttgtggatgggctatcaactttaagtttgctgtggttcgcttctcttcgattacatcaagtgattaggcaaggagtacgtgatttgcttcttggttgtaagtcaatcttctgtgggatggtggctcgagctgtacgggcagcatagctacatatccataagccatggcaaatgtcattgtccgaaactattttgtattgcaattcgaaccggaagattatgttcttcacaacaaagtcttgctcttttttagatgtaatggttgcaagtggtttggcttccgtccacttattgaagtaatcaactgtaaccactgcgtactgcactcctcctttgccttttggtaattatccgatcaggtcaattcgccaaatgggaaaaggccacggaatttgcatctgagttaactcattgggcggagctcgaggtatcttcgaaaatctctggcatttgtcacattttttaacataggactttgaatcttcaatcattgtcagccagaaatagccttgccttagaattttcttagataagctttgcctgccggcatgatttccacaaaatccatcgtgcacttcagataaaagtcgtgcagcttcttcttgagtaacacatctaagcaacgacatggagaaccctcttctgtacataattccctctacgatgatataccgtgtagccttcctccttatccttcgagcttcatttcgattatctgggagttccccaatgttgaggtaggatactattggagtcatccagtttggtgaagtatcaatcatttcgatctcttccattcgaattatgctaggctcttcaaggaactggatagggaccaagttcgctttatcactcacattgctgcttgccaatcgagctaacgcgtctgaagtcgtgttttgttcccttggaatttgtttgagaccgtatcttttgaattgtgcaagcaggtcatgtattttgctcagatacgctatcttttttttctccccgagcattgtactctccagatacgtgatttaccaccaactatgaatcactgcagatttcgatgtgttcgactttcatctcccgggctagttttaggccagcaatcaaagcttcatattcggcttcgttaatggatgcctggaatccaaacttaactgtagcgcgtaggtgttgccgcttaggtgtgacaagggcgattcctgcaccgaatagttgatctgtagccgacccgtccacatgtagtttccaagtcgacttatcttcactatttcttggctgaggtgtttgtactggctcggggttgtcttctgatatcctctcttctttgactatgcattctaccacaaagtctgctagggcctgccctttaattgttgttcgaggttcgaaggtaatttcgtactgacccaactccgctgcccacttgagtaaccgtctagaaccgtccagcttttgcaatatttggcgtaatggttggtcagtgtatacccgaacaggatgagcttgaaaatagggccttaacttccttgttgctagaatcaggcagtaagtgagtttctctatcaatgggtaccggccttcggcatcaacgagtgttatggaccgagtgttgtatgttgttttcttctctaatcagcacggtgttggaatttattttaccaggatct

SEQ ID NO: 336847 - DNA, 623 bp, Cannabis indica
acacaaattagtttcaaacttgtaaaccctaaaaataaaatcataacaaaacatattacaataaataaagaagataattgaaaccagtttaccagtcaacctaataaaaatacacacaaaaaaaattaaaaaactcaaaaatataattaaaataatgcacaatgcacaacaaaaatccaagaacaaaatataagtataaaaacgagttttgaatctagaaacaatataataaaaaacttaaaataaaaaatacaataacatcataatatggagcaacttcattacaaaactctcaaaaactatgaatcctgtgaaactatttttcaaattggtgaacaccatgaaaccaagttttgaccatataaaaaatcataacaaaacataaatgataaactgtaaagataactaaaacaagtttcattagtcaaccaaatgtaaaaaaaaaaaaagcaacacacacaaaaaaaattgctcacaaatataatcaaaataacaaataatacacaaaaaaaaagtctaaaaataaaatataagtgtgaaaactaattttgaaccctgtgaaacctatttctaccatataaaaaaccataacaaaacttataaactcatacaaaatcataaca

SEQ ID NO: 336848 - DNA, 517 bp, Cannabis indica
gtttgattttattcaaattagttcaatttgattgggacataaatacatacaaccaacgagttatctatgaatgatattgatttatacattactctaattcaaaggttttttcattctttagaaaattgtggaagacttattcattagaatgcaacaaaataataaaataagtaaagattaatttctttcaactccattttattaatacaaccaaacgtaatcttaatgttcaatgagaaattgaaatctgaagaatgaataacaaatttaattagaagaaatgtgggaaatagaatctagagatttttacattgaccatctaaaggtggatctaattgtcaaaaatgaagttagttgtttttaataccgcctaactcttttaaataccacttggccctttttttataccacttgacacttttttttttttttttgtctattttacaattttgtatacattatattaattaattacaaaatatatgcaaaaaaaaatattatcattttctcatacatt

SEQ ID NO: 336849 - DNA, 545 bp, Cannabis indica
aaagatgcattttacagctgaacttttcttgtatggaaacttcttgtaagagaagcaattctcttatggaaagttggtttttaaaggaaactttgattagtgccttttccttattgaattcgattgtgtcttgatacaatcagaacatataaattatttatggcaggaatcaagacttaatagaagattagactcgattatagcaagtttccttttttggtctgatttgctatgtcagatcgtgattctaatgctacagatcgtgtttatcttaggaaagttttgtacagctgtagacttgatcttgtggctgtctataggatttctatgttctataaataggaccgacagagcagccatttgaattagctcttccattattcattttttatttttgtcatgagagtttcttcgttatgtgagaacttagttgttcatctaggttctagtattttatattacagttcttactcagtcatagagtttgttagaacgacttgactgaataagagagtggtcttcgggagaagacttgttgaagcctt

SEQ ID NO: 336850 - DNA, 698 bp, Cannabis indica
ttgcacagcttacccggtatttccccttacggatcacgggactactactgtcacaatcaccttaagaccgcttagtttaaatttggaaattagcagataattagtgtttaattatgaaaattatttatggatatttaaataattatttatgttgatttatttgaattcagaatgcatttttatgtcatatagtgaaattttataattttgcattttcggtgcccggcaacatggaacgcggtgtatggctcagtagaatcacaatttaatattttagtatagtagggcggtattgttagacaatgggaatgtcgggtttagtcatgagctagaaatgactattttaccctttgatctttttattaattagttaagtggggaagggtattttagtcatttacccttttgttttgtggctgaattttaaggcggcaactggccacaaatttggtgattaaacctaagtaatagtttgatcttcatattttttgaggaataataaaaaatgaaaaaaagagtgaatttgagagaaaccttttctctctttctcttgttctaagccctaggaaccagcagcttgtggggtgtttttcttggtgaaatctgagttaaagatccattgttagtgacccaattcaaggtagaactcttggactcaatctcatttatttcttgagcttcaagtaatgaaattttgc

SEQ ID NO: 336851 - DNA, 574 bp, Cannabis indica
tatataattaatgtgattttaatttttttatgtgaatcctccaccaccactaaattaggaacaaatgtatgctgcaatacaagagaccatacgataacaatgagatcaaattagaaaattgagagagcagcaagtttggcttgcttctaatcttattcctctggcacctctggttgtgccgcaggacgtgggaaatcatttggagtcgttttatgagtggtttagaaagcagaacctgccagtgtttgagggtggtgctaacccacttaaagcgaagcagtagattaacatgataatgtctatctttgactttatgcgagtcgaggggtaacgatcaggttgggtgtgccatattcatgctataagagcatgctcgtatatggtggaaaatcgtgtctcaaggtcatgatcttaataacatgacttgggatacatttcaaactttattttatgaaaagtattacaatgaatccattcgtgctgctaagaccaaagagttcatacgactgactcagggcagcatgacagtgacaaagtatgctactgtaacgccccaatattttgccttatttta

SEQ ID NO: 336852 - DNA, 1769 bp, Cannabis indica
aactcatttccttctggtttgataaaattatctccagggattgggactgcttttttctggtagcaatatcccactctggttcaagagtttatcatccagaagctttagagttgagtttcctatagaattggccatccaatataaacaaaatccctcaaaacccacctccaaattagagctaaacgatgctagggctagggaacacaccgtgagaacccaacaggaagatatttctagtcaccacatgcgcttcttgcaagaaatatccaaaggcagacaccggttcttgctagaagcagcctggccagaaccacccaacgtgtcctttattcctgtggcaaagcctttgtttttacccaacgtcacgattgcttttgaaccaggagacttggatttcgagattatgcctcccaaaccacgtacgtccaaaactccttaagatcccagcgtcaccttcgaggctgagttaatagaatcaaaggtgcaatctatctcaggctacacaggcgacatgttgaagacctgtggaattgcacttgggcaatcatgtcaggttaggtcagaacgagagggtgaattcagttgctaccccctgcacacttttctagtagtaacccaggaactagtggtgagaccagtattagtggttcaactagtatgggctcttggagccttgagcatatttgtgcaggggccatcctccctcttcgggactttttcaaggattacataaatcacatcggggttgccccattccagctgaatcccatttcttacaggattcttgctagtttgaaagtcttatacaaaattatgaattaaggttgtcccacacctgtagagattgagtacctttactcagttaaatttgttccatcgaggaagaacgctgcagggggctttttctatcttgacactcatgcacaaccacatttcgcaaactccgtaagtgattgttctcttctttcttatttacattagtcttccttgttttagtacttgactaatgtgttgtttattttgacaactcttctgacgagacctacccctaacccccgagatggttagtaggcacaggcgcttgatgacgaagtaaacttgcgatcggcgggccttctcgctgacaaagaatacacttgcgattacaagattcccaagtatacttcttcgcagcaaataattgttccacccgaagaccaggcctgagatcgcttggcccaagcacaataccttcaaagcactgcccctcgggaatccagtgaaggagcatcccgaggtaatcaatgtggctggtcacctactgtacttagggctgagcgtaatacattagttactttctaagactcccgtcttaattgttatacttggaattccattctcgtgggccgcattgctcataagtttgacagttggtaccctagattccatgttcagatcaactgtcacgagtcattttatggtatagccgagcaatatggtaccatggaagattggacaggtcacatagatgcgaactgggacttagaaccaatcgagccttttgatatattcaaaattacaggctgtagggattttagcgagtattatggtccttttaccccctcatctagtgatagctcgccttctagcgatttcggtaaatcccttaggtggaaatttatactcctcccctttgtaatcgtctcttataatgattgtaacgcctcatctcgttttgcagacatgggttacgaagacatcctggatcgtaaggggaagaaaaggtcatc

SEQ ID NO: 336853 - DNA, 1109 bp, Cannabis indica
ttttagtttagttgagttttagcttaactcgggggcgagtaaagatgtccaacctccacaagctaaatttcctatgaaccctcttcttgaagccttaagagcagttctcgcttaacagatggatcctgccactcgatagagttatcatttttagatctttcatctgcctgagtttgagagtggactagatcccatggtagctaaaaggtggttggggaagataaagaaaaaattcaacacaataggaatacctgaggaataccaagttatttttgttgtgtcaagttacagagtggtgcagcagaatggtgggagaccttgtccaggagaatagaaactgatgggatgacttggtgagattttgagaaagttttcaggaagcaatattttagtccatctcacaggagggctctaattggagtatttgatggtttaagagaacgggatatgactgtgaatgagttttacatgaagtttatagagttatcctcatatacatatcctggtgttgttgacaaacccatggtgattgaacagttcatgcatcatttgaggcctgtgatacgtggtccaatagcccctttgacctttaacaacctaactgagtgtgtgatagcaaccttatgaattgaggctcatgtagaagggaatgagaagaagaatacaagcataggaaaaggaaatgactgaaagatgactaagaagaatcaagggcagtggtcctaaggacaataatttagtgggggtagcactagtatagtggttcatctagaaacactcgtagtggaccatacaggtgtttctgttgtggtcaacaaggttataagaagaaagattgcacacaacaacaacaacaacaaagatttcaagtatctcatagaggacctataaggagctatgtagagtctactctttttcatggacagcccaggaccaaccagtctcagtcttcctcctatgatttcacaccccaatcaggccaacaatctcagtatcaacatcaatttaggtgacaaggttcagggttcaacatggggtactcacaaggtttccaaactcctactcctagtgggagtcaaagagggtacaatcaaggtggagggtttggt

SEQ ID NO: 336854 - DNA, 764 bp, Cannabis indica
atctaattgattcaaataacaaaatcttttgtttagaagtgatctagcgttaccaaaggtaagacaatttatgagtcttgtctggaatcctagatgaattgaaggcgatgattgtgtagtaattttgagattatgtaggcgtgggactacctatgttagcaagaagcatcttgtgtttggtagccaaccatgaaggaactctatggttgagtgtccttgatttagggtgatttcatttaggaaatttccccatgaagtgtggacattaccgggataacgtataaaagaacgtcaagaagactagtggtatcactaaagtaaagaagattacttaaattacttaaagtgttacggtaatgatggagagtacttcataattgactggatagtcaataaggtatatgttatcccagtttttgcactctgacgtggcatcacgtgaatggtgacacatggagtccacttggaacatctgctcgggaagataagtcaagcaggatgcctcgctggtatgcttagagtaagatattcaactttcccatcatgagtcatcagcacaatccctataactcagggatcaatttacgtggatatggcatacacacgatcccactgtcagtgtattcagcctcaatcccacgatccttgtattcagcattcatcccacgatctttctatttatacgcattgtaacgagagcggaaactcttcctcctcaagcttcctagccctataaatagtgatacatgttcactgggcaaggg

SEQ ID NO: 336855 - DNA, 724 bp, Cannabis indica
aagtactacggtaacaaacatatatttttcgatcaataaatgaataaacatgtttatttcaaaattcaaattaatcgaatttactagcatgttgttaatttaccatccagtgcatacaaaaggtttcgtcgaacccaaaaccccgaacagacaaaagagcatacttgcaaagaattataagtgaccaagagtcataagtctgctcggtcacttggggggcacctatatctgtacaaagaatttggtaaaaaataaaacaaacatagttgcacgatgattataaacagaggatcaaattcattaaagataacaaaagcacgaaaatcgggattagaggctgcccggttagcccgttgtttgaaaaatgaaaaataattccaagtttaaagaccgcttggccggtcactttgtcttaaaaaaggccttatggccggacaaatataaaaaagattaaaaaaataagtattcagacggctggagtcccaggcactttgtacgggtcttctgggctggtaggagctggaggatctattgtctaagcgagtggcatgtccacgttttggccagaggtagaagtggtcacctcggattctccataagccacctgagaagtgcaatactcgagaaacatgtccttggaatcgcccaagtaatcgaagtttgcattgggattagccttccagaagtcataaaaaatctcgagacctgttgtctctaaggcatt

SEQ ID NO: 336856 - DNA, 638 bp, Cannabis indica
aaaataataaaatcaacaccaagatatatacaagatcaagtctgataaattaatgtaatttatggctctactcctgttttggaacaccaccaaaattctctttattgattgagcaagaacaggtacaatacagtagagataattctttgattagttctctctaagtgtttcaactctcacactcttactcaagaatcttcttcatctacagaagattcttcatgcaaaatccaaacccaatctctctcttttctctatatatttctctctatctcaaaactcaatcgatctgatcgttgtgtctaaaatgataagtattggtggtatttatatacttagaatcaagatcctatagtcaatagctacaagaagcgagagtgttaagttagttaggcaataaccaactatcttttgagcgagatctccacgctatacgtatgagtgtttttgggagggtatatgagggctttcaaaatcatgggccaagacactcactgaaggaactttctgaataggaaagagctagttggagttgactatccgaaaatcctttctaggaacaacgattggccattcagaactcctttctggaggaaggctagctttcccaaggacctttctcggaaggacaagaaagc

SEQ ID NO: 336857 - DNA, 595 bp, Cannabis indica
gcttttgaattgtgcgagcagatcacgtattttgcttagataagctatcatcttttctccctgagctttgtactcccagatacatgatttacctttagttgtgagtcattgcagattcaatgtgtttggcatgcaaatcccgagcaagttttaggtcgaaaataagggcttcatattgagtttcattgttggatgcttgaaacccgaatttgactgctctgtgcagatgttgcccctgaggtgtgacaagggcgatccctacgatgaacaagttatccgtggccgacccatctacatgtaacttcctggttggtttgtcttttttgttgttcggttgaggttcttatactagctcagggttgttttttgaagtgttatcttctttaccgtacattcaaccacaaagtctgctaaggcctgtcccttaatcgtctattcaggtactgaaagatgatttcatacttgcccaactccactggccatttgagcaaccatccagaggcgtcaggtttatgcagtacttggcgtaatggttgattagtgtacacccgaacaagatgagcctgaaagtaaggccttagctttcttgttgcta

SEQ ID NO: 336858 - DNA, 520 bp, Cannabis indica
cactccaggttcatgttgattttaagcattcgtcccttgtgccatcttggtttcggctgcatcatgttctaattcagcgttccgccactgcgcctcttccagattacgtcttaggcaacagttttccatttcataagtaccttctcccgtaggctgggcacccacatgattgggcccttcatccctcgtcccagggttctggccactcccacgctaagttctcctcgagcgtgttgtccgtgtactaggaccaacgttaggttgggttctccgtgaacgtgtggtctaagtgctaaggccaccctcaggttgagtcctcctggagcgggtggtccatcgagactgtgggttggtagaccttctggagcccatgggttctttccaacaacgatgatgagtttcctcatgtggtgtattaacatttctggattttctgccatgaatgagagagtttttttttagaaggaaggagggttttttctgagctttttcacagaggcaaactgttaacgcatatttt

SEQ ID NO: 336859 - DNA, 614 bp, Cannabis indica
ttgaatttaagtttaggttgagtttgtgcttttgtgatttagtggctgttagggttaggttgagttgtagttcgaattctaagcttaatttgagttagttttaagttctagtagctgattttggtggttgggttaggttttgtgcaagtttaagatttgagttcaaagctttgatctctaatggcataatttgtttcaatgagtttttgtgtgaattactggttggaatatgttgtgtataccctaattaggtactctggaaggtttggttgtatttcgtggaggattgagcaagatatgaaaaatttggggtgaactggtgcaaactagctagccgatattaccagacgtctaaaatcggctagtcagttttggcagggtccccaaatgcttcgttttctcaatttttgtccattttagtgccgtggtttggtgcttccctatttacagagtttgtgtaacccctagaatgtataacagaacctagagttgtggctttgggtttcctgggattaaggttttaatcatgtgacttacccgatttcataatgtgattagggcatccatctagcatgagactttctgttcaggtcggccagcacacttgaatctgg

SEQ ID NO: 336860 - DNA, 646 bp, Cannabis indica
gtggattcggtctttgtctttttgaattgacggctgtgagttgatcgccaatataattgaattacaactgtcttactttgatataatcctaggaatggatattctgtctaaacatggggcaacgattaactataagcggaagatggtggtgtttgagcccaatagtgctaacccaacggtgttcgtgggtaagattcagggggcacgcataccgacaataacattgttgaaagctaaggacctaatgggcagaggttgtctggggttcatagtcactacagtggacacgggctaacctgtgacatcagggcctgagaatacgaaattggtatgcgagttcctcgatgtctttccagaacacttgccgggattgccacctacccgtgaaattgaatttgttattgaattggttccgggagtggatccaatatctaaagcagcgtaccgaatggctctaagagagttgaaggaattgaagatacaattacaagaattaccaaatctgggattcattagaccgatttattcaccttggggtgcttgggtattgtttgtgaagaagaaagatggaaccctgcgaatgtgtattgattatcgggagttgaacaagcttaccattacgaataagtatcctttgcctcgaatt

SEQ ID NO: 336861 - DNA, 532 bp, Cannabis indica
ttttatcaattccaaatctttcttttgtgcttcttttttttttgaatggaaaatgtaaaacttcattaaccaacaaactccgtcaccaaacaaggtaacaaatcagtaggaacagactccatactgaaggtacgatcaggatacaacttagaggctctagcaaagctatgagccactgaattagcagatcgtttaacaaaaataacctcaacggtactcaaatccgcaagcaaatttttacaactttgaatgacttgaccaaacaaagaaatcatacaaatagaactccgtaatgcttgcacaaccccaagacaatcactctccacagtcacatgatgccattgcttcaatttgatccaagtgagagcttccttgacagagatagcttctgcaaggattggttccaccatgttcattgccaagatggttcggccctcaattaaccaacctcggtcatcacgcgctaccatacccgacccaaaagaccgcccatcatcaaataaagctgcgtctacattaaccttaatactat

SEQ ID NO: 336862 - DNA, 967 bp, Cannabis indica
gcaatatatatttactttttgaagtttttgttatgttttttttttaattcttgatgttctatattttcaaatttcaaaaaagatcaatcattgaaaaattcttctccaatggatactttgcagcaaaattattaggtaattttttctcttcctatgaaagattatattacttttatttttatttggtttttaataacaaatttttttgtcaaagtttttaattacaaattaagtattaagtttttctctaatagattttttggtaacaaagtccactcatagttttgaagtttttgatatattaattttatttctttttaattcttgatgttgattattttcactacttagttgttgaccgaggttttcggcaaccaagttaataacatataagaaagctgtaggaagtttaatgcatgagatttacgtggttggggcattaatgagccttagtccacgagtcttttgtatttatgagagtatttattacagagaatgttcttggtagtttttctctctttggttcttatgaaacccagaattctcgacccctgccttaatgtgtttggggggtatttataatatttttgtgtggtgatccctagaaccgagctacatgtctttctgtatttttttagtaggggcacacattcccaacaaatataaaatgggaaatacatggtttataccctagatatcctagggattaggtggatataatcctctatcccttcttgactgatgtgatccctcataaagtagccgtcactaggcttattaatcatagcgtaatagctgcagaaggggagttacaccgtcagacttaatacttatggcagttccaatacgccttctcccatgcggcattaaatgcaatgtgactgttcagatggggtctgatacctcccggaggtgctttgctatagctttgccctctgggagtacgtggatgttggaaattatttta

SEQ ID NO: 336863 - DNA, 949 bp, Cannabis indica
tccagtttttgttgattgttttcccattcccaatcgagtactcgccattctaggttgaatactcgcacttgtcattattcataaaattctctttcatattaataaaataatataatttggtgttgcgaaattcactcgacaacaggaaggttgttgaaatggtcagtagagctaagcctgttcgacatcaagtataaaccaagatctgcgatcaaggggtaggccttggcagatttcattctcgagtttccaagtactgaagtggcactcgtagaagaaaaaaatgatactgatataccaaatggagaaggatggactttgtacgtcgacgaggcttctaatagcgaagactccggtggtggaatcatacttatcagtccaaacaattttaaggtacacgctgctttacgatttgaattttttgcatctaacaatgaagctgagtatgaggctttgatcacaggattaaagctcgcccttgaaatgaagataaaatacttacaggcttttagcgactcccaaatcgtcgtatgccaggtaaacggagaatatctggccagaggcaggcgtttggctaggtacctcgccatagtatgctagttgttgcagaaattcaagaaagtggttgtctcccgagtaccgcgtgctcataactcacatgcagacgctttggcccgcttggcctcaactagagaagctgaactgctcgatgtgattcctgtcgatttgctaaccgacctgacggtgagtcgagatgaagtgatagagatagatgttgccagagaagttacttggatgactccgatagtgacttacttggaaaaggatatcttgcccgatgacaaaatagaagcgagaaaactgcgacatcgagctgcccgatatgtcatctacgatggaagattatatcgcagaagcttcagtcagccgctactcaaatgcattgacg

SEQ ID NO: 336864 - DNA, 729 bp, Cannabis indica
ctacatattcctagactttatttcttttcaaggaattcatttctgaatccatgccggctaaccattctttttgttatggacatgccactgcctatttatagtttaatggattgtcatcaataccgtcaacaatgaccatattaatttcaccatccaagccataacgagctggttttgtagaaaccttcccactacgacgaggatttgtgaccttctgaataggaacatcagtggtagttttctgagttgtatcaacttgcattggttcaactaagggagtggaatcatcctctattgagtagaagatgatggaacattagttagagttatatttgaaaacatttcctccattactactttgctttgcggcttgaatttcttaatatagtcatcttcaaggaatgtgacatttgtagaaataaacactttattatccttgtgactataaaatagtccaccctcagtctccttataatttttgacaaacatacaaaccttagttcgcgcttctagcttggcttctttctttattaagacatgagcagcgcacccaaagattctataatagcgtaaactaggtatacaacaattccatagttctacaggtgtcttggggactgatttagatggaacaacatttaaaatatcattttctatcagaatagcgtatcctcagaaggatgttgacagagttgaatagcttaacatagacctaaccatttccaaaag

SEQ ID NO: 336865 - DNA, 613 bp, Cannabis indica
ctagtatatattgaaaaaaaaaaagaataatttgtgccataaatatctaagtttaaggtatttaaccgttaagtgtcgagtcaactaccacatgacaattcttattagtccaagccaataaatttttatttttatttaaaaaataatttaaatatacaataagaaaataacacgtagataatgacttaacacttaacgatcagatacctacgaaagttctagaaatataatttacgtattattactgtcaaaaattaaacttaaatattaatctgcaactgagaattaaatttaagtatttatgcagcaaattatttaaaaaaaaaattacttaaaattttagtgtaaattcacttatagataacttacgtaatatgcaagagagacattttatatttttattttaatcataaatttaataatatattttgaaatatttatcacttatatatgatacaattcggcccccatatttgcaccaataactattattattaaattatttaagaatttacccttacctattttaatactcacaatttaggtatttcttttttataggtataccaatgtatatttattgtttctctctcctaaactctgccttcatgct

SEQ ID NO: 336866 - DNA, 1427 bp, Cannabis indica
gaactgaatccaaactcagatcgggatttgaacttgggacccggacccaacctacaccaagacccaggacacgaacccacaaacggagactgattctgacccagacccaaacctagacacgaacccaaacaaagatcgcaaatggaactagaagcaacctaggactaggagcagaaccaggacctaaacccaaacccgaacccaaattaaaacccagacagagacctaaatctgaaccgagagtaggattcgaacacgaacctagaacgagactaggacccagaatcaggatatggacctgggaaacagaactaggactgggacctagaaccctacccagacccgaacttgagcctaggacccagctcgtgacccggcaccagaaatggaaccagactaggacccgagtttgggatccggatctggaccgagggcttggacaaaacccatagttagtgtctggatttgggacctagcgcccgaaccctgacaaggacccgaaccaacacccggacctgaacccagtcccaaacccccgaacccgtaccctgtgacccaaaattggaaccaaaaccggaagttgaccgggcctggaactaggacttggacttggaatcataactaaaattggaccaagatccagaacagtaaccggaacaggacacggactccaaattcgacctagacccgaattgggagccggacccggaacccaacccaaacatgaactcgggacccgaacccgaacatgaactcagacccaaaaatggaaccaaactagcgacacagaaccagggtcgggacatagaactgcaccccagtctcgatcctaaacccaaactcagaaatgggacctgggccctagaaaaagactaggacaatgactaggacccggacccaaacctagaaccgagcacagacctagcctcaaacccaaactgagactggaactcgggccaagacacggtcgtgtacccagaccgaaactgagacccggacgtggacctaaatctgggaccgtatcccaaacccggacatggaccttgataggcatccgcatacgaaccaagactcggagcaagacccaaactgggatcgaaatgcttcacctagatctgggccaagatcctgacccagacccaaactttcacccgcacttgggaccgaaacttggacctagaccagaacctagacccaaattagggtccacacctggacaaaaacccagacacagactcggacccgaactcaaacccacacctagaatgagacccaaagctagacccggacccggacccaaactcgaacccagaccaggatcagaatcaaggacttagacccaaaattcaatccaaactcaaatcggtattggaacttgggactcggaccgaacctagacaatgtcccaggaggcgaacccacacccg

SEQ ID NO: 336867 - DNA, 726 bp, Cannabis indica
tggctcaaaaactatagttttcaaggtattatgttaattttcgttgctgtagttgttgttattgtttaatgttgttttctggggttactttatggtgaaacatggtgagtggagcaggttttaatgcttgtaggtgagctttagccaagtttgagttttgaactcaaagcttggagctcacatggtgatttttgattctgtgatttctgggttgttttgatgctttggaaattttagtggggtatttagaacaggtctagaagttttggtgtgaattggggttgatttgaatgagttatgaagttttggatgtttcctgcactgaaccggaattccggttcagggaagcctccagcaacttgtctaccggttggggtttccaggaattcccataaccggtctaccggttggggaaaaattgggaaccctagttcttcccatttttatgttgtttagcgtattgccatgctttttatcgatagggaaacttctagtttctagtttaagtccccaggaagtgatttagcgtatcacttatcagtgttgtgattgttatggtttaggagcctgtaaatcgccatgtagttcgttccactcaggttgactggcacacctgaattcgtaatcgaggtaagattagtatacttcgtaccatccgacagtatcacatcggtaccgctagagtatgactagcaactggagtatgaccaatgtaccgagtatagg

SEQ ID NO: 336868 - DNA, 740 bp, Cannabis indica
ttaacttagtaaatattttacaaaaaaaaattaatgaaaagactgaatacaataaattaactaataaaaataataaaaatatatttattatatattaattttttaaaaaaatatttattttttatataaaatgtggctatataacggaattcttaatttaacgaattttttaattttctacgttaacattaacataatatctcaattatataacagaatattctttattaattttataatattattatttaaaaataaaaattatggagatatttaaatataaaattaattttattatatatatttaaaaataaaaattacatttatctataattacatctatatataaaaaaatatatatttaattatttgtacatattattataaccgcactctcttaactacaaattaagaattctcgtagccacaggcctagtgaaaaggaaaataatcacggattccacttgctcaatctgccgacaagcatgggaaactgtggggcatgctctctttggataaaaatatgcaaaagttgtatggagaaattctggtttcaactttgattggtataaagcctcatcaatgcataaaggggattacttggttcatctttcgagtattcactccaaggctaaaatggagcaaataatatgcacgctatggtcaatttggacgaaaaggaaccgagttgttatagtgagatttctctcacttagaaactcgagaccagactcctcttt

SEQ ID NO: 336869 - DNA, 1465 bp, Cannabis indica
tttttattgtcgcagatagactggctcgacctacacttgacgcgactcgcagagaaactgctgaagttcttggaagccttcctgtaaaaatcgtgactggcgattactgtgcacgacctcaaagctgcgagaacacaagctgattccaaagaatgcaagacttctaagggagcaagtgtacaaggagccgtctgagaagcaacaagagcggatagacaaacacctttcctagcaaacttctcggccaacgtcaggtgacatatcgcatgttataaactagtgccttgaaatttatttatacttatctttatttgccctcgcagagatgacttttttgaagtccgcactggtccttaattgcaagccaaaaacttgaacagcgacgatatctcccatcgttcctcagaagagaaagagcgatgtggtggtcacccctatcgcggattcctctaagaagccaactaagggcacacaagacaaggggaagaaagtcgtgatcgatccggctatccgagctcgcaacatcttgactctccaagagaagttcgtgggcaatgaatttatatcaaaggtcgacaagacccctgctgaagagcttctgcctcgttctgcggagttggcttcacagtttattgccatcttttcgagggcctttgtcactggatctaaggaagttgaacttgtgaagagacagaatgttcgtcttcagtaggacatcaagaagctgaaacaagatgcgacttccaaggacaaacacctcgaggaactttgcaaggccaaggagcaagtcgagctcgaagccaagagcactcagatgaaggtctaggagatgtctcgtgacttagaggttgagaaggagaatgggaagaagccgtatgaccggcggtctctgactatatttataccactctttccaaaattccggactttgacttctcaatcctcagagcagaagccgctgagatggctgaggctttctacgccatgtcacctatgcagactcaaggcggtggagggaatctgattcctgaggaagctgatgccgcggacaatgaggaagtcgtggacgaggctatcagcaaagtcgcggatggatctgcccgtgctgctcccaatgtttaactttttcttttattttaatatttacttgtgttagactctctttttttttatatatgcggtacaagggtactcgcgctttgtacttgaacaaatttacgtttatgtttcttttgaacgactttatatcctctcggggatatctatctataacattctcgcagtacacgggtactcgcattttttgctatttataatatcttgactgcgaccttaactacagcttggtgtaataagtattaaggtagaaaatttcagaaacttgaaaaattacataactttcgtaaactttccataactttactaatcaatagtacatattgttggaaattattttacgaggatc

SEQ ID NO: 336870 - DNA, 819 bp, Cannabis indica
ccctccattctataaactgatgtttttgctcgtcgaatgcaaagtttatagctacacggagatcctcctgatcaaggtgcaaagcgttattatgaccttgcattagctcaagggctgctcgaaggttttggatttcagtatcatctccaactggcctctgaacattagtggtagacgggacctcagtgttgggagtggattgatcggctgctgaactagtgttcccaatctcttgcacgcctggtgtgatcccagccagaggggaggtcactccatggcccacagtaggtgattatgtattgacctgctcggggtctatccctggtggtcctctcatgtttccaggggtctgcacgttgggatctgtcaccatcgagtcaccctgatcatgaaggcctctacgagtttgtacaacctcatgtatgcctgtcaaaacttaagacaaaaaacttgggtttttgctctcaatgaaagtaccaaaatattgacctcgcttttagccaacgacagtgggtcaattaataagcgattaataatatacttaaaagagaacaaaaacaataaagtaaaaagaacaccagattttaaagaggttcgaccccgtgagtgtagtaatagcctactccccttgtattgtattaacttaagagaaagaacaaagtgtttttcctctttgaaagctctcacaatcaatctttcagtaattctcttagatcgttattttctttctagaatctctctctgaagcaattctttcaatccccttcatagtgaggctaggccactatttataggggcttaatgcatgagggatgattt

SEQ ID NO: 336871 - DNA, 502 bp, Cannabis indica
ctcaagccactcctactgctgaaaacacccctgccgcctcgaacatggctggtaacatcattcctcaaccctcttttgattggattcttgatagtggtgccacccaccatatgtgctcaaacatttcatgctttaaatctttcactaatacatcattccctaaacatgtcatcttgcctactggtagtttagttcaagttaaaaacattggcacagttcatataaatgattctttatttctgcataatgttttatatgtgcctcattttaaaatcaatcttttatccatcaatgacttagtctccaccacaccctacaatgttctttttaagactaattcttgtcttatacaggatccttctcggaaggtggtgattgggatagctaagaaatatgacaaactatatctcttacctcaagatcagcccattgctgcagctactagtcaatcccatttcgatttgtacacatcaaatgtaaaccaatggcacaatcgccttgg

SEQ ID NO: 336872 - DNA, 708 bp, Cannabis indica
cgaacacaaacacaaacatagacacggaccgggacccaagatctgaatcagaacgagactgggacccaagattgggatccagatcttgacccacgacccacgacttggacctaacccgtagtcggtgtctagattttcgaatagtaccaagaccccaacctggaaccatttctagaccaggatccaaaaacaaactcgtacccgggacccaaaatcagaataagagccgaaattaggaccttggaacatgaattggacctcaacctagaacaagatctagacgcagaaccaaacatggacccagacttagactagggatcaatacccggaccaaaacccgaacccggacctagagatgtgccaggacctgcgacctagaacctggaacccaggactcgtgacccaggacctggaccaaaacctagacccatatcagaacccaaacccggacccagaacgaggcccaaaccaagactctgacctagacccagacccggactgaaaccccaacccagaccaagacccggactcatactagaaatcagacttgaacccaggactcaaactcaaacctgggaatcggacctagaccgagatcaagaatgggacccagaccgagactaggaccgagccctaaacctggattgggactagaaccagaattgggactgggacccgggacctcggacccaagactcggacctggga

SEQ ID NO: 336873 - DNA, 666 bp, Cannabis indica
tagctatggataattttatctaaaaataacgcttgacttttaaatcaagcaagtatgaccggcaatggcacctagtctcggggtacccccccgacttccaaggaagccaagtcaaggtgccaccccgacctccaagaaggttagcttggggtaccaccccgacccccaaaagggtatctcggggtgcggctaaaaaaaaagatccaagatcaatgtttcaccaccacaaacacatttttatcaatttgatgaaaatcaaagttgggaaaatggagggaaattgaaactttttatgttcatagtgttcttcaacattcaagaacaccaccaacctaaaagtttcaaatctccttatttttcatcaaattaaaccaaatcaaagccaaagacacattgcccatcacctatactacaaaacccaagcatcaaacactcacattatatcaagaaatccaacaatcccaatcaacatgtcaaattcggccatagcaagaaaaccaagaaaaagtttcaaaaataccactaacaacgtgatttcaatgtaaaaaatgactacggaggtgttagaaatttacccatagtgaagaaatgttctaccaagtgtctaagaatcacttcaaaacttcaaaatctcctccaatggtggtaagatgtccaacccaaaaa

SEQ ID NO: 336874 - DNA, 1107 bp, Cannabis indica
gaaattgaattttgataagaaaaaataatccgcatgtgcaaaaatatgtcaaggtcgatcaaaagaaaaggggcaataaaaaccaagatttactaccaccaccagtagattgacatctgcaagtcattattggaggatcgcacatagctagagattcaggcaaagcccaagaaaggtatgcccgaacagtacaacatgagcaagaaaaagtagttttggccctcgaagaaagggaaccgaaaataccacgggcaggggagcccaccataacatttagtgatgaatacgctatcaagattagtttcccgcacaacgacccgttagtcgtggaagtccagatagccaacaagatggtggcccgaaccatgatagacaatggagtctctgcaaacatcttattcaagacaccatatgaaaagatggagctccaactcaaagacttaaccccctgtctccagcccatgtatggtttctccggtcaaagtgttgcacctctagggcaaattcgcctacccctcactgttgggcaagcttcgaagagcataactaccataatttttagtgttagacgttccattagcgtttaatgtcatgttaggccgaccatctttatatgacttgaaggctgttacgtcgatattctattcatgccttaagttcccaataaagaattgggtggggtgcctaagaggaaaccgggaagttgctcgggaatgttacaaccttaccctaactaaggctaaaatggaggtatcctctagctaaagtacggggaagggaaaaacattacgaaatagggaaccgcctaaggcggggatgaagatgtggatcctcgacttggggacccaaacaacaatgttggaccagtggaagaactagaagagattgaaatcgacccaaatattctgaccaaaaagctaaaaatttgaaaggttttgttgctcgaagtaaaatcaacattgataaaatttctgagagcaaacctagacatttttgcttggtcgcatgaggatatggtcggaattgatccttctataatttcacatatcctgaatattgatccaaacttctggccagttcacaaaaacgaagactattggacaagga

SEQ ID NO: 336875 - DNA, 581 bp, Cannabis indica
attcttctttaaataataccatatttccaatttcaatcttataaatgccaaaagtatttacttaataattacaattaattattaaataaaatttccatttatattatttattaattagaccatataaagtctctcaattaataaatagaccccaaaacatcttttgtttacaattaagccattgcttagtgaaaattcataaataagaaagtctaattttagaattataattgattaatcaaaatcaattagttgggtgtgcaagcagtattatcttaactagtgaggggaccatgggcctatataatcgagcttccaacaagtagatctagaattcaccatgtaaattccttaacttattaatttcgccttgtaccactatagatttggaattgaatactctcaattatatagaatgctctatatgtaccaagatatagatacattatgattattcgttacaatcctaatagtcaaggatcttttatagatgatctacattgaatagggacaaatttactgttctacccttcactgtattttatccttaaagcatttagctacctataaatgatacttca

SEQ ID NO: 336876 - DNA, 931 bp, Cannabis indica
ctctacccccaaagctgctaagtccaaggagtctggaccatcgaaggttgggtctgaactggtcaggagtgatcctgaacgagtgcgaacacctacttcacctttgccggtgcttcgaaaggccaggaagggtaaggagatgctggcccattatatgaatcggctggttcctgagggcagtgaacaactggccggtgctgacaatgactcttctttggaatttctggtgggcggagtctttaaggagttcaccagggtaagtctttcttgatacttccatttaatcttccgtacttagctcaaatgctaaagtttttttcttgtgcaggccggtctgaagttggcctacacttactcccaagctaagtttgctgcttctaggaacacggctatgtccgacaccatgagggtggaggcagacttggcaaagaaggatgctaaagaagccagggcggaagtcggagctgttcgattggagctgggtcaagccaacaagaagctgtttgctgctcagaagaagattactgagctgactaaggatcttgaggttgctaaccgttttggggagaccatcgagaccttatctgctaaggtaaacagtctacaggattagaggacttcccttcgagcagttcttcatcggatgaaggagaagaaggaagccaaggaggagaagctttcaggcgaggtggccaggttgaaggagaaggtcaatgcctgggagacagccggtcttgagctcttctttgatttttggaaggctaaccctcaggccaattttgactacttgggtgatgctaaggacatgtacctcgagttatgcgcgtcccaagtggcctatgacgaaactgaggtggctgcttcaacctccagtcagactgctgatgtacctcctgttcaagcaatagatcctcctactccgattggccca

SEQ ID NO: 336877 - DNA, 611 bp, Cannabis indica
acatatcttgggctaacaattactatattcccgacattctatctcgaaatgatataaatcctcaatcttagaatctcctacttataatatgcttactttaggcaaattagacttagagttagattagtagtggtggtccgagaaagaataatcactcattgtatatttggtataaatttaagtctttgactttaagttatagattccaaatagaaattttaaatttcagtttcctagaatacactggacaatacagtatgacttccacaagttattaatatccattttctgtcaatggattcaaactgtatattaatgtatggaatatgagtttagtattctgtgaccaggatccacttggactattctaagaactctttcttgtaactagacctaagtcatcaaaagaccacaaccacattcttatacatctatgttatttcatatcttgttcatagtggttttgacaagatcattctctgcaaagagtcaatctgcctacatccacttgaaagtaagatcatctatattcgaacatatggatgtacattcaagggtggatatgagtttttgttatatttcttaacacgatcactctagattttacctta

SEQ ID NO: 336878 - DNA, 672 bp, Cannabis indica
aaaaaaaaaaatgaattgtctgcaataatatgaaaaatagggaataaatatcccaaaccaataattgaaatcgaattgttcataaattaaaacaattaattcaaaaattataaacagtagatttagagcttcatcttcaattttggactatctccacccatctgtccaaccatccgactcaactcgctaggatagcaatccaagtttaagtagttggagctggaataagaagaaaaacaaacatggttagtaggtccagaattaataacccaaggggataataattctctaaaatacatgagtttatagcatacaaagaaataccttgtttctttgctagaaacttagggcattagggtttccagtggcccttttcattgcaatagaagcattttccttttgtcttatctccaggactagcaacctttttctttttaactattttcacagcttgaacaagcttcttgctattcttccacttcttcttgttgttgggtttggaagtagagacaacgtttacctcatccttagccgccccattagcattcccaaaattaggatttttagctcctcctttctgttgtcctccaatccaattttcaaatgtctgaaggttgttgattaactcgtgaacgtcaagctccaagttgttcattgttgggttttgtgccc

SEQ ID NO: 336879 - DNA, 561 bp, Cannabis indica
attaatgaacaactaaattatttaacgtaaaaaaccaatcttataaggtgaaaataaaatatttctatgataatttttatctaaaacctaattaaaataaaacaaatatacatatgcaaaactcaatatataacaacacataatttcatgagttataagaaatttttctaaccaatgtactacaaaacataaaggcacatactaggtacatgatattttgtactctttttttactaaacatcatgcagaaactataaatgtactcggtacatgatataacgtactccactaccaccgcacaaatacatagaaaatatgaaggactgaaaagacaaaaataacctcagtccgacaacatggacccaccctctacagtactactgtagtattaactaccaccaactgtcatttgattaaatcttttttgtacttttttatttttaaattaaaaaagaaaaatgattaatggtgaagaaacttacaactggttgtcaaataaattaaaaaaacacaaaaaaaatattaaaaaataataaagtacgtaggacccactatacagta

SEQ ID NO: 336880 - DNA, 696 bp, Cannabis indica
tgatgatcttttcaacacacccaaaaatatacgtacctcaagtatattatctgttatattgataacccattggcacaaattaccacactaacatatagtgagtctcccgttgatgatgctaatccatcaacatctaagaccctcgtatatttttcccatcattactactaaggttttactccctagttgatacactactattgctcccttgcaatcatcactatcttcatacttgattaaccactctaaaacttattttacagttaattatatagctatttgtttaataaacaacctactttgtgatccaatattcaccaatcactcaaatacttgtctattaaattgcatctcaattcataagcttttctctattctgggtgagtatacctttctataattgcttaataaagtaatcttttcccagaatttcaatggtctccttatataccatattgactatccagtcaattataaagtattcttcatcattaccatatcacctttaagtaatttagataatcttctttactttagtgataccactactctttctgacgttcttttatacgttaccccggtaacgtccacacttcatgggaaaatttcctaaatgaaatcaccccaaattaaggacagtcaaccatggtgttccctcatggtaagctatcaaaacatgatgcttcttgctaacat

SEQ ID NO: 336881 - DNA, 1503 bp, Cannabis indica
tatttctcacaagaattacaagagaattgactaaggagagagctaaaatttctagagagagatgctctgaccttatggggacttttctgaatataaaaaataagctagaggagctctccttttatagggaatgaggtcctattaaaataataatcaaatattcagtgaaaataaatttaagctatttttcatcattgatggtgatctaatagtgaaatggactctagagtttggtcgtcaatttttggagcttgaatagcgtctgcgagaacttttttgggtaagatgtcgatgaaatttgtaactcccttgaggataaaatatggacctaatatattcagaatctagattagagtatgagacaataattcatagagcattgaaatagcttcaaaataaaagtttaatcgcataaatcggatcaatattgagtaagttataatcgttttattgaaggctgctctgataccaacgtccaagttgacatatgacatcaaccttgatgatgggtgagtggatgaaattttttgatgcataagttatattttgacaccacttagtcaatttctattaaagttgttcgctagttctcaaagatgttactgtttcgcaaaatcaggagactcgtaactacccgatttgtaactaagtcattttgccaaaaaagtgaaaatatgaagttgggaatttgacttgtgtgagttcatagctctcgcttactatgaaaaaatagataaactctcgggatagaataagaatcaaataagtagaatctaacgctccagatcatacgtcaacctcggcattgggtgctctttacaaagcttatgagatatcattttgatgcatgtaatgtctttgaaattgaggacgaggtatcctaccccattttttaccataacaaagagaattcctggagaaaagttcacattttagtgatagaaaccaatgcaccatgttgattgtcaacttgggcaatgggccctgcaccagtttaacctgggcactgggctcagttcttggccctttaggattctcattttctccccgactttactttaatcatcattaattttaatgacggaataaattcctagaataattttttggaagaatgactagaaatagccaaggttgacaaaatgtcaacctgggcactgtgcctagtgctaggtgttactacaagaaaactagcttttgccgacgtattgttgcgccggcaaaagtaccctaactgtgccggcaaagctttgccggtgtagttgtgcgccggcaaagattatctgggaagcttggtcggtaaaggactttttaccggcgcgtatagtaactgcgccggtaaaacttccttttaccggcgagaaataacgccggtgaaaaataagcgccggtgttaaaaaatggccttatccgccatgaacctgctatgataagcttttgccggcgcaatagtgcgccggcaaaactattaatctgactgttggcgccaatagttttttccac

SEQ ID NO: 336882 - DNA, 461 bp, Cannabis indica
acaaagtattaattttgtcaaattgtaacatacattatggagttacaaaatatgtgtagaatggtcacaaaataggagttgcaaatcctttaaattgatgatcacttgaatatgtaattctcacctatttttcactcttaaattagtaaaagatgttactaattgtttatgaattgtgaataaatgatagctattgaaaatattattgttggagaattgatttattcatttagaagatgtataaatggttcaaaatcaagtgggaatgatttgaaacactttagagaaaaattgacaaaagctgaaaaaatagttactagtaaatagttactgtttttttcagcatacaattgcatacgttttgaaagtttgagagtctttctaacagcctcaaactcctccaaatcacccaattaatccataaacgctcaatttgtgattggtaacatccaagggtttta

SEQ ID NO: 336883 - DNA, 735 bp, Cannabis indica
tcaactctatggagatgataaattgaaggttgaaattagaaaggtgtgcaagctttgtaatgatctattcaatgaatacaaatctaaatgacctactttgagtgaaagcaattcacaaatgtataatgtgtcatcatcttcttcaatacaagatcatctatctgattatgacttatatgttagaacttcatttggtgcaatgaatgaaaaatcaaagttggatctctatttagatgaccaagtgttactcatgactggtgaattctttgatatttgcaattaccggaagataacaggatccaaatatcttatgttgaacatgataatcaaagatatatttactgtgctggttagcattgttgctttagagtcttcattcaacaccgatggtagaaatgtgagtccacatcgagtgagacttcatcctactactttggaggtattggtatgtactcaaaattggttggtaattgacaaacaaggtatatttatttatctatttaagtctatacattaattaacaatatgggtgactattttattgtaaccatcatggttatatttttcttttacctataatagctggttaccaataggtaaaacttcattttttagaatcaattaattataattaattattttaagaaaataattaattgaatatttaacaagaccttttagcaattaataattaaaaatatttttttatatatatataaatccctactaaaatta

SEQ ID NO: 336884 - DNA, 1773 bp, Cannabis indica
gaatattattactttatctctttagcatggacaattatttaacattggttttattcataatgggattattatttctaagaatggtacgactatttgttctgcaaaacagagtaacaacctttatgtgcttaattcaagtgagcaattaattttaaataatgaattatatagagtagcattgcctcaaaaaaaaataagaggcaaaaggtttcaaatgatgatgaaatgtatctatggtatctacttttaggccatattgtcataaatagaattaactatttaacaaaggatggtcctttgagagaactaaaagtgggaactctttcagtatgcaaatcttgtctagaaggaaagatggctaaaagatctttttctacaaaagacaatagagccaaagaacaacttgagcttattcacactaatgtgtgcggacctatcaatattcaagtcgaggtggttatgaatactttattacttttattaacgattactcaagatgcagtcatacttacctaatggccaagaagtctgaaacttttagaaagtttaaagacttcaaagctatgactgaaaagtaatttgataaatcattaaagatacttcgatcagattgtggtagtgagtatttagattttgaattcaaagactacttgctggaagaagagatcttatccccacttacaccacctgaaacacctcaacagaacgatattacaaagagaagaaatcaaatcttgttagacatggtcggatcaatgatgtgttactcaacactgccatttcggctacctacattttgaatgtagtaccctcgaagagcataagcaacactccaatggaattatggaaggggacaaaatccagtttgaaataaatttatatttggggttgtcctgctcatgttcttaaacccaagacttagaaactttctcccaaaactgaagtgtgtatgtttgtaggatactcgaggttcctatttttatagtcatcaagacaatataatatttgtatcaataaatgctacttttcttgaacatgactatatataaaatcacaaaccacacagtcaagtggttatcaaggaaattagaaataagtagatttctaaaccatcaattttagcacctttagttgagcgaccggaagcagttaccacagttttggaaaaaggagaccctagtacatcgtcgtagtgggaggattgtgagacaacttgtccgctatgaaaataaagcacatgttcttgtctttggcatagacaaggatgatccattgacttactagcaagctatggaagaccctgattcagacaaatagaacaatgccatggatcaagaaatagattccatgcgcaccaataaagtttggaaacaggaaactccacctgaggtcattacacccataagatgtaagtggattttcaagaagaagagaaatgttgaagggaaggtagagacctttaaagatagacttgtagccaaaggctacacacatcaagaaggcgtcgactatgatgaaaccttctctcctatggaaatgcttaaatccattcagattcttctttccatagctgtcacttatgactatgagatatgaaaatggacgttaagactgcttttctaaatgatgatcttgatgaagttatttatatggaacaactagaaaagtatgtgctactaggggaatgtcaaaaggtgtgtaagttgcttaaattcatttatggattgaaacaagcctcaagatcttagaatatcacctttaataagactatta

SEQ ID NO: 336885 - DNA, 797 bp, Cannabis indica
aataggatggtaatgttccaaacacacaaaaatgagaaaaactaggattctaataaaggcccaaccggcagaccggttcccaaccggaagaccggttcctagggatcaaccggtcgaccgattgttacaggcatccctgaaccggtccaccggttcagtgtagggaaccccaaaaatatcccccacaactcaaatcgagcccaaactctaccatactctctagattacctacatatactacactaaatccatttctagcaacagaacacatcaaatagctcagaaattaaaaacacattagagagccaacttaaggtctctaacttcaagtttgagtaatctgtagcacaactagctatctcagcacaaaatcaactaaaataaacctatcttaaccccagaattcaaaccagaacctcaaatcactaaaatcatgcaattaacctatcttgaattggaccctatttctgattgaaaattctttaattgcaacaagggtagtttagtcatttaccactcccgacaaatccctaatatctccaatgcctaacaataataccccgctattgacattctaaatcatacaaaacgtgactctttaatggcccacgtcgctttccaccgttaccgaacacaagcacagaaaacgcgaaagtcacatatatagcataattaatacattttgaatttaaataaatctccataaacatgtaaatcataattaataactcaatattgcaattaaccctaatcatttaataatccaaaatattgatcttaagcggtcattacagtta

SEQ ID NO: 336886 - DNA, 546 bp, Cannabis indica
ataatcgttctttaatctgttgggtactcctagtcggcatatttgcttgtttattgttcaatattccgaccaaacactcatcttgtgtgttgtcttttttagatgaactcaggtgagtcttgggaaaacagacatcggattgaccaggacttgcttcaacttctgcacgaggatcatcctcgtctttgttctagtccaccttcctcgagcaaaggacattcttcaaaccctgtacccagccatagaatgatggctcgtacaaagaaaaccacgcgtctggctgacgcatctgatcctcaagtagctcggcacgccactttgcctagcaccgaacagtatcgagccgtccagatggagggggatcatgaaggggacgctgaggtctaggagatcgaggggtaggacgatatacgtcttggcagtccctccgaggcggaggaagaggcagaggttgaacccccaaattatggggagtacaacgaggctggggagccagtcgatgctgacggaggcgaaggaagaggcagtgttttaaggataaaatac

SEQ ID NO: 336887 - DNA, 754 bp, Cannabis indica
ggaggtttcgctgcaaatatccccataaaaattgctctttcttcattgtatttttttcctcattttctttaaaatttatagttaagccccccccttaatttttaattttttctttttggcccccctaaagttcatttctagctttgtcccgtccttggttccattatattttttggttaaatgcatacatgacgcaatatttaaaatatataacggaataaatgaagtaatcataattaatatttgcaatatgttatttattaaaattatttaaaaataaaataataatgattgatcttgtttactttattaagaaacgtaatcgaaatgcttaaattaactaaattgtattttgagttatactataatatatgaccgtagttattttataagacatataaaggacaaaattatcattttatatttaatttaaaaaataaataaatcaaattccattacctttaatggccatttcttagaatattggtgaggaaagtattctttttcttttatcttttatttaatcaagttcttcatttcttaattttaataaattaaaataaacaaatgaaagtgaataattattacataccattgattctcattgcttattagtaaacatgcaaagtattgaaatgatattctaaatgaatgatttttccactattttcgtaatgactatactctattttgaaatggaaggaaaaaccgaagatgagaaaaaaaaaattaatacttttatttaatttttttt

SEQ ID NO: 336888 - DNA, 700 bp, Cannabis indica
gacaaaagtccttaaatttaacaatctcaatagttcagggggaatttttaacagccaaaaaagttcagggggcacgatttagtacatgtcaaagttcagggagaaaaattactaattagccttttttcaattaagtagttaaattaagcatagaaattcaaatttgtgatttcattattcgttattagatcaaaattcgatggtttgatatttttaaaattaatatttatagttaaatttgcttagtaaccattcatgggtaatacccattaagaaatgttccatatatataaaatattaaatcaatcactctcttgagtttaatctttgatggtccaatttttttaaaaaaacaaataattaaatatataaattataaatattaaaaatgattgaatggatattggatgatattagattggatcagttcggttatctattggatcggatgtctcatccaacatccgatccgagccaattggattgtgtgattggtttaggatttgaaaactattttatgtttttgaaaattaaaatggtaggggtccacctaagaattcttgattggttgagtgtttttaaaaataaaatttgagtactattttgagttttaggctaaaaaatgaaaacaccatttttatgttttttgtgtttttcaaatcattgaatccaaaaactctccaattattctcttactttt

SEQ ID NO: 336889 - DNA, 256 bp, Cannabis indica
acaagaatcgccgaaccaggaccctagaacaagactaggaccgtgaccagtgttgggttttatgccctaattaaaactccaattcaatgtaatccgtattattcaatatcagtaaaggaacagaagtatatttcattcatttgtatatgttttggctcacattatcaattatttgtccatttgatttataaattcatccaaacccttttcacattattgttcttgtttattgtgtcgtcaacacagtggaaagtaa

SEQ ID NO: 336890 - DNA, 636 bp, Cannabis indica
ttttcaatgaaagatataactaacgaaacgattttaaaataaattgtcattttgaaaataactttttttatatatgtatattcttttcttctactttatttattttttcttaatcaacaggattctgtacctgttctattattactgtctgtcgttatggaaaagggtgttaataaaggagagtagaactcgactaccggatccccaactgcagacggtaaaagcttaaccacgtagacatgacaggtggcagcagcaaatattaattaaagagtccacgtgtttgtgtacaaggagtggtctcaggatcttggcagcctgtggtgctaccacgtggcagtttgggctgtattgcctcggtttcctcgaactaaaagaaaaaattaatctgaagttttaatttgacgtggcgttaaaataggggtgtgattaggttaggttaaccaagggttagttgagagttacgtgtgtgtgaatacgagttgtagttggtgatgaaggactagcgacagcgtccaccgcctcttctttcttcgacttatcaggttttgtgtggaccaccacaatttatttgtcttggaaagatttttttagtttaatttaatggttatacacaggggtgttcgcggtgcgggt

SEQ ID NO: 336891 - DNA, 661 bp, Cannabis indica
actttcaagcttgaaacatggttccttgcctttaaccacaaacccctttggctgctccatatagatgtcttcttctagatccccatgtagaaaagccgtggtcacatccatttggtcaatttccatgtcaaattgagtagctagcgataacatcaaccttatagtcttatatttcaccattggtgagaatatttctgtgaagtctatcccttctttctctgtgaacccctttgccaccaatctcgctttgaaccttaccggttcatccttggtcctccctttcttgactttgaaaagccatttgcaagataccacactcttgccatctggtctaagtacaactctccaagtcttattctttatgagagagtacatttcctccttcattgctttcaaccaagccttgtaatttctgtctttaagtgcttcttcataagattgaggctcatagatcaactttaagtttgcacataggcataggcaatactctcatcccacacattgtaactgtacttctagttaggcttaggaactcttctagctctatctcttgtaagctgatattctgtgaggtcttctcgattcctgtcttcttcatcttgaacttcatgttccacctgaactggttccacctgatttggtgcttcttaaggttccattt

SEQ ID NO: 336892 - DNA, 765 bp, Cannabis indica
atatctctgaattatgaaaaatttcaagaaactgataagagaatcaaatcacattgaccggaaataaaaaacttaacattgttagaatttctctcgataaatttgtggggctaatatgcatttatattaggagatttttttaaaaaaaattgtcatacatcgaaattaaaaagagagacaattggatttgatctctttcctagctaattaacactgatccaatatgtagttaccaagtactgcaaaaataaaatacctgaatatcttgatcactattgaatgttaacaaaacaaattaatgattcctcttaagaatgagatttatttttatttcttttggaaaagaaaaaagataaatctaagtcctaccctcataagccaagttagtaacactgatataatatatgcataggctgatgagtgatgagaacaaaattgagacaatagatgtccaagacaaagagaataacccaagctaagaaccatcgaaaacacagtttatataaaattcaagaccaccaaccaaaaacaagaaaccaaaagtagatccacttcgtatccaaggcctagagaaagctttaaaccgtgttgaaaaaccaaagaacataacataacaataatgcaatcaaaatcaacgaaacaaataactaaattaaacatattacaaactgaaacaaaagcatagaactatatgattgtaactgaagcagcacatatttgaaacacatttagaacccaaagtttacagccaaaagatttttatca

SEQ ID NO: 336893 - DNA, 804 bp, Cannabis indica
aaaaacaacaagtcaaaattaaacttcataatttaagccagtttgatcaatgacaaagctcaccaactgcatgtgtttagatctcaattgtgacatagttctatccaacaaggtgaaggtcaggatggtgaccttcggcttcagcaacatcacctacaaggcttgaataattctaatcctttagtgaagctcttcaatttgcattaaattcaatttactttaccattttcatttttttcttccaatcctctgtaatctaaaatcaaatttaaagataaattaacaaaaaaaatatattacaaatatccaaattcaaactctatttgacaaaccagataatttaagaaatgatctctagaacataagcacaatattgatgtataattaaatagaataaatagaaaaacaatgttgatgtttattgataatattaatgtaaactttgttttctcccttatgaaacataagattcttagtttatgaaacaacataatattattacaaatcataattatagtacaaacaaacaaaaaatctaagaacaaaaataaaagaaacctaataattacctgactattcccacacgatcttcccaatcagaaaaaattagtgcattctacataacagagttaacgagttattagtgtattacatttttattataaaattatgaatacatgaatgtcaatatcacaagaacaatgtatatagcctcatgttactcatgttactcagctttagctcaagtggatcatgtagtaaacgaggaacccaagtcacctatcaagcaaccaaatgtaagtt

SEQ ID NO: 336894 - DNA, 932 bp, Cannabis indica
agtccagatagccaataaaatggtggccagaaccatgatcgataatggagcttcttcaaacatcttgttcaagagtgcttacaaaaagataggactccaactcaaggatctaactccatgtctccagcctgtctatggcacagttcttaatattgaatgttcgttcaacttttaacgtaatgcttggccacccatccctatatgacttaaaggctgtcacatcaatatttcactcgtgcttgaagttcccgacaaagaatggggtagggtgtctaagagggaaccagcagtctgctcgggaatgttacaaccttgcagtggccaaggctaagaaggaagtatcctccagccaaagcccagacaagggaaaaaacatttccaagtaggaaacttcccaaggcgaggatgaatatgtggatccttgacttggggacccaagcagcaatgttggacctgtgaaagaattagaagagatcgagatcgatccagctatcccgactagaaggctaaaagttggaaagggtttgttgctcgaagtaaaatcagagttgataaaatttctgagagcaaacctagatgtttttgcctggtcacatgaggatatggtcgaattgacccttctattattttacatcttctgaatatcgatcccaacttctggccaattcaacaaaaacgaaggccattggacaaagatgaagttgaaaagctgagcaacaacaacttcatgattgaagctttttaccaggcttggatcgcgaatcccgtactagtgcccaagccaaacaagaaatggcgagtatgtattgttttcacagaccacaacaaagcatgccctaaagactgtcttccacttccaagaatcgatcagctcgtagacgcaacagcagggcatgaaatattaagcttcatggatgcttattcaggctaca

SEQ ID NO: 336895 - DNA, 530 bp, Cannabis indica
catagtgagtaagacggtggtaaccaaacccgagggagagaaagagatctaggtttagatcttgataatgctctttgacagaaggaattaagggctagagatcttgaacagaaggagtcatattattccgctgcaatcaatgtaatgttttcttaaactcttatgtgtttatttcattattttacagaattcatatttaggatgttaatagacatacttgtttgtaaatctagatcctggtaaaacattcccaacagacatgtggaacaaaattagagatgatgtttcaagtgcagctttggggttctttacaagcggtagcttgcctaaaaacttgaacgaaactgttattttcttaatcactaaaattgctatcccgactactactaaagactataggccgatagcttgttgcaacacaatttacaagtgcatctcgaagatgatatgtttcatactttcaaaagtgctccccaatattgttcaaaataatcaaggtgcgtttataaaaatagattgcttgctcataa

SEQ ID NO: 336896 - DNA, 711 bp, Cannabis indica
tttagatcttgataatgctctttgacagaaggaattaagggctagagatcttgaacagaaggagtcatattattccgctgcaatcaatgtaatgttttcttaaactcttatgtgtttatttcattattttacagaattcatatttaggatgttaatagacatacttgtttgtaaatctagatcctggtaaaacattcccaacagacatgtggaacaaaattagagatgatgtttcaagtgcagctttggggttctttacaagcggtagcttgcctaaaaacttgaacgaaactgttattttcttaatcactaaaattgctatcccgactactactaaagactataggccgatagcttgttgcaacacaatttacaagtgcatctcgaagatgatatgtttcatactttcaaaagtgctccccaatattgttcaaaataatcaaggtgcgtttattaaaaatagattgcttgctcataatatcatgatattttaagacctctttaaagggtatacaagaatgaatatttcagcaaggtgaatcatgaaaattgacctaagtaaggcttacgacacagttgattgacaatttgtagaggatcttctcaggtctctttgattcccttcttgatttataatatggataataacttgcctgaagggaactcactccatttattattaaatggtagaattcaaggaaatttcaaagg

SEQ ID NO: 336897 - DNA, 385 bp, Cannabis indica
ttacttacatagtaaataggttgctggtgcttgccctcttctcgcactatagctacactaatcgcatcttcggagatggctaaatagagaaacgacatcgttcaagttattggtttcgccaaaattggaggcattactagatgactttttatgttctggaaggcctctttacactcttttgtccactcgaactttttgctccttcgcaatacattaaaaaacagtacacacttaccagttgacttcaaaatgaatctgttaagtgcagccattccttgatggcatatctattaataccttgattttttcaagattttttcaggatttcgaaaccacttagtgttagagtagtgcccacacacaaaaagtgatacctcaatcatag

SEQ ID NO: 336898 - DNA, 1525 bp, Cannabis indica
ctctcttttcccccttcttcttcgatttactactggacggactactattttcctgggaaccattcgtattaccatcagagagaaatgtttctttctcacttttgttttcaacggcatgtcgttcagccaagtcctctacaccctttgtatgctgactcatctgcattttgtccacctgtccctccttataatgactaggatccacctcattaaaattctttttgtctcctttctctgcaaaactttccaaagtggttaaggttgactgctctttggatagaatctctttcacagatcctctaccaacgtaaccatctcgagacccaccaactccctcagctttagccacttttctccttgtattgtccccatgaacatgacactctgttcctttatacaaaacctgctgggtaataggtggtacgacaatagcctccacaccacaaggcctttgaacaccattgctgccctctgcttcccaccggcggtgactgatattaggagtcaccagagttacaaaacaatttgttatgctactctcatcttttagccaactgccgtagtaagtaccaactcgcccgagctatgtttcgtcttcaccgcttccttcctacaatctgtttgctcatgtccatagtgaccacaagtaaagcataatagtgggaggctttcaaacttgaactggatccaagtttggccaccattgtgaggaatgtatctaccaataaaggctcctttagaagtaggaaattttatctttactctcactgaatccctcattaacataacattggtattcaaccattgtatatccatcacctctcctgccatattgcccagccttttaacattattcagagtcaaggcctttgggggaaaacccttcatcttaatccaacactccaccatatttaaactagcctctttccagttaccatttggaggccatttctcagtgattagtattcccccatgaaatatccatgttgattttttgtataccttttcagccaacactttatcatcaaaggagagcccaagtatcgtacaccccttttcttttgctaatatatccacaaaccaacctccctctttctcccatatcctactgaaaacggttttaaagaatttgacagtacaatgtcttcttgctaatactctacccaccaaagaaccttccttgaacttcaaggccacttgttcatttgattcccactcctcctccccttcgacattcatgcccccagttaaggagataatgttttctatctcttcactcatctttatcatgcaaaaactcaccagccacactcactagacaccaacccacagcctccagcacagaaccaatgaaccacggctacactacgagccacccagggtcacactcctcagagagaaccaaaaaaaactatcttagcaaaaattttctaaggaaaaaaataaaaaaaagggcccagagatttttagagagagaaaataaagagagagaaagagaaaaaagtgaggatgagaaggtacgagt

SEQ ID NO: 336899 - DNA, 958 bp, Cannabis indica
tttatgtggaatgtccttattgccttttgacatgacgtgactcttcgcagtgtagcggtcaatagacttaagtgatcatagcttcgtaggtgtagattgggggttgtgtcatcagactttattgcgtgtggcagtcccaacacgtttcctctcatgcgacattaaatgcgagatgactgctcaggggaagcctgacacctcgcggagatgctttgatgttacttaggcctccgggagcatagggggctccgtatgccttctccgggaggcaggtcccggatgttgcctttcttcataaagacttagcaaataattcaaatgttaagatcttttgatccacgtgtccttgtccggttggtctacgtatattgggcaaaatcaggggcaacaatatcaactcactatttttcttccctattcatcatccattttcaaaaatttagaaaacaaattaataataacaaataaaatctcaaatccaaacaaatccataaatatctaaaacccagaaattataaacaagccaataaatttcagattcaaacttgttgcattcaaaccaaatatttacaactacacagactatactcagatttatacacaaataaatagaaacatttcaccatatgttcatcattgttcaatattctatttacagaagaaaaaatagccaaaaaaatcaaacaactaatacctctataatattctctcctatttagccaaacccatatccaaatttggcctcttttatggtagatcttgtcttctcgcaagaggagcttggggatggcgattccgccattgaattcggcaaggagacaagagagggagaaattgagcagagggaactcgagctacggggttaggattttcgaaccatctaaatgaccttcatgttgacggtggatcaaggaatagctttgtggtccaccattgaaaccgagagagagagagagag

SEQ ID NO: 336900 - DNA, 1342 bp, Cannabis indica
tgggccatttcagatactcgagaaggttagaaaggtagtgtatcggctagccttaccaccagcattatcgactgttcataatgtatttcatatttcaatgttgagaaaatatgtttcagacccgactcatgtcttgagttacgaagcccttgaactacagtcagacttatcctacaaagaacaactagtttagattcttgataggagggaaaaagttcttcgaaacaagaccatcgctttggtcaaggtactctgaacgaacagtaaggtggaagaagtcaccagggaattagagtcagacatgaggactcaatatccagagctattcaggttagatttcgaggacgaaatccttttaatggggggttaattgtactgaccgcatttcataatatggattagtaaaggcaattagcactaattattgatatttttatagtatttgtagatttaaattatttgtgggtcccattgttagaagtgggctttagagttataatttctcaattctagagattttattaaattctaggagtattatttgtattatatgtgaattatgtaatttttacaatttttgctcatcgacaacgaaaaatgtgatggatggctagtttgatcacatgggtaagtctagaaccttatttcttagtggaaagtatattggaggaaatagaatgccgagtttgagtgggttatggtttttgaccattatacccctagactttaaaatacctaagtatatgcttatgggggtattttagaaatttcaaagtggggtggggggggggggggttaggtggctggtttagaaggtggcagctaaccacatagttatttttcagccaaagaaattaacttattcattttagaaaataagaaaagaagaaaaagccaaaaattaaagaacaacctccctttttcccttctctctcttcgaatcagcaagagccaagggagatttgttgctgaatttctcatttcagcaaaggattcaagttgaggtaacccctagatcatttgcacttagtttttcaagctttgactttagtttggatatgcaatattggaaggtagggcctgttagggtttaaaggttgtgtgatttgatttctaagcttattttgagttgattctaggttttggattctagttttgttgtgttgtgatggaattacacaagtttgagctttgaaactcaaacttaggtctttgatggtacattttgattcttggtatttttttgagttttattggttggaatatgttgtgtaagccctgtttacgtactttggaaggtttggtggcatttgggtaagtttgagcgagttttggagttgtt

SEQ ID NO: 336901 - DNA, 457 bp, Cannabis indica
atgtttaaaaatcacgtaatatgtctatgctagttagggtgttacagaatcgaaagagagagagagagttcaagagagggttaactatttcttctaactttccttcttttccttcaaatttaagcaaaaatcctttttctttcttatttctattttaaattaattaacctattctcagccaaacaataaccaaataagacaaaaagaagtcttgccaaaagaccttcttgcccctccatctaaaaaaaataattataaccccccaaagggtaaaatggtcaaataccaaaccctcgagaattctaacacctctaatatctaacaatgatacctcgataatattctaaaccatataaaatacgactctctaaaggcccaacgtcgctttccacagcttccgaacacaatcacagaaattaagtgatttacataaaatagcataataacatatatgata

SEQ ID NO: 336902 - DNA, 554 bp, Cannabis indica
tttcttcttatgttttttttactcattcttgctttcaagcaaggctccagtttgaaggtaagctacaataggtgtcatccatgttagactgtcatctaacatgtcaacttcttcagggatggtaatgcttggttccttaaagaactgtattggcactaggtttgccttgtcaaaaattgtgctgcttgccaaacgggcaagtgcatctgctgtacattctgttctctagcaatctacctgattgtgtagcctttgagctgacttagaaagtcttagatcttgctcaagtaggccaccattctttcacctcaagctatgtatccacctaggacttgattcacgaataatcaagagtcgctgaatatgtctaggtggtcagcccgtacttcatgtgccagcttgaggctgactattagggctttgtatttagcctcgttgtttgaggctttgaagctgaattcgattgctttgtgcagctgttgcccccaggatttataagggcaatgcctgcaccggataattggttagtgaagcttccatcaacatggagtttc

SEQ ID NO: 336903 - DNA, 446 bp, Cannabis indica
agagagagagagagaaggattcgaatttaagagagatagaaggctcattatttgactgaaggctaatgtgacttaggttgtcaattttgagttcatcactatctagttataggaatccttctagggttaggtttgaattatttggcattaaaaaattgataaataaatggtaaaatcatgcacatgtggccagccatagaatgggggcccatcacttgcaattttgccatttttttaactatttatcctattcttttcacaaatgctatatattttaattcaatcacttaaacgccaaaactatttatttaataattaaaattaattatcaaataaaatttttatttaatatatttattaattagactcaacaaagtctcttaattaacaaataaacccttaaacctcttttcttcacaatttagccctagcttagtgaaaattca

SEQ ID NO: 336904 - DNA, 599 bp, Cannabis indica
taatttttcagtttccaatcaaactattaatcctgcagataacgctgaagcagtcaattattgcaatctcccaattgtatgtagtcaaggcgaaacgctcaataattaactcttttacctaaagtagtaaatccatgaagcatgcaatttatttaacttagataaagcattaagatttatggagatagactaatctaggcaacaaatcaatgaagcatataattcatttaacttaggctctattcttcatcacaaataaaaattgtaatttgtcacaaacacttagaatcctaaactattaggtgaataattaatcctaagatgacagtagattaaagtaaaacctaatttagtggtcatctaaataagattaaaacaataatcatagcattgacatagaaaaatagaagcaatttgacatggtggaaactaaaaattaacattcaataatgaaattaagaattcatgtctcggattttgaaataacccttaattaaaaaaaaaaactacatagtcagagctagacattataaacaaaatcataatatttagtaaaagtaaaaggagaagaaaagaattatgatgaagaacacttcgaa

SEQ ID NO: 336905 - DNA, 507 bp, Cannabis indica
aaactacgattcttactcgccctcgagtaaggaaatagtactaactactaatactactaactacgctatcagataatcacaatactactgcctcatgttctgttctcttccattgctcaaactagaatttcaattccaccaactctaataattaatttagatgctcagtttgtcacatactgcacaaacacaagatgacttcacaatcgaaacaatgttataatggttttactctttccaaccattccactacccgataactcatatgcttgcatgcttacctctctccactaatgttgacaacatcctttcagaatcaatagggctttttgaggtttataaagtatggcttagatatttggaaaatgaaaaaacaattttggctaaagatatcataagcacaaaaataacccacaagcttcctctaatttcaaatttcccaaagtgttcccacaactaaccaagattgagaatttttttcttttcccaacatcactgaattttatt

SEQ ID NO: 336906 - DNA, 1121 bp, Cannabis indica
agtgattctaatcactttgtcaaaaaaaaaaaaaaagtagagaagctttgaaaaatttaaagaaccgtactaaaaatatgttacaatagatgctctaaattctttctttatcttaaaatttactattcatgttctaaatttatagaataatatttatttctctaataaatatattttattaattattttgggttttaataattatttttgtatggaaatatgtgtatatataaataatatatttaaaataaataaaatatatttaaattttaaaaaagtggggttttagtaatatattttaatgaagttaatgtatgatataatgtaaaagtatgttataaaataaaagaaaaaaataaggttttaataatgtattttaaataataaaatagaagaagtatgtggagtgcactaacaccttttaaggaataattctatttaataaaccatgcaactttcactaatatgctttagatattattaataaggaccaattaatatttataatttattattattattattttgaagagattattattattattattattaaaaaaagaatatgatcaatggagaatagtccagaagaagaagtgaggttaagagtatctttaatggtaaaactttagaggatgtttggtgaggtggatatattacgtggcaaaacattaagatgctataccatttgagagaagataatgctattttagaaatttgcatggatgctatgttgtagcatcactgctattcattattttttaataaaaaattgaagctaaaaagttattgtaactaaaaattaagatatatattaaataataatgtgtgaaattataattatagtatttttaaatagtgttatacattggggtgtttttagaagtaagagtattgaaaataatgtggaaaatgttagactatatatatagtgtatgtaatatagcatatataatgatatgaaatgcggaaaataaactgtaatcatatctataatatatgcaatgaaaggatcgatgtacctccagccattgatctttgagcttcaatccctgcgatagcttcagtattggagttcgggcttcctcgctctctcaactctctttagatggaatttgctg

SEQ ID NO: 336907 - DNA, 506 bp, Cannabis indica
agctcaattccacaagattaacagacaacctaacaagattaagcatccttttcaccacacatgcaagacccaaaatcaaaataacctaagcatgtttctaccataatattcagcaaggaaaatataaattaaaaccaagaaaactacctcaaacacttggacaattaagcctcaagcctccaacacctttctttcaaccaacaagcttcaaatcaactagttcttcacaaatttaagctttgaaaatcaaaaggggtaaaagagagggagagggttcggttgagagcgagaagcaaccagaaaatacaattcattttctctcaaaatccattaaattcaatataactcaattatggtcaaatgaccattttgcccttagggttatataacatgcataagtataagtatcacatggcttatgtaaacttggctatcaggtctcccgaggataatagggttccaaaccccgaagcataagtatcacatggcttatgtaaactttctat

SEQ ID NO: 336908 - DNA, 1099 bp, Cannabis indica
cttaagggaggcccatgaaaattcctcacgcggtgagtactttgggaacgcctggggatctaaacatggaccccctcatggactggttcaaccgcttcatcgggcctaccctcgctccttttgcctaagagctgacaagccactttgtctctaatctaacccaactcccggccaagagatatgcagcctgcgcttttacgaacttaatctaccaaattcaggatattagcgctgccatgaccgcggtaagtctatctgttagtgttctcgggtcttgttttgaggcacccgtcctcccgtacttacatattttccccgtatttccagattgctgccgagactggtcgcctctcaaagactttaattgaccatgtatacatcatgttcgagtttgggggcatggatgaggccatgaagagtctaagagacttggcggccgagagaaaagctatcagggaggaggcccaacaaagggaggctcagatggtgcgaagtcaccaggaggcgttaaaggccaaggctgaggagttaaaggcaaaggacgacgccctgaagaccagggatgaggccgtgacaaggcgtgagcttagagaggccaaggaggcggttgaggaactgactgctaggctaaagtccctagaggagctgcaccaagttgatttgaaaacaacaaccaacctaaccgttgaggtgaagttggtgcgtgacttcagggatcatgctcaaaagaaggcaaaaagagatgccctcctggcccccgttacctgctagcactgcaacaaacgttttgacgacggtgtctttatggcttggctgactaacggtcagaaccttaagcttgacttctatcccaagcctgaagaggtcctcgtccgcttctggaagaagaacaagagacttgatgccttgctggaggagtgcaggggtcctcgtcttccacctcaaattgattaagccagcttttcactaccactatcattattattatttttctttttctttttatatatttaatccttctcccctctttaagaaaatttacttattattattatttttaaggggagacacttaaggcccgtccccaggcccttatctt

SEQ ID NO: 336909 - DNA, 1282 bp, Cannabis indica
cttgctcagctgccaggggatgatcaaaatatcatccaattgacctccgaggacaactttgtgaagtacgggctctatccgaaggatttcattcctaatccagtgaaggggaggaagaggaaatctggtgctggacgggctgagagagctcatcaggaggatgagctgattcaattgaagcgcgaggctaagttgaagggaggtgcaagggccaagaaatatgctcaggagcccttgaatcctaaagatgaagctgaggaagagcaggggactccacttaaaaggaggaagaaacttctggtcccgcccaggcctattgaacatgcaattcgcattagggtgcctagttcgcctgctcgaccgccttctcccgtactcagaaaagggaaagctattatgtctgagataagaggcttgtcaggtgatgatggactttcgagtcttgctcgggcaatcattttgcagactactccgtcttgtttttaagcttcttgactattatgtttctagtgtctgttttctctaacgatgttgtttttgtttcatccagacatgtctcagaagatgcttgatgctctgaagaagagagttggaggaagctcgagcgcatctcctccggctaagaaatccaagggcggtaaagggaccccttcaaggaaaaggcgcctgcaggggaggttatcgaccttttggaggaactaactgttgacaacccatctactccaaaagttgctaagtccaaggattctcgaggaggaagttcggacaagcttgagtaatcaaaaggtggatccgaggtgatgcgggctcctactcctacttttccagtgcttccagaggccaagaaaggcaaggagatgctcgcccactacatgaaccggttggtttctgaggttagtgagcaactggccggtgctgataaaaactcttctatggagctgctgatgggaggagtcttaaaggaattcacaagggtaagtctttcttgacagtttcctttaatcctctttatttggttcggattctgaagttttttctctgcacaggctagtctgaagttggcttacacatactcccgaactaagtctgttgctttcaagaacgcggctctgtccaacaccatgcgggcggaggtagacttggccaggaaggacgctgatgacgccagggtggaacttggagctgttcggatggagctgggtgaagtcaatgagaagctttttactactcagaagaaaataactgagttgactaaggatctcgaggcttctgaccaacttga

SEQ ID NO: 336910 - DNA, 907 bp, Cannabis indica
tttttttttatctccaagtaaaaataaacaaaaatagaaaattaaactttctttttttcaaaaatgcggtctctacatgagacctttccaaaatagtttctcccaaaaattttagatctgaaatcaacatgaacatcgatcacctccagaaaattctagatcttctccttaatcgacgtattcttcaaacaacaccaccaacaatgtagaagtttttgtcgaaccatgaatgccagcggaaagctttttattgatcaccatgaacgtcggtaagaaactttgattcgatattcagttatggcaacgcgaccaacgatcagagatctccatgaaaagccaatgaaagaagatcaacaaatgagaggagatgttcatgaacatttacccaaaaattgggtttttctttatttctttttcttaatttagaaaaataacaaatctgatattattaattttgtttgctttaattattttctaaaatattattattaacgttattgagttgattcacatatattagttgtttttgttaatttgttattgtttttcggtgttttttgaaaatttggaatgaaaaccagtaaatcgttttttttaagtagtataatgagaatattgagtttgtgttaaaatttcaaaataaaattatgttgttttagcgttgtttttatgttttctttttgttgttgtccatgatcgtgaaataacaaatgtataaataacacaataacaataataaaataatgacgaatataactttattatttagaacaataaataatgaaataaaaaaataattatcttcaacagtatgatcaacttttcctaaatttttaacgaaaaattaaaaacaactcggaagaatttgacaaataaacatacaaggtaccaatattttaaatatttt

SEQ ID NO: 336911 - DNA, 653 bp, Cannabis indica
ggtgtgatttggtacatgtcaaagttcagggagaaaaaaatcctaattagcctaaaaacaaataacacaaaataactcaaaccggttataattgaaatataactaattatgtaacataatgaataaaaataaataactcaaaccagttataattaaaatagaaccggttctataatagtattataatgaataataacatgaaataactcaaaccggtcataattaaaatagaactggttatataacataatgaatgagtattcttggggtaaatatggtatgtgtgtaattatttggtaggttagagcaatttgaatggatgtttctgtttgagttattttatttaactagtttttgtgtgtgagtttatcttagttgctttacggaactagttttttttctcaaatttttaaatagttgataaatataaccggtttttttatattatatttgagttattgcgtgttattctttgtgtttatttattttgttatggaaccgattcttttcatatttacgcctcaatattttttggaattgatccacatttttttcaaaaaagaaaattacaatcgattttatgagatattatgtgttatgaggtattttgttgtggaactagttttgtttttaatttatgttttagtgtttta

SEQ ID NO: 336912 - DNA, 997 bp, Cannabis indica
tttttattccaaataaatcaatcttaaccctatgtgaattagtataaaagaaaaagtatggtctcattatccaactaatgcttcaaaggctttaaacctagttttctttctctctgacaactaggtttatgagacttcttcttcaaatttcgaaatcctatagcgttcttcactatcaaattcgagccttagtgattgaatgcatgcccacacatagcaagttagtcctcaatcatagtgtgtaagattgtgaagaatccaaacaacagaaggagtgtcgggctcagattttggtgatactctactacagaaaggatacaagggttaaagatctgagcagaaggagtcatttaattccgctccaaccaatgtaaggtttctcatacctttttatgtgtttattttatattgttttagaagttcatgtttaggatgttaaaatcatacttgttagtaaatctagatcctggtaaaatatattccaacagaatattgtgtggattaatgcaactttttattttaagttttatccatatttaaaaaaaaaaaagttagtatagagaaatgataatgaagtaatttatatatggagcttgaaattaaaagaaaatatctattaaaataaactaatttgggccaagcttaataatataaatagaaacaaatgtctcatttacatagttcaaattaaaggtaacgtataacagaacgttagggagaatagtggtatcactaagacaaagaagattacttgaattattcatagtgatatggtaatgatggagaatgcttttatacttgactggatggtcaatctagtatacgaggtgactattgaaattacaacaaaagattgtaagtaatgatgaaaaggtatgctcatccagaatggaaaaagcttataaaccgggatgcaatttaatgggcatgcattcaagtggttggtgaatgttagaccacaaagtagattgtttattaaacaacgaactatataatt

SEQ ID NO: 336913 - DNA, 632 bp, Cannabis indica
gtgggaatgatttggaacactttggagaagaatgggccaatgctgaaaaaatagtaactagtagctagttactgtatttttcatcatatacttggacacatttttgaaagtgtgagagtctttgtaacagccaaaaactcctccaaatcacccaattaataacataaatgcccaatttatggttggtaacatccaagggctttatggtggtcattaatgttcatatgagagtgaaaactctataaatagaggtcatattgttcacttgtaagagaagtagtttaaactattttgttgtggttagaaccttgtgaggatatgctcatccttagacactaggctgagcatatgaggcttgataaatccttaagagcatttctagagtttctctaagtgtccatatgagagaggaaatgacttttaggacaaaggtccttgacccttggtcaagctttgtgtgtattcttcttcttcttcttcttctttagctttcttgtaatcttaatgaaatacgtctatttttattttgattgtaattcttatattctctcttgtaatgagaacttttccatcaatctaaaagtcatttcgatggcatattcttctttctaaaagacttgccatagagatca

SEQ ID NO: 336914 - DNA, 786 bp, Cannabis indica
aaaatgatgtcttatatcaatgtgttttgtacgataatgttgagcaagatttttagaaatatatacagcactggtattttcacatgcagaatgacaagtaagaatagatgtgagagtataacaattatcaacagatctaagcccttgtaaaatgcattgtttatcactgttaagaacaaaacaatgattattgtcaaaattgacagtatacccttgattacaaatctaactaatgctaagtaaattagcttttagtccctcaacaagcataacatttttcaaccttggtaacccttccaaattgagagttcccataccaatgacatttcttgttaaaccattaccaaacgtgacctcaccacattgcattggtctgatattcactaaaaaatccttgtcacctgtcatatgtctagaacaaccattgtcaaaataccacatttgagaagcagcacttttatcagaaaaaccagctagacatttttctttttcaatccatttttgtttcaaagcactatgtttcttttgaaaaaatttcaaattaccaaaataatttgttttgcacaaattttgcatggtgaaaaatatttaggtcaaatatgccctttaataccacaaaaatgaaagattggaacaaaccttcttacccgagatcttatccgttttgaacttactggagactttgcttctgtagacgacatttttgttgtagcagcaggtaaattcgctggaacactagattttacaaattttgttttttcaaaacttttagtaccatttgatcca

SEQ ID NO: 336915 - DNA, 517 bp, Cannabis indica
aaaaaatagtatatggggtaactccccataaaaattatgtagatattttatataaaaaattttaattttaatttgtaataaatattattgatattttaaatatttgctactcatggggctattttgttggaattacctaatttgaatagatgttaagatatttttcctctaataattaataattttacaataattttcaattacatcaaaataaacacatcaattattatgctaagtttcttttattatttattattccataaatattaaataatatcaaaaatagcttgcgttttgtattttaatgacattttgtataagattttgtttattgggtacacaacaattcattacgatatcttatttagattttattgtacatataaaatatgtataaataattacatttaaagagcacatcaattaaccacaatagttaaaaaaaatctttaaatattgaaatctcaagcctatttcaaaaattaaaaaaatatatatatattacttaaataaaaaa

SEQ ID NO: 336916 - DNA, 612 bp, Cannabis indica
tgttctttcggtttctcctacaagttttcttgattttagggtcgacgggtaatacagctgcttgcccttggcggcgcatgcactcaaaatacctgaaatagataagaacagttttgcaagagaaaggttagaaattcaacaagaaaatataccaaagtagaagttagtataattttgtgtaatattaatctttaaacaattcccctgcaacagtgccaaaaatttgttacgaattttatgatcactacgcaagtatacgcagtcaagtagtagctcacgcaagtgagatcgaaccacatggaattggactacgtactactaatttatacttatgattctatctggtaaaacaatactttttgtgaataaaataaaacaatttagaaattaaaagaataaatgaagattcatcaagatgagagattagggaggagaatcctgttgttaagttaccaatgttaatgcctaattgctatcctttacttgaagtgaatgacagattatgagttaacctaactcttttcagatgttttaggttctaaatctcatgttctctaattaacttcttaattaaacaaacatgaaatcagcattaagcaataatctaattgt

SEQ ID NO: 336917 - DNA, 848 bp, Cannabis indica
aatacaaaaaatatgaaaaaattagtttgccctaatcttggccactgatcatgatataatagtgaaaattgactactgatgaaaatcgtcaattttagaagcttaaatctcttttgttggatgcttatcaatctgcagaaaaaagttggggacgaagttctaatttgtaatcttcagaattacgatatgggtgtgagacatgacttgaaagagctttaaaacaaaagttgaattgcttctttaggagtttcccagtgctcgttttcatacttctaagaaatttgagattgcgaacgaggtctcctaccccgcttttgaccaaaataagaagaatatccagagcaaaattttcatttgaggagcaaaaccacacgctctaggttgaatgtcaacctccgcgttggggccctattttggctccttaaaaatcttgtttgctccctgagatcacttatatcatcgttatttttagaaaaagaaaatatgtctcgaatttttttttggaaaaatgactggaaattgcccaggttgataaaatgtcaacttgggcgctaggcctagcgatagtgtcaacctgagcgccgccaccaaatgattccttttgattcccaaaaatacctgtatctcagttattggtgaaaacagagaatatgcctagaagacttttcgaaaaaactatttcagaatggcacatgttgacaaagtgtcaacctaggtgttagccccgcaccaggtcaaccttggcgttggtatcagttctggcttccaaatggctcttcttatttcctgaaagtacccaaatcttaattgttgacgaaaatggataatatgcccggaagactctatct

SEQ ID NO: 336918 - DNA, 1014 bp, Cannabis indica
aaaacaaacctgagatcgaagaccaactccatctaatcattttttgagcattatattgatgaattttttcctgggcagcaacctttgattttttttaggaggagcttgctcacgtttcgacagttgagaagcaaaatcggagttatcgtcttattcctattagctacagatttcaaccctattttagaacttttctttggcaaaggggaggagaagagttcagctatggaagttttatttaaaaaaaaaactgaaaaaaataaaaaaaaaaaaaggaagaagagaaaaagataagtgaatgatgtaaggtgtgattgatataagtcatcaatcaatgacgtggctgcatgtatggaattgatgtgtaagtggtataattgtaataaaagaaagaggaaaggtaaaaatgatgatgtaagcgtgtagggcttttttgtaataaattgagtaaattagatttttgatgtaaaaatttgtactttatatagaatagatatatatattatttaccatttttaataatataataatacaaaaatattatatttaattaaaatttatttttgtgtaactttaagtgttgatagttgcagtagaaaagtaatacgatgctaaacctatattatttttgtgttaaactaatacaattatagtgtttatggttgaagttgctctaaggaagccaaaatgtaaaaagaaaattttttaatggaggccaatatatgattttaaaaataaattaagagaaaatataaaagattcaatataattttgtaaaacatataaaaagaagttgagggggcaagccataatagaggatccattatatgcataattttcttttaaggattatatgacttgtatacacatagagtatataattttatatatatatatatatgatttatatagtttaagcaatatttgaagggtgatcaatgctttcaatgggaaggtctctcgctgggctcttgaaaattacatctctttttgtactaagaactctcccttttt

SEQ ID NO: 336919 - DNA, 774 bp, Cannabis indica
aaacttaaatgtgccatatttatcataagaacttttaaaatcccctagtaagtgtaatttcctcttaaaaaaattaattgggctccttatatgcatctaagcccaaaactaacatataggcctacacagacacactgatttgaatggatcctatcatgttactaggtttatacacagatgaaagaagattgcaaaatttacccgttacaaattatttatttgacctattgacaattgaacaattggttaaaatcggatcattggatctgcaacaagttaaccatggtaatttagatcaaacaattaaaaggttttaataaaaaaaaaagtttagtaattaaacaatatataaaacgcacatacatgtaacaagttggatagttggatataggatttatttaatttaaattaattaaacaattaaataactttcaaaaaataaaaataattaaattattattttttgaaaaatgtaaatttaaattaaataattaatttcaaaattacacctataaatttgaaaaattaagttttcaatgaacctaaatatctatttcaaaaagagcctaacaacttttcaaattttatgttattaaaataaaattaaatattcaataaaataaaatgataaataaatatcatctatctaattttataatttaatttaaataaaataacaaaattttcaaagttagcaaaatatctcgttacaatttaaatttctagattaaaataatcttattttaaatttcaaataaggtcattttattaaaa

SEQ ID NO: 336920 - DNA, 850 bp, Cannabis indica
taaaataattaccaacaggctgtgagggaaacatgtgtagtaccacaaatgtactttgatatgttgaagatcttagtatttttttttttctaagattccttgggggaaatacacattttccaaacttatgtccacccaacaaaaagacatgctgaaacagaaggcaaactatgagaagaagctagcgatggatattcaatacaaatacaagtacacagcctatgtgtaacgccctaacaattaggcacgttacccaaggtgattaagcaaccctaatcccctaaatgggattactagaaagataaacacgggtaatttaaactttgttcgaaaacagattgaaaataaaacttgtaataaccttatctttacaatcaaaagttacatgttccgggatcccaaaaatattttacaaaatattacaagcctttttcactagccgacccagacggtaaaatctgagtttcaaaagtacatcactggtagacctcaacctgcttggtctaatgtggcccgaacatgtacatacatcgcttagctctcgcactcatggctgattagagacagatttaccctttcctgcacagtagagcacccgtgagccaagcccagcaagacagtataattatccataatcattattaacacatcacataaatattaatgccatttcacatttgtttgtatgacacgaacctgtgtgttatactcacatgcctattaatgtctatgtggcatagacctacgtgttacactcacacgcctatttatgtttatgtggcatagacctacgtgttacgctcacacgtctatttatgtctatgtggcatagacctacgtgttacgctca

SEQ ID NO: 336921 - DNA, 557 bp, Cannabis indica
aaaatacataaaaaaattgataaataaattattaaattttttctcatcatgcattaaaatggtctttctttctattttgaaatggaatagacattccaccaaaaggccattccattggaatgacattctaatattatataatatgcaaccaaacaaaagaatagaataaaaattgtttcttttccattacattctatttcattacctccacataaactcctatttggggagatgatgactgttgattgacattatttcttgagttaataataattattatttcttctttcttgattgtgaatttatctatatttgagcttaatttcatgtttgagattgatcaccttaggcatgttttatggtccaaattcaaaatgtgaaaagtgagttttgggaatactaaaattggataactagattttgatgtgaaacgaaagtatttgcataggttttgagaatactgaaatcataaacagttaattggtgatagcttttgcctgatcaccaattaactgtttatgattttgatgcgagatctgagaagtgagtgtcaaata

SEQ ID NO: 336922 - DNA, 548 bp, Cannabis indica
atcagcatgagggatcaaatcagcttgtgccaacaacttaaagcaagagggcagttgagaagaatatgagaagctgtctcaacatgttgaaggcaaacaggacaagttggggaaatacttacacacttagtaaccagttggagacaagttggtagagcatcagaaactgctctccacatgaagttcttcactttaggtggtattttaaggtgccaaagtttgtgccagaatcccgaattgttaacaccaggcctagtatttttctgaagctgaagcatggaataagcagattttacagtgtaaccgcctgttctatcaccagtccatgaccaacaatcttcaacagttgcaaaactaagagggattccaagaaataaatctgcatcccgagtgttaaacatatccttgacaagagagacgtcccaacttcgagtagatacatcaaagagagaactaaccatgtactcattaagacccggtcctgtagtagagacataggggttgacaggatcaagaagccaaggctgtttgagaatgtgtgttgaaag

SEQ ID NO: 336923 - DNA, 779 bp, Cannabis indica
agaagatgtcaaggtcgatcaaaatcaacagggcgataacatccaagacttgctaccaccaccagtagatggacatctgcaattcattattggaggcccacacatagctagagattcaagcaaagcctgggagagctatgcccgaacagtacagcatgagcaagaagaagtagtcctagccgtagaagagattaagtagaagatcccacgggcaggagaaccgaccataacatttaatgatgaatatgctctcaagattagacttctgcacaacgactcgttggtcgtggaagtccaaatagccaataagatggtggccagaaccatgatagataatggagcctcttctaacatcttactcaagaccacatatgaaaagatggggctctaactcaaacttttaaccccctgtcttctgcccgtatatggtttctccggccaaagagtcgcaccgctagggcaaatttgcctacccctcactattggacaagctccgacaagcataactataatggcacaatttcgggtattgtccgttccatcagcctttaacgtcatgttaggccgaccaactttgtatgaattaaaggctgttacatcgatattccattcatgcctgaagtttccaacaaagaatggagtagggtgtctaagaggaaaccagtagattgctcgggaatgttataaccttgccatagccaaggctaaaaggaagtatcctctagccagagcacagacaagggaaaaaaaatttctaagtagggaacttcctaaggcgg

SEQ ID NO: 336924 - DNA, 1477 bp, Cannabis indica
tgttataaaaatactaaatctaacatagtttattttccaaggtttccaacgacctgatacagtgtcccgtttaggcgagagtcaaagcatcatccattgaaaagagttgtcaattaatcttaaatgtcaaacattctagcaaccttttattcgatcaagattggaattcagcgttgtcccatttgcatcttgaaatacttgaggtgggaaagaggatcttctcttccagtgtaaatcttccaggttggcattttaaagttgtggggtaatgccaggagattgatctcaggagagaaaggggttccacgtgctcggtccaactcgagatcattgtttctctgtctggccatgccttggaacatattctttagttcgtccagttgtgcatgcacagctggactaacttgtatggcattttggccgatctgagtcacgtcagaatctttctgagcgggaatttgagcacgggttccaggctgcacgatcggcttgccaagctgatcgtctactcctctccttctgtttagatcatttttgagatcatgagtctttcccaacctttcgaatcaagatacgcctggctgtcttagtgattgatttgtttggttaacgtgctgaccaacaccgttaacctggttgaaattatcaggtatggcttctcccgatgaatttttagataaggtctgcccacctactgcttggcccacaaggggaacctgtgaccggagatgtggcggctgaccatttatagtctgagaagtattcatcgctggatcttcgtctgtttcaccgaaggggatgacattcttgggttgctgcccaacagtttgataggcttttcgtatcagcatagtagcttgtcgactatgattttaaatctatgtatgatgagccctcaacgcttccatctctttgtccctccactcgacaaacatgcgtctctgttccttgaacccaagatttaccgccgcagggagttcctcctaatcatgatgtagggtgttggtatgaccttgcatgagtccaagagcagcgcggaggttttggatctcagtatcatctccaatggtcgttcgaatgttggtagcaggtggaacagctgtgttatgaatgccctggctaggtgctgaactggtattcctagtctcttgcacaccaggcacgatttcattcataagagtcgttacaccatgacccacatttgacagctgcttaggattaacagctggcggaacccttgtgtttcttgggttttcaatgcaagatccaccgcctatggatttgatggatcaaccaggtcgctacaagtctgtaccaccatcgtacttgtgggtaaatttagaatgaagagcgattcttgatttttctctcaatgaaagcaccaaaatgttgaccttgcttttagccaacgacagtgagtctaatttagtaagcgaaaagtagttcataacgattgaaataaaataaagcaatatag

SEQ ID NO: 336925 - DNA, 566 bp, Cannabis indica
ctaattcggttatgccttgcttgataacctatttacatatatacgtaatccatatattacgttcttttggtggtttattctgatgatgtataccagatctaacccagttatgtcttatttacataactcttaacataaatgaatgcccacaatttatactataacatatagaatcttagggtaataaccctaacttgcatactaaataatcagtcataaaaaacattacagtatgctcaacataacatctattgagggtaataaccctgactcatgtcttcactagattaataatattaccatacatcatcgctttcttaccttcataatattctagggtaataaccatagaccgcatttaattaaactcaaggtactagtttaccgagtctagcttacttataccttaaacgcacaattcataatctcaatatacatacacatatcatggtatatcaatacttattaacaattcactagggtaataactctaggcaattaaatcgctctctttagagtaataactctaatcccggtttctatttactcatatatatcatattcca

SEQ ID NO: 336926 - DNA, 1899 bp, Cannabis indica
caaaagatcttaatcctgatatagttatgtttgatctcaactgtgtaatttatgttcctagagttgttcgttaaagttgaccaattgcatcatcctaatacttacatcttgggaacatggtagtacaattgaatgggagcgctaatcatagatacaaaatctatagcttctatctagacaatagaagtgaaatgataatttcctacgagcttggcttagtatagataaatggaagagctcttattttaagagttatattagtttactgaaatatcatttataggaagctaagtgttttaaaaataaaatacattgaggggtagaacggtaaatttatccttactcgatgtaaatcatctatagaggatatttaattattcagattataacaatgaataattaatagcgtgtctatatcttggaacatatagaacgttctatgtaattaagagtgcaattctaaatccatagtggagtcaggaggaattaataagtcagagaatttgcttggtaaattctagaactagaagcttgattctgtaggcccatggtccccacactagttgagataatactgcttgtagactcagtaaattggttttaattaattaattataattctaaaattagactatgtcttatttaaaaaatttcattaaccaaaggcttaattgagaagaaaagagggtttatggtttatttgttaattaagagactttgtaaggtctaattaataaataatttcaatgacaattttatttgataattaattttaattattaaataaaaagatttggtatttaaaaacgtttaaagttaaaatatgacatttgtgaaaggaaacgatgcattataaaataaaatgataaaattgtaactagtgggggtccacactaagtggtcggccatttaaggtgattttagccatttatttatattttcttaatccatataatttaaacctagccctagatgaaagcctataaatagaacatgacacataacatgataactcaatattagtctattctgtcagaaaattgaaaagagaggctcctctctctaatttttgagttctctcttttttccttcatcaaaattttgtccctttagtgatagagtacatgcccacttacatcaagtcaagtactcaatcatagtgtggaagattataaagaatcaaacacttgaaggagatcgaggctcagatcttgtcattactctgcgacacaaaggaataagggttaaagatctaagtggaaggagccatattattccgctgctactaatgtaaagttttctgcaactttataagtgtttaattcattgtttaaggaattcatatttagggtgttagattatagattataatcaacatacttgttggtatatctagatcctgataagataacttccaacaattggtatcagagctatggtaatgatttactttcataaaatatagattcaaaacgatgattttgatgatttggatgtgttcatgttggtttatgtaattaattaatgaatgtttgtgaattacgaattttcaatgaaaaatatttttatatttgtagtagaagttttttttcttctagacattaggtgaaaaatataatgaatttaggcttttacagaactcaatttagatttttattgaattagctatgattttttgaaggttggaaaatatctagcctaggttaacccacatgcgtgcgcggacaagggtgttcactcggcatccacacggtttcagacaagcttgaacgagaattctcaaacacaagttgtccgaagagggtcgtgaccaagctgcatcgcttaagttggctgcattggagcctatttgctcagctggtagggcattctgcacgcgggtagtatgcaatgcatact

SEQ ID NO: 336927 - DNA, 927 bp, Cannabis indica
acccatctggcacctaaggcactttgcctcctgtgagaaattgcttcagtgagctcttcggtgacgcagtcttctccttcaaccaagacttcaccctccgcagacaccggctccctgacctcattataccttccaaagtttggaggttcagccacttctttcctcctcagcctcggaggggctgccaggacagacattctcctgctcctcaatttctcagaccccaatgtccccttcgtgatctccctcctccatgacgggcagatcttgtttggcacttgttaatatggcgagctgggccacatgagggttagatgtgttgatcttccgcatcgtttgctttgttcaggcaatcatcctacttctgaacggacactggtgagaatgtcgagcaaccgtaacaccaggaacaacaattgggatgccaaagttacccaaacttggacggccaataggaagagtgtcagcaacacctggccagacaatatatgtccagttggacggcagataatgcctccaacctttcttcaattcctaaatgaagcgactgtacccctctccggcgattggctcggagtaatgatggtgttgcactatgagttctggagtgggagagcgatcactactcacctcccaatcttcaaagcttgaatcaaaaagtctatcactcgaagaggacggactggcacgaagacgaggttgatcctcgtacagaagttgaagcaagtcctaatcgattcggtgttcacttccccaaaactcaccaaggttcatctacaaaagacaacacatgagatgagtgtttggtcgggatatcgaacagtaaataggcaaatatgccgaccaggagtactcaacagattaaaaggttaaaagatgtacaaaaataagtcaaaaccctgaaaacttactcattgttcgatgtct

SEQ ID NO: 336928 - DNA, 1406 bp, Cannabis indica
agatcctggtaaaataattcccaacacatccttagttccgtgggcggcacacgaggtatatgtaaaaacctctaacacttatcacattttttgacaaactcatgggtgtccttattgatcgttggcaagtaatatccttgcctaatgatctttttagataggctctgccaacctgcatgatccccacaaaagccttcatgaatttctttgataaattcgtttgcttctgtagggagaacacaccgtagtagaggcatcgaataacctcttttgtatagtttgccttcaattattgtgtagcgaggcaccgagtacaagagttttcgcaccttgattttgtcagttggaagttgtccatcgagtagatagttgattataggagtcatccatttaggagagttgtctatcatctctacgtcttccttttcacatatacttggctcgcttagcatctagactctgcccccagtaaccttttacttacatagtaaataggttgttggtgcttaccctcttctcgcactgtagctgcactaatcacatttttcgagatagccagatagaggagtaacgtttctccagttattggttttgccaaaactggaggcgtcgctagatgcctttgaatgttctgaaaagcctcttcacactcttctgtccactccaatttcttattgcctcgcaatacattgaagaatggcaaacacttatcagttgacttcgaaatgaatcagtcaaactttgtggtatattcagtaactaacatcccctcagtctacagtaactcagtgaactctttccgcttagcactgcagactgcttcattgtaataattagcattgaataactctcgaaattattcccaagtcataattgtgacattccgagtgagggacaccaattcccaccacacgaaagcgtcttcctggaactgaaatgtggcgtaggtcacccgatcatttccaaccacccccatgaaattcaaaatttgctcaatcatagtgagtcactgctcagccttcatcacatctggaccttccagaaacactggaggtgcttgcttacggaacctttcgtataacgactccatacagttgccagcaacaggttgttctgctggcactgctggagctgcaacgacatgagcttgctgtggaggcacgacaggaagaccttgctgccttaatctcaaaattacttcatcttgttggcggattcaatcttgcatcttcgcaaacctctgctcccaatccggatgagcttgtggtggatttaaaggacgaccaccctgaactctgccacggccacggccgcgaccacggggattttggggaatttgattttcctgactgcctccggtctcaaccatattaccctgacttcttgtatttcgctgggcgtccatt

SEQ ID NO: 336929 - DNA, 847 bp, Cannabis indica
agtatgaaaaacatagatctaaaaaatacatttattgattcaaagagaagaagccaaatagcggaagcgtacctaaatccatagatagtgatgatcttaatccatctagtagagataatctttatggtgattttgggatattccaagaaaacaagacttagaattttctaattttctctcttgatgggaaaagatgagaatagaattggatcttgtttcttggggaccagtaccaatttataatcgcatagctaggttattaattttaagtatttctaatttagcccctcaataaattagaaatattgcttagggtatctacacatttagtcaatgacactttaatactcaatgacccacaattactaaaatgatcaatttattttaggccaaacttcatttagcaatacactaatatacatgtgagcccatattaaagattttaatccaacaatctcccactgagctacatatattttctgatagtgtgtaaccttgtaagcgcttaaacttttgatatcataataataagtatttcaaaacaatctcgtccattgattatattaacataggatcaaagtggctttcgcaacatttaacgtagttaaactcatcaatggtcacgtatatcagtcatggatgcatagtatggaaattacatgcaaatgtgatcttagcatgcctatctccaattggttctccttaattgagatcaatcctttattaattctttctaaccttatacttaaacctcaatagaaagaatacattcagagtactcaaaacttaaacccatactttatctgtaaaatcaaaccataaaacgatcactctagattttacctta

SEQ ID NO: 336930 - DNA, 454 bp, Cannabis indica
tcttgttaaatatttaaattaaattaattattttaggaaaattattaattatgattaatttaattctaaaaaagaattttttttacttattggtaacttgctattacaagtaaaaaaaatataactatcatggttacagtaaaaatgtaatcattgaatagtcatccatatatataatatttataaatttaggattatgtgtattttaaaaatagaaaaaagtttagagttagatatttaagtttttttttaaagaaatatacataaaaagaaaataaaaaaaattattatttatatttataaatttaataaaaaaaattaaagtaaaagaaacaactagagaatagataataagtaatgtgaatcaatagtaaggtaattatttttttacatttgtttacttgtattattaaaattaagaaatggagaacttgattaaataagggataaaaga

SEQ ID NO: 336931 - DNA, 517 bp, Cannabis indica
aactcagaatcgcaaatggaactagaccagaactaggactaggactcggacaaggacctaaacccacacccgaacacagatcaaaacctagacacacgaaccgagactaggagttgaacccgaacctagaccgggacccaaacccacacaataatcgggacttggacctagaatcaggatagggacatgggaaacaaaactaggaccgggacctagtacccgaccatgacattaacttgaacctaggagccagctcgttactctgcaccagaaattgaacaagactgggacccgagattgggatttggatttggacccagggcttggacaaaactcgtagtcagtgtatggatttgggacacagccttggacccaaaccctgataaggacctgaacccacacccggacctaaacccagtcccaaacccaaaagtggacccgaactcgtaccccgtgacccgaaattggaaccattaccggaagttgaccaggactggaactaggacttggacttgga

SEQ ID NO: 336932 - DNA, 551 bp, Cannabis indica
tgcctctccactttgtcttgttggtagacgagacaggtccttgtgtagtccgccacaaattcccgcatctgcggccaatagtacccatgcttcaaaagggcatgtgtcctatgccacccttgatgacccgcccacaacatgtcatgacactcacttagcagtgtcatccttagatcgcctacctttggaacaaacaaacacttctttgcaactaggtccttctccgggttctccttgatgcgttctttgattggtgtacccacttggctagctgacatgcccgctaacacctttagccccgccaactctgctttatgactaagggcatcagctgcctgattaagacgtccagccttgtgctcgaagtagaagtcgaattctgccaagaattcctgccatctggcctgcttgggagtcagttttggctgcgtgaggaaatgactaacagcagtattgttcgtcttcacaacaaactttgaccccaacaagtaatgcctccacgtccgtaaacaatgaataactgccaagagctctttctcttgcgcagtgta

SEQ ID NO: 336933 - DNA, 498 bp, Cannabis indica
ttgagttgtgacttttctttgaacattcttgttatataatatattgagtactcctagtcggcatatttgcttgtttatcgctcgatattccggccaaacactcatcttgtgtgttgtcttttgtagatgaacctaggtgagttttgggaaagcgaacatcgaatcgaccaggacctgcttcaatgtgttatcccaaattttacactctgacgtggcatcacgacaatggtgacacgtggagtccacttggagcatctgttcgggaagatagacccagcagggtgcccgctagcacatctagaataagatattcaacgatccgtgcagagaactcaacacttagcgaattcagctttcgtatcatgagtcatcagctcgatccctataactcaaggatcaacttacgtggatacggcatacacacgatcccactctcagtgtacctagcctcaatcccacgatccttgcattcaccattgatcacacgatctttctgtt

SEQ ID NO: 336934 - DNA, 582 bp, Cannabis indica
tctccaatggtcgtttgaacattggtattgggcggaacggctgtgctatgaatgccctggtcggctgctgaactggtattcccagtctcttgcacaccaggcgcaatctcatccacgggagtcgtcacaccgtgacccgcagtcgatggctgtccgggacttacggctggcagaacccttgtgtttcctggactctatagtgtaggatccaccacctatggatttgctggatcaaccacgcccctacaagtctgtaccaccatcgtacttatgattaaatttgcaataaagagcgatccttgagttcaactctcaatgaaagcaccaaaatgttgacctcgcttttagccaacgatagtgagtctaattttgtaagcgaaaagtagtttaatacaattgaaatattgtaaagtaaataaagacacaagaattttatagaggttcagcaccgagcagttcggtaatagcctaatcctcgttattagtattgactcaagaattaggagaaaggtttcttttcttacagctattacaacagtatctttgaatatgaattcttagacaaaatgtttcgaccctttg

SEQ ID NO: 336935 - DNA, 1028 bp, Cannabis indica
aatctgattatactgaaatgagttttatttagggcataaaacccaacatagtgcccacacacatcaagtgatacctcaatcatagtaagtaagattatggaaaaatcaaccaacaataaggagagaagaagatccagattcagatcttgataatgctctgctacagaaaggaatcaagggctagagatctgaatggaaggagtcataatatttcgctacaccgaatgtaaggttttctaaactttatatgtgtttatttcattgttttagaattcatattaggatgttaatgaaatatacttggtagtaaatctagatcctggtaaaataattccaacagaagctccaggcgatccatggcttggaagctggaggagaagaagaagcggtggcggtactcttttacatttttctgaaaattaaaagggacggggccctcatttaaaggatgtccccggaggccgtaaaaaccgtctttaaatttgtcccctttctttgggacgaaaacaagttcatagaaatacaaaatttcagccgggctaggcgaaccccagcccctggcaacataaaaaatgaataagcctgaaaggcggtagtcttggggaattaattggtaaggcgcgaggctgacaaaaactagaaaattgacgaagtaatcttgaagagtgagcatggcccgggacatgaggtgggtttggctccaagcttcaaacccctcataattatgattgggcgtctcctcatcccgaggcaggtggtggaaggtcccggaagcagatggcttgatgcctgccacagttacgatcttctcgagctggttggcacaaatcaaggtggagtggagctcgtccgcctcccagccattatcacgggaagtataattctcctgggccacgggacccttcatgaactcctctaatgtggccagtggaactgcctctttcttggaacactctaacctggatgtgggagcagacatattcgttctgaaaaaattaagaaaatccagcagttaggccccaaacaaa

SEQ ID NO: 336936 - DNA, 610 bp, Cannabis indica
tattatattaaaaaaaaacttaaatatatatataaattttacttttatataatcaaaattagttttttaatgaaaaaattaatttttttttttggaattattacatagaaaatataaattgacattttatttacaaaaatacttccataaggtaaagacaacatttatactttttatgtgattttaattaccaaaataccacttacactatcatcacttacataatcaaacgatagttgcagggtggtggctgtgtggttgcgcggtgattacatcagatgatagttgcatggtggttgctaggtggttgaccgaaagttgaatgagacgaaggtttcaatcagacaaaagtttctgggtggttactgggtggttggctgaattgcatcagacgaaagtttaaatcagacggtctaactattagcaaaatatttaggcaactgtaatgcaactgttgtgaaacattaaaaatcagaacagtgtttccacgtacgtaactctatctacatgtctcttaatgatttaatatgaataaattcaccattagaaatttagaaaacaacaaaaatacaccaatataaaattttactatagtattgatgtaaatttt

SEQ ID NO: 336937 - DNA, 873 bp, Cannabis indica
atatatatatatattatatttagctatatataattgtcatggtgaaattgagattgtgttcttttctttgtgcagatgaagaaggctggggaagtgaagaaatttcaaattgggcaaaagaattaagtttggggtggcagaatgctatccagttgttatagcaagggctcaacaattttatttggtagcaagaggtgttttggtactgggctgatcaaatgaattggggtttgaaaaaaaataaagtgagtggtctgttgaaaaaaacatgtgattgaaatgttggttatgatgcaatcattggatatgtctatttttgttcagataaatcatttggtgttgtacttaattttgaattgagtgagcccaagttgattttggagatacaaggaccccatttcacattagtttaatcagttttggggccaattatttggttaactggccccagaaagtgttgacccacccacttattggtcaaccctacatcactgttggaaatattttaccaggatctagatttactaccaagtatgtttcattaacatcctaatatgaattctaaaacaatgaaataaacacatataaagtttaggaaaccttacattgggtgcagcggaatataatgactccttccattcagatctctagcccttgattcctttctgtagcagagcattatcaagatctgaatctggatctctttctctccttcctttgatgctgattctccttcttgttgtttggattctcctacagtcttacacactatgattgagataccacttgatgtgtgtgggcactactctatcactcaaggaatttcgaaattgaagagaggaaaagagagagagaggggcggctatggctttc

SEQ ID NO: 336938 - DNA, 996 bp, Cannabis indica
ttttcacttgtcattccttcttgctaagtgctaataatttctgaatatgattttgtgttaaacattacttgatttctatttattgttaattgtagtatccaacacgacgatgaacaaccccatggtgtcactgttgactgataacaagctcaatggagctaactttatcaaatgaagagcgaacattaacattgctctcattggtgaaaatgccctatttgtgttgactgaagaggctcttgagcagccaggtgagaatacaaccaaggcagttaaagaaaagtttgagcattggcagaatgctaacaacaaagctcgatactttatgatgtctagcatggtttacacattgaaaacaaggtttggaaacaccctcatggctgcagaaatcatgaaccagttaactgaactgttcgggatggtatcaattcaagctcgctttgaggcgaccaagaatttcatcaatgcacggatgaaacctcatcagagagtgcgtgatcaccttatccagatgaccagttacttccagaaagctgagaatcatggaactgttatagatcagacaactcaagtgagtttgatcttgaacagtttgactccagcttttctgcccttcacttcaaattgtgtcatgaacaagttggagcttgagttccacgagttaatcaacaaccttcagacatttgaaaatttgattggaggaccacagaaaggaggagctaaagctcctaattctgggactgctaatggtacggctaagactaaggcaaacattgcctccacttcgaaacccaacaacaagaagaagtggaagaatagcaagaagcctgttcaagctgtgaaaacagttaaaaagaaaaaggctgctaatcttgatggaaagccaaaaggaaaatgcttctattgcaatgaaaagggccactggaaaccccaatgccctaagtttctagcaaagaaacaaggtatttctttctatgctataaactcatgtgtttt

SEQ ID NO: 336939 - DNA, 1025 bp, Cannabis indica
tgttgcttccaagaacgcggctccgtccaacattatgagggcggaggtggacttggccaggaaggacgctgatgacaccagggtggaacttggagctgggtgaagtcatcaagaagctttttaccgcccagaagaaaataactgagttgactaaggatctcgaggcttctgactgacttgaaaagaccatcgagaccttatctgctgaagtgaacaaccttcaagatgaaaagacatcccttcgagcggtccttcgtcgactagaagaggaaaagaagtctaaggaggaggagcttatggctgagttgacgaggctgggagagaaagttcatgccttggagacagccggtcttgagctcttctatgacttttggaaggctaatccttaggcaaacttcgactacttgggtgaagccaaggacatgtaccttgacttctgtgcttcccaagtggcttatggtgaaactgaggaagttgcttctacctccggccagaatgttgatatacctcccgttcaaacaacagaacctccagctcctgccggcccagaagacccgaaccaagagcctgggactctagttgtttaaatacttcttcttttatccttttatttttatatatcttattcggccataaggccttttctaagacatcatgaccggccaagaggtctttaaacttggaattttttttcattttacagacaacgggctgaccgagaagcttttaatcccagtattacgtgtttttgttatcattaattaattccgttctcaatttataatcatcgtgcaattgtggttgttttatctttaccaaatgctttgtacaggtataggtgccccccaagtgaccgagagacttatgactcttggtcacttgtttcttacaagtatactttttatctgttcggggttttgggttcgaccaaaccttttgtacgcactggatggtaaattagaaacatgctaataatttcgactcaatttgaattttgaaataaacatctttattcatttattgat

SEQ ID NO: 336940 - DNA, 538 bp, Cannabis indica
gctcaggtgcaggggtgatattagtttccccaaaaggtaatgcattgagatttcaatttgacacgtcaaacagcgaggctgagtatgaagccttgatcggtggtttgaggatagctgagatattgaaagttaaaaatctcatatgtcatagtgattcaaaactgatagtaaatcaagttctcggagaataccagcctaagggcttaaaaatggccaagtgcctagagaaagttcggaagaacttggaaaagtttgattatttcaaaatcgagcaaataccaagagagcaaaattgtaatgtcgatgccttagcaaaactggcctcgcaaaatgaattcgatgaattgaacttcattcgggtggagatgttaaatgaactaagtatatgtgaaaaggaagatgtcgagatgatagatagcttgcccacgtggatgactcccataatcaactatcttctcaacggacaacttccaactgacaaaaacaaggcacgaaaactcctgtattcagtgcctcgctacacgatagtagaaggaaa

SEQ ID NO: 336941 - DNA, 2378 bp, Cannabis indica
aagaactgttttaccatcatttgttggagttgctgcagcttcagcccatttcgagacatagtccacagccaataagatgtacaaattgctaaaagatgaaggaaaaggacccataaaatctatccaccaaacatcgaacaattccacttccaagattcctgtcaaaggcatttcgtttctccttgagatatttcctgttcgctgacaacgatcacatccttgaaaagaataggccaaaagaatccgctttgcaacactttagcagcagttcttgtgccactgaaatgtcccccgcatggtaatgcatggcagtggtttagaatagagtacatctcctcttcaagcacacatctcctaattatctgatcagcacagtgtttgtagagaattggctcttcccaatagtaatgctttacctcagaaaagaatttctttgattgttgacgagatagctcaggaggagttgtgttggcagctaagaagttgacataatcagcataccaaggtaccatcaggttttccctcaaactaaagagttgttcatcaggaatttcttcattaatttgcacctcttttgcattctggctttcttctaattctagtcttgccagactgctactagattttcagtccccttctgtctttatctctatgtcaaattcctggagtaggagcacccatcgaatcagccttggtttttcatccttcttggtcataaggtacttaatcgctaagtggtccgtgtaaactattaccttattttcaattagatatgggcgaaacttatcacatgcaaacacaattgccagcatctctttctccgtcgtggcataatttagttgagcatcattcagggttctactagcatagaagattgtatgaaacgccctgtcaactcgttgacccaagaccgctctgattgcgtagtcacttgcatcacacatcaactcgaagggcaactcccaatttggtgaagtgactattggtgctgaaatcaatttctccttaagaacttggaatgccttcaaacattcttccccaaactcaaaaggagccccattaacaagtagattggacaacggtttagagatcttggagaaatccttaataaatcttcagtagaaaccagcatgacccaagaaactccttactcctttcacagaaactggaggaggaaaattctctactgttgacacatttggtttatccacctcaatacctgcttccgagatcttgtatcccaaaactatcccttctgttaccataaagttacacttctccttgtttaggaccaagtttgacttttcacatttgattaacaccttctccaaattctctacacaatgatcgaatgaagcgccaaagactgagaaatcatccataaagatctctatgcatgattcgattaagtccgaaaagatagccatcatacacctttgaaatgttgcaggtgcattacatagtccaaagggcattctcctaaaagcaaaagtaccataaggacatgtgaaagtagtcttctcttgatcctcaggtgctaagaaacagtaatattcttgccccgccaaccggtctaacatgtgatcaatgaagggcaagggaaaatggtctttccaggttgccttgttaagctttttgtaatcaatgcagatcctccaaccagtaagtgttctagtagggattaattcattcttctcattctttaccacagtcatccctcctttcttgggtaccacttgtactgggctgacccacttgctatctgaaatgggatatgccacaccagcatctagccactttacaaccgcttgtctgacaacttctttcattggtgggttaagtcttcgttgtgcatcagtagtcggcttggcgtgctcctccattaaaattcgatgcataactgtagagggactgattcccttaacatcacccaatgtccatgtagttttctttaggattaacttcggttgtactaggcaagttttcttgaggatgagttgctatctgagtttctagttgccccatctgagtttgtaagtccttaatggaagatctagtctctgtcataaattgcaataataaatctgtctgaagaccagaattcccactagagctttgttgctgagtctgttattggttttgtgtctggttctgatttctctgttgatagaacccactattccttcgattccctccttgattaaacccatagttgttgttgttttgagagtaatttctaatggattttgcttcatccattggaaaattattcacgttttcctggcactctgcatagggatgaggacctccacatagctcacagaccacttcagcttgttttgcttgaacaaccatcagttttgttagggcctctacct

SEQ ID NO: 336942 - DNA, 841 bp, Cannabis indica
cccacaactaatgaagaaagagctttcgtggacaccataccctatgctaatggggtttgtagtctaatgtatgccatggtgtgtactaggcctgacttggcctactcactaagtgtagttagcagatttattgctgatcctggacaagaacattagtcagccttgaaatggattctaaggtatgtcaagggctcacttgacataggtctcacttttggaaataagtctaattctcaagaggaattgactgggtttgtggactcagactatgctgggagcattgacaccagaaagtcactcacaggctatgctttcacagtattgggaggctgtgtaagctggaaatccaaccttcaaaaggttgtggctctctcatcaactgaagctgaatatatggcagcaactgaggctgtcaaagaagccatttggctcaagggtctcacaaaagaattggggtttaacacagatgatgtcaccgtgtactgtgacaaccaaagtgctctgcacctaatgaaaaaccccatgtttcatgagagatccaagcacatcgacatcaaacttcattttatcagagatgttgttgcaaggaaagatgtaaccatgaagaaaatcaacactgcacacaatccagctggcatgctaaccaagtgtgtcacacaggccaagttcagaaattgtctgaacttacttaatgttaatggctactgaatgattgttccttcaaatcattaacctctgttgagcctcatcttctctcacttttcaaaatggtcaaaacaaggtggaattgttgatgttttaaccactttgaaaagccaactgtattaactgtcttttgaca

SEQ ID NO: 336943 - DNA, 878 bp, Cannabis indica
ttaaccaataataagcctttttcataataaacttaacacaaaaattatatgaaataataaagtatagaaagtataataataacactgaatatttttatttggttttgcagttaaatctatatactccgtgagtctatcttattcaagatatttctgagtatttaatacaatatataattaatcgtatttctgtatttctctcaaagatttttccattcctttttctgtgggatctgcccccatttataagaatataggttgtcagttatttacatttaaattcaaaatacataactattttaatgaaacgtggttaattcccacatttcaattgaattatttactagataatacttgataaatgcttaaccgcttgtcatccttatcctcaaagatggtaaatgatgatttggacaataacacctcgcttaactcgtagatcgtcaatgctgatttggacaatcatatgccttccagcagtggtatgagcacctatgtactgagcaaacttaagaagtgctctttgaccattaggcctcgcagactggacaatcatatcttgtatatttccaagttgttatcctttattgtaatgtagaaaatacgctaagtgttgataaatgattcacctcgtcaagtttcttatgaatagcgaggtggatgcctcgctatatattgtctgaggttgctttgagtaacttcacttattcttttaaaataaacgaatcttgtcctaggatctgtgtattccgaggtaggctagtgtctcgtcaatacatgtgaaattccgtattttaatgttcccagtttaattatttaattaagtgattaattaaatgcggaataatgaaactggtactgaaaatagtttttccgta

SEQ ID NO: 336944 - DNA, 850 bp, Cannabis indica
ttagggcataaaacccagcagtatttctatcctaggtacgaaatagtaaacagacaaaaaagcgtgtgaatagttacttgatatatgagttgggaatgaaagattgtagtggcaatcttcccaagagtgttgaacccatcgatcacgtgatcatagccagcctgagtgtcaaaattctcatcagtctggcaatggatcaattcaaggtctagcgactttacatttggaaaatggggtgaacaaatattttaaaaatactaaatcaagcagtagaagaccccttgcattcactagtgagaatgacggtgaggtttaaatatttctagaaaataaggctttggtttaaagtttggaggcaaaaggatttttaaagtttgagatggtgaaaaaaggaaaaatgggtttgacaaatccatttatacttcgtcttaagatacttgcaatttgaaatggacgttcgagagctttctccaaagaagcacaatttaatccaatggataagaagttgaaaagatggcatctaaaacttgattatggcatttattttttatcattgcatgcctcgagtactgtacgcattaaaagatgagtcatttcaattgactggctatcattgcaactttttctaagaaatgagccccccaagcgcacatatcatcaaaaaatgcattaaaggcgtcgcatgcgtgccacgcccgtggtaccttcaaattttagtcctttaattgatcatggctcaagggatacatttgtggccccaatagttgttgggttttatgccctaaataaaacccatttcaatataatcagatttactttttaataaagatcagaaataacattttatgtt

SEQ ID NO: 336945 - DNA, 1020 bp, Cannabis indica
aataaagatagtatttcaaaattcaattgagtcgaaaaaatcagcatgtttataatttaccatacaatgcgtacaaaggtttggtcaaaccaaaaacaccgaacagataaacaatatatttgtaaaagataagtgaccaagagtcatgcgtctgatcggtcacttgaagggtacctatacctgtactaagcatttggtaaaaattaaaaaatcacaattgcacgacaattataaacagagaatgaaattcattaaggacaacaaaagcacgtaataccgggattaaaagtttcccggtcagcccgttgtccaaaaaatgaaaaataaatccaagtttaaagaccgcttggccggtcatgatgtcttagaaaaggccctgaggccgaataagatatatcaaataaaaatataaaaagagaagtgtttaagcaactggagtcccaagttcttggttcggttcttttgggccaaccggagcaggaggatctgttgttttaacaggaggtgcatcagcagcttgaccggaggttgaagtagccgcctcagttttgccataggccacttgggacgcgcagtactcaaggtacatgtccttagcatcacccaagtagtcgaaattggctcgaggattagccttccaaaaatcaaagaagagcttgagaccggttgtctccatggcattgaccttctccttcaaactgtccacctcggccgaaagctccctctccttggcttccttttccttcttcatccgatgaagaactgctcgaagagaagtcctctcatcctgaagactattcacctcagtagataaggtcttgatgttctcctcaaaacggtcaacagcctcgagatccttagtcagcacagtgattttcttctgagcggcaaacaacttcttgttggcttcgcctagttccaatcgaacaactcctacttccaccctggcttcttcagcatccttcttggccaagtccgcctccgccttcagggtatcggacagagccgcgttcttggaag

SEQ ID NO: 336946 - DNA, 661 bp, Cannabis indica
cgggacttaattccctttcaatcacactcaattgcactcacaacaataatattcaacaatgtatgagcaaaaattccaaaaaaaacttcaacacaaagtctaatattctctagcaatccacaaataatccaatcaaacttgtgtagagaaattaaaatttgttacctcaatgaaaatcaatctttagtcaacctccattgatgagaaccttgaagctttagggaagaagaaggtgaatagtgatttttctgaaatttgggtgaggtttagggatttcggaatggatttttttagaggaaaagagtgttagatgagagaaataagggattataatgatttaggatgagagtttatggataaatttgatgaaaattggtttgaatgggattagatgaagagaatatggtgaaaagtgatgttttcggcgtggagaagagagggtttgaatgtggtgtttgatttgaaatgttagggatttggggtttaaaaaagggaaactggccattctcgccgcggcgacatgtagcctcgccgcggcgagaattcgtgaaaataaggccctttctgtaagtcttatctggccgcggcggtatgtcccctcgccgcggctagaaatcgtgaaaataaggccctctctgtaaggcttatctggccgcggcca

SEQ ID NO: 336947 - DNA, 782 bp, Cannabis indica
aggatgcctcataggcatgcctgaagcaaagcgatcagcaatccctgaatagcgaccaacacttagtgaattcagtttttgcatcgtgagtcatcaaagaaatccctataacatggggatcagattgtagagatatggcaagttgtcaaaatctcacgatcagtgtattctatatttatcatgcattctttctgcttatatccattgtaacgagaagggaaatacttcctctccatgttcatagccctataaattttgatgcatgctcattggtcaaagggtcgaaagattttacctaagagatattatctaagaattcatattcaaagatattgttgtaagagccataagaaaatgaacttttctctttgttcttgagtcaatacaaataacgagaattaggctattatcgaactgctcggggcttaacctctataaaattcttgtgtctttacattgctttactatatatcaattgctataaattacttatcgcttactaaataagactcactgtcgtttgctaaaagcgaggtcaacaatttgaaaatcgtattactgttattttctcgcttttattgggtcaaaactatcgtatattaaacacgtctttaactgttgaatctggagatgtctcgatagaaacttgattatagtggtcccaatagcgagctggggctattcttccttccgaggtcgacaatgtatgtcttgtgtcgatcgcggttatttacaaagaattattttgactcgctaggattgtaagcctcgctcctgttagc

SEQ ID NO: 336948 - DNA, 678 bp, Cannabis indica
acatttagtcacaacaaattgtaatttttgtgactaatacttttagtcacagactttttagtcacaacacaataataataatttataattagccacaacttttttatctttagtcacaaattttgttgtgaccaaaagtaagattttttgtagtgaaaacaaaatcatgtcatacagacaaactaaaacactcaaaacctactatgtcacagaattaaactaaaacactcaaaataatgttgcagagataaaactaaaacactcaaaactatgtcaagactaatcacagtaggaaaaatcgaattatagtagcaaaacataaccccgaccaagccgcaccttagcctaagtaaaaccagggctgtaatgaccgctctagtttatgaattagtaaaggcaattagcactaatttttattattttattattatttgtgaattaaattttaatgtggaccccaatatttagaaataaatattagagttataatttctcaatttcggagattttattaaactctaggggtattatctagcttatatgtgtaatatgttatttttgtaatttttattcggcgacaacggaaaatgcgatggatggctagattaatcacatgggtaattttagaaccctattttatagtggggaatattttagagaaaataaattaccgggatt

SEQ ID NO: 336949 - DNA, 678 bp, Cannabis indica
cacgagaattgataactcggggtttctggtccaaaaagaaaggacggaggtagggaaccgtcgaaagatagaaagaaacaaaggaagcatgacaaatatgtgccagtgtatactatttataatgagcttaatgaaacttgggaaaatatttaccttgcacatgagcagaaggcagactttggtaaacccgagcctatgaggaattcgaagagcaaaagagatcctaataaatattgtaaattttataaagatatcgggcatacgatcgaagaatgtcgccagttgaaagatgagatagaaagtatgtgagaagacagggccagggatacaaccagcctcgtcctaataacccaaacgaccaggggttgcaacctcttcctgtggaaggagacgacatcctggttgttttgggagggctgcatattgcaggggaaagctgttggaattattttaccaggatctagatttactaacaagtatgtttcattaaatcctaatatgaatttctaaaacaatgaaataaacacataagggtttaggaaaccttacattgggtgcagaggaatataatgactccttccgttaagatctctagcccttgattcctttctctagcagagcattatcaagatctgaacctggatctctttctctccttccttgagcctgattctcctt

SEQ ID NO: 336950 - DNA, 580 bp, Cannabis indica
tgtatttaatcattaaaacactttgctatctctaaatgatattccagtgaactaatataatcactgaaataagtactcaaccacttatctctgttaagccaaacttgaaggaaatcatcgtttgacttctatattcagatagaagctatagattctgtatttatgattagcgctctcactcaattgaactaccatgtccttaacctatatgtcacgagaagaaccgtttggtcgactttaccgaacagatttaagaacacaaataatgcaactgaactagaacctaaccatctcaggattgagatcattttatctaggatcaactaggttgaattgaatagatattacgagaagtataacatatagagccaaagttcaatatcggtcccttccaatgcatactccaagcatccaacccaagcttactttaaccaatgccttggaaaggacataacacttatccaatgtgtaagtaaactacattgtagattatcctttgagttaaatcttgtgtgctgataaatcataagaatacatttaatcatataatctttattactttccactgtgctgacagcac

SEQ ID NO: 336951 - DNA, 593 bp, Cannabis indica
ttgaggcaaagctccagccgcctcaaccggattgagatggggcaaccggtttttgatccactcgtagagatgtcccaatcagatcaagttttcgatctcatctttgagattcttgcattcattggtgctgtgcccaatgtcgttgtggtattcacatctcttactggggtccctccgggagctgtccttgtacaaaggaggcggtcttcggtagtgcgtagttgggctggtagcaaaatatacacgttcttgggagtccgttaactccgtgtattgggtatattggggagtatactccctttttgctgcttatcctccgtccggttgctgcctttagaggaccttttgctccaagagccttgagaaggactggctaaacttgcggctggagcggagtgcgacggggcttgtccatttatccccgagggatttccaaagtgggaagatgcaggggccaaggccttgccttgactatatccgacagtagcggaaaattgtatgccgctcatcggtggagctgctgctggaaaagtgcctgggagctgagctccgggtacatatcctgctagcccggtggaatagtatcccccata

SEQ ID NO: 336952 - DNA, 530 bp, Cannabis indica
aaccgtgatagtgatcgcttgggtccgagttcccagtataagcttccatatggggcatcttaaattttttgggaagctctgcttcctgcatgtgcttggcacatcgctcccggtcttcacagtcagagtcggagtcatcgcctttttgtcttcttgaaactcgggcaatgtcttttcggagtatggcaagctctaccatgattccttcgtttaacgttcccgtaaagactatgggtccgtatttcttttggtccaggtgatcccggaaatcaccatggttcccattaatctgatttctcaaatcaatgggaggacattcctggccccgtcttcctctccctccgggcttttggtgcacaaaaacactctttcggtcctctcgatcctgagggctaagactccctttttggagtttgcctctctgcggacctttccctttcaagaaatctgagcggacctttcgcggatcctgcaccttttcttttcttggggcggaagtagggttttcttttggttcccttcggagggat

SEQ ID NO: 336953 - DNA, 1649 bp, Cannabis indica
tcaccctacacatcccaaaaaataaagaaatttcacaagcacaaagccaagaccattgtgcatcacttttctgtaagttatattaagagaaaaagtagttttcaagaagtaataatcattctaattgaaatagttaaaattatatatttctaatagttgtacccctttgttaaatgtggcccggacccatctcgaaatatttttccccactagtcacaatgaattcgtactactaacacttgaatatgaagattggtttgaagttaaattttgttataatgactcctttttcaaaaattgaaatattctattatttaggataaatttcaacaaggtttttccttactcttatagtcgttagtgttctttcaaaatctaaccttacacatgttaaaaaatggtgaaatttcatacggacgaagccaagaccgttgtctataacttttctattggggtttgggggttttcgatttggggttcttagtttaggatttggggtttgtggtttggggtttttaggtttggaggtttggggttaagttgttttacattaggtttttgggtttggggttttgagtttggggtcttgggtttttaggtttgggatttaaggttttggggtttgggattaacggtttgggttttggtgtttagagtctttggcttttggggtttgaggttttgggtttggggttttgtgactagggtctagagttttggatcttggaccaagtattttggggtatgaggttttaagtgtggggtttggtgtttgggttttagggtttagggtttttgggttagggtttggggtttggggtatggtgttttcgtgtttggggtttttaggtttgctatttttacggattagggtttggggtttagggtttgatgtttggggttttaagcttttacggtttatgggttttggggtttaggggttggggtttgggttttgggttttagggtttcgggtttcgggttttgcagttttggtatttgggtttttcgggtttggggaatctctataagaatgggctggggaatgggaatgggaataggaatggaaattggaatgggaatgggcatgggtcagggaatgggaatggggattgggaataggaatacgaatgggaatgggccagggaatgggaatgggaacgagaattgaaatgggaatgggtcggggaattgtaatgggagtgggaatatgccgaggaatggaaatgggaatgggctagggaatcagaatgggaaagggaataggaatgggaatgggaatacgaatgggaatgggacggggaattgaaatgggaatgcgaaagcaaataggaatgggaatgtgaatgggaatgggaatgggtcggggaatggcaaaggcaatgctaatgggaatgagattgggaatggggatgggaatgtgaattggaatgggaatgggaatcggaatgggccagggaatgggaatgggaatgtgaataggaatgagaatgggaatgggaatgggtatagaaatgggcatgggctagggaaagggagtaggaatgtgaatgggaataggaatgggattaggaatgcgaatggaaatgggaatgggaatgggccagggaatgggaataggagttagctggggaatgggaatgggaatg

SEQ ID NO: 336954 - DNA, 507 bp, Cannabis indica
gagggggcatcgggccctgttctttccacccacttcgccctgtagggcgcgtatctggtcttggattgcgatgtactgattggtggtcagttggacagtaccctcaacaccgccactggagtggagggtggaaagtgccccgttgtggctgctggtgtagatttttcccctagcataagggcctatagttttagggaataggttgacaggtctcacattacctcgacctactctgccgttgatgacatccatgggaggtgctctaccccctgacagcggaacgttcatcattttgatgttgatggattcgttgttaagacctatatttgcttggtttcaagcccttatgattttctctctaaattagcaacaaagtacttcttcgtttcccacagacggtgccaaatgttgtcgagcaaatttcacaacaccaaaaatgaataataataataataataataagaagaacaatatgatgaacaagtgcgagtactcaacctagaacgg

SEQ ID NO: 336955 - DNA, 512 bp, Cannabis indica
ccctattatcccatcttgctcaactttcacttgtgttatttaagttttctgaattactttcattcttttgaatcataaaaaatattgattttgccaaatagaattataagtataatttagtagtaattaatccaattccatgtggtttgacctcacttgcgtgagaatactacttgattgcctgcacttgcgtagtaatttataattttcgtaacaattattctattttaaaatagaagaaaagatcattaattctaatgtaatatgagaaaaaatttaattattttttttaccaatttttttatccattttaaattttattccattccatttctatttttattctcgttctcattcttattcttacgtttttattcctcccaaccaaacgccacgtacctaagtgtttgctagtttgtttagtagtaatcaaaagttagttaatagtttgttattttcttttaacttttttgttttgctattatgaactattcaatcagtataaataagat

SEQ ID NO: 336956 - DNA, 915 bp, Cannabis indica
actttatgcttaagtcgtcctgaacccaattaccaagctcatcaaatggttaagaacattctcaacggaagtacgaccactgtaccatatgcactagagtagcgaatccatactcgtgttggtagagacattactgtacttctgggagttactaagtgttgtaccacatgcaggacgtaccctctggtactcgtgttggtaacactgtaactatcctaaaaccttacactgtactaacactcttaaaactattcacttctcagtgttagtagtgtatacaaataataacaagcattcaatcacatatatatatattatactatcttacctcgtttctgagctcaggtgtgccggtcagcttgagaggaattgcagttcgacgttttacagggccctataacacaatatttgtaactctggtgagagacacactaaaacacttttcgagaacttaaaatcaaaactagaaatatccttattgatgtataggatggtgataccctaaagatcacaaaaaaggacaaaactagggttctaaaaatgacccaaccggcagaccgattccccaactggaatttcggttccctggggatcaaacggtcgaccagttcagtgctgggaacctcaaaaatatcctcaagacctcaaatcacacccaaacttctcaatattcttcagaatacctgtatacattccaacataaccaattcaagcactagaacacaataaatggctcaaaaattaaaaacaccattaaaaaaaaagatttgagttcttaaactcaaatttcactcaaacaccaattcaagcaccaaacctagcttaaaatacctcccataactctaaaatatctcctgaatatagaattaaacaccttcaataccacaaaaccctaattccccaaaatcatacacc

SEQ ID NO: 336957 - DNA, 854 bp, Cannabis indica
tgaacatggatttaagctggggcagaaaagactactacagctggatgagttggaggaatttcgaaacgaagcttatgagaacgctaagatttacaaggaaagaactaagaggtggcatgaccgaaatttagtcagaaaggagtttcaacctgggcaacaagttctactcttcaactcaagactaaagttgtttcctggtaaattaaagtcaaggtggtcagggccatttacagtgatcaaggtgtttccttatggagcggtggaactaaaaggtgaaggccctaatactttcaaagtgaatgggcagcgattaaagctctacttgggaggtcaatttgatcaaaccaagtccgccatgattctggcgccactatgaagatctcgatcaacgtctagctatgcgacgataaagttagcgctaattgggaggcaacccaagtgttctttatgatttagttgaactctttttaagttttactgttatttttctttttcagtttgtccagttttgttaaattaaaaaaaaataaaaattccagtggccgcggcgatgggagatatggccgcggccatttaagccttacagagagaagcaaattttcacgaattctggccgcggcgaggggacataccgccgcggccatttaagccttacagagacagctattttttcacggattttggccgcggcgaggctatatctcgccgcggcgagaatggtcagtttgcttttaaaaaggggcaaatccctaacatttcaaaaatcacaccacattcaaaaccttaacctctccacgccaaaaacaccttctacaccatattttcttcatctaatcccattcaaaaccccattc

SEQ ID NO: 336958 - DNA, 1279 bp, Cannabis indica
ttcatcgtcagccaaaggggcatagatagagccaaaccccaaaaaaattcaagctttattaaacattccttacccccaaccaagcacaaagatttgcaaagcttgatcggaaaggttgctgccttaagccgattcatttcccgatcaaccgacaagtgcatctctttttcaacattttaaagaaatgccaaatatttgaatggactgaagaatgtgaggaggcattcagaaaactaaaagagcacatggctaaaccaccgattctatcaaagctggttcacagagaagacttgttattatacttggccgtctccgagaacgctgtcagcgcaaccctagtccgggaagaggacaaagtctagcatcccgtgtactacgttagcaagcgcatgataggggccgagatatggtctccgttgattgagaagttagttttctgcctcctgatggcttcaaaaaagttgagaccctacttccaggctcaccccatcaaggtactaacaaatcacccgctttggcaagtcttacagaagccggaagcgtcaggaagacttctcaaatgggccatggaattgagccagttcgacatacactacgtaccacgcatttccataaaaagacaggccttagcagacttcataacagagtgtaatgaagcagaagctagttcaagcgtgtcattaccgcgaaccccagcatggaaagtgttcgttgattgggcatcgaacaaaaacgattccggtgctggaatagcaatgatatcgccagacagactccggctccaggcagcccttcgttttgcattcccagcttctaacaatgatgccgaatatgaagccctaattgcagggttaaagttggcaaaaactgtgggggccgcaagggtagaaatcttcagcgatttgcagctggtggtaaatcaagtcttggaagaatatcaaagacgtggagagaaaatggcagcgtacgtaactattgtccgagaactgctccatgagttcatagaatgcaaggtggaaagaagtcccagagagaagaacgctcatgaagactgtttggccaagttggcatcagacagggagatagagagactgggggtagtgcccgttgaacacctcgcggagccgagcatcagaattaaagatacggtagttacaattgagcaagagccaagttggacagaccctatcctcagatacataacaaaaggtgagttgcctcaagaaagggccctatccagaaggctacagtatcaggcacatcgatatgtgatgatgga

SEQ ID NO: 336959 - DNA, 741 bp, Cannabis indica
gtacaatgataattagataataccaaagctcttctgttgcgtacctgatttagtaccataaaacctgttatacccaaaatttggctaccatctcagtggagaacacgtgtcaagataaagggaatatggatcgatgcaatcgctttatatggaataactcattaattgcatgagtgtcaaggtatatttgtaacctgcagactgtaaggtcttatgcaagaaatcaatataaaaactgctgcttagtatattagcgagaaaccatatgttactgaatgcgaatagcgagggatcaaggaaagtacatgtaggaagacgaaagcgacatatatcaattgcgaaagcccttagtgtacaaactaagtgttatagtcggatcggctcgagaccaagtaagtgaggttcctttctcgctagggaaaggcttcttataacttcatctcgttagcgtcagcgaggcttgcgaccctggcaagtcagaagctaacattcaaatgagcttcgaagaactctttgtaattaagaaccgcgattgacacaagacatgcatcgtcaacctcggaaggaaaaatggccccaactcgctattgagatcacttgaaccaagcttctgtcgggaaacctccagatacaataattaaagacgtgtttaatccacgatcattttgacccaataaaagcggaaaaatcacagctatatgattttcaaatcataacagcatttacattacgtgatatgta

SEQ ID NO: 336960 - DNA, 783 bp, Cannabis indica
gatcggttccggcacttacaaactaaaaagaatggatggaaccaggaagtattaccaatagtacaaaaaatgtaaactaaggctttgttaagagaatttgtaccgaaaagtatatgcaacctctaaatttatgaataaagctgagtgccttaaaaacaatgttttcatgccactcagggaggtagtaaggcataccacacagacaaatgtaaaacaagccaaaagtgaaagaaaaatcaagaagaatatgtatctaagcgaaatatatatttaaatgtaaatataaaagatgtcctaacccaaaaacaggccctaaaaaaaatattaagggcctggggacgagccttaaaaactgtctccccttagaagataataattaaattgtcaggaaaaaaggaaaatagtctgtaaatataaaaataaaaagaaaaataattatagtggtgaactggtccaactcgttggcctaatcaatgtggggtggaagacgagacccccggcgctcctcaagcaaggcgtcaagccttttctttttctcccggaagcgaacgaggacttcctcaggcttgggataaaagtcgagtttgaggtagcggccatttgactgccaggccatatatacgccatcgtcaaaacgcttgacgcattgcttgcagacgacaggggtcaggagctcatcccttttggcccttttcaagggcttgttccttaaagttgttggaaattactttaccaggatcttagatctaatcacaagtacgttgattaacatcctaaatatga

SEQ ID NO: 336961 - DNA, 551 bp, Cannabis indica
tgggtctaagtccttggttctgatcctggtctgggttcgagtttgggtccgggtctagctttgggtctgattttaggtgcgggtgtttgagttcgggttcgactctgtctcccggttagtgtccaggtctggacctcgatctcagtctaggttcgagtttacgtccaagttcggctcacgagtgcgggtcaaagtttaggtctgggtcaggatctccgtcgagttctaggtcaagcattttgatcccagtctgggtccttgtccgagtccatgttcgtatctggatccctatctaggtccaagtccgtgtttgggatcgggtccaagatttaggtccaggtacgggtctcaatttcggtctgggtacacgaccgtgtccgggaccgagttccagtctcagttttggtatgaggctaggtcagtgttcggttctaggtctgggtccgggtccaggtcacggtcctagtcttgttctggggtcctagttcggcaattcttgttcatgttctaattttgggtcccaagtctaggtctgggttcgggtttggttc

SEQ ID NO: 336962 - DNA, 567 bp, Cannabis indica
tagggtttaaggcaataagtgcgtaagtgtggtattggtgcctgactcgccgggggttgttgattactgggctgtttgtaaaatggaccctccataatcatctagaccacagggcgggctagtagagcccggtgtagaccaaaccaatccaccggcactgcctgcgcctctgctaaatccaagggataatgcaagggttggcaatgctaatccgcctgctgaatggcagcagatgttttaagaaatgtgaagtatcatacttcgtcaagaggaagagttgcatcagttgaggcaatcggcaccagctacccctgttgagcaagtgttaccacctgcacctgtgccagtggtgggtaatcaggggtttatgatgccacatagagactccgtgtttgaatggtttgtgaagctgcaacctccaaattttctgggaggtactgacataattaaagctgagcagtggatgagtacaatcacctgtatccttgataatatgagggtaataggaacaaagagagtaaattgggcagcttttatgttacaagatcatgcccgcgtctggtagga

SEQ ID NO: 336963 - DNA, 350 bp, Cannabis indica
cttaagggtattttgggaatttcaaaaatcccgacaagtcccgacattcccaatgtctaactataccgccccgctttactaaaatactaagatgtgattctactaagccatacaccgcgttccaatattgccgggcaccgaacatgcaaaattatgaaatttctatatatgacatataaaatgcattctgaatgcaaataaatcactataaattaataatttagaattaataaataaactccataattaaactctaattatctgctaatttccaaatttaagctaaacgatatttacacatccaacccaagctttactttaacgaatgtcctggaaaggacatagcactt

SEQ ID NO: 336964 - DNA, 647 bp, Cannabis indica
aaatctaactcagttgacctacatttaggctaagggaaaaatggggtaccagacccatacaagtcagcaaaaccagctactacaaccaatacatagtgcatacaacaaacatcattccaaaatagtaactctaagtccaatttggctgacctacatttagactaaggggaaaatggggtacctacatttagtccaattgcatacacctatcttctttttatgtgatgagatgtattgaccaagacatatatatacatatatattctcccatgacacacaaacatgcatgccatacgcccaggagagttgtagccatcacctttacatatatacatattacttgcatattagtccacatcaaccctttttatgtgatgagatgtattgaccaagacatatatatataagctcctatgacacaaagtcatacgccagcccattctctacgccagccctccctcctattgatatatacaacctattacattttgcattaatgccaagcacacatcagtaaataaataaaaaaactgttacactacttgtcatatacacatatctctatctcctcacatcagtaagtactacattgctgattatgaagaattgctcctcggccctcatccgcagcaattcttcataatcag

SEQ ID NO: 336965 - DNA, 542 bp, Cannabis indica
ctggggtatgtcccaagactcggtcttattgtctcgatactccatcaccatttttccacaacactggatctcagcctccagtccaattttgattaacacaccttccaacatgtccacacgaaattgggcagtagcaagatcagccaaggcaaacttcaaacgattagaatcttgctccttagcatcgagttgagttcgtaactcttctttcacacggtcaagctctttcttgcagcccttgagctccttaatctccccgcgtaaattgtcacactcagtcctcatgtccttcatttgctccttcctgttcttgatcttatcaaaagcgtacataagcccttgcataccctgtcatacaatataaagtaccataatagtcagacacaataatatcgcgagtttatccacacataaattgtaacataggaatacatgcatacctgaaaggagcgagagatggacaactccatggaagctatttctccgatgctctcaaaacgagctcgatcctctagaaataatagcttactggcctcaccaag

SEQ ID NO: 336966 - DNA, 1124 bp, Cannabis indica
ccatcttatggtcggccacttaacgataattttagcaaattttttatcatttttttaatgtcatataatttaaatctaatcctaggaaaaatcctatataaggagtaagatggttcccattctatccaacttaagtttacctagttttcattctctgtcagacaactagaaaacttgagaacctccttctatagaatttgaatctcctttctttcttcttcataatttcgagccttatagtgaaagagtgcatgcctacccatagcaagtctagtactcaatcatagtgtgtaagactatgaagaatccaacacctgaaggagaaccgggctcagatcttgataatactctgcgacagaatggaacaacggttggagatctaagtggaaggagacataattctactacggtcaatttaaggtttcttgaactttatatgtgtttaaatcccattgttttaaaagattcatatttaggatgttaaataacatatgtttgtaaatctaaatcctcgtaaaataatccccaacatttcagaggtgtccacggtggttctccgtttatgtgaaaatttaggcataggttaggtgcatcatgggtcgacgatggtgtcgtttcagtggaaatcgcgattgaaaaaagaaataatgagtgagagggaaagagagacagcgcgagagggaaagagaaagagaaatggggagtctaggtttttttgaataagaggggtgtaagatttggtgaatgaattatgtattttactcgatagaatagtatgtattatatacaaattagagaagtaaacaggaaactagaaaaaataggaaactaactaaatacaattaatataactaatatattctaacacttctcctctggagcataaatgtcaatcatgcacagcttgttacaaagataatcaactcgcaccccatgcaaagcctttgtaaaaatatctcctaattgttctccaatcttcatgtattgtgtgaagatcagaccttgttaaattttctcacaaaaaaaaatgaaaatcaatctcaatgttcttagttcgatcgtgaaacacgagatttgaggcaatatgaagagcagcttaattatcacaccataattttgctgga

SEQ ID NO: 336967 - DNA, 1159 bp, Cannabis indica
aaaacagatattattattattatatatgtatatatacaaatataaatttttatactgaaaaaaatatagtgatgaaaatgaaagggactaataattaataatgggaccaaagacaaagagggtcactattattatatcatcaattcatatacacttttttaaaagctttattattatctctttcattattttgaggtgaaattcatgctgacataaaaaagaaagaaagtagtgtgcctatatctaaatatatcaataaatagtcctccaatcaaattttactatttttgtcattatatataatgtgccttactatattagatatttttcatagaatctatatattgattttctctaaaaaagagaaggaaaaaaatatttatgtggctacaaataaatatatataaaccaatagatatttttcgcatagatattaaattttgtgaaggaaaaattatatgtacttctttttgaatttttgaatttatctatagtttcttttttattattatttaattttattgaatttaacccttaagttttctaataaacatttttgttattttttagttgaatctaaataaaatataaatattttaattccaattaatgtttttacggggttagaattataagttcatttttaattaattttaatgctgtgatcgtgtttgtgtttatgtgttgaaactaatttagtttttccattagtcttgtcttttgacatggttatttagtcttgtcttttgacatgattttttagtcttttccttttaattttttctagttggagtcttgtcttttggatgggttgtgtagctcagaatcatcatggtgctatggtaaaaacattcaagaaggggaagatttgatgtattcaacctgtaattgctgagataatagatattaaagaagcattgagttggattacaactcattcgcgggatagagtcatgttggaaacagatagcttggtgtgtgtccaatcgatttagagcagtattttatgccttcacaattagtattttgtaaaacgatatgcaaataagttggctcattgcttggcaagagactcttgtttctctacaagtcgtgtgctacagttggaagattgttcctctgaagtgcgttctattattttgaacgaatttattaatta

SEQ ID NO: 336968 - DNA, 822 bp, Cannabis indica
tgttgtagtcatctaggtgcttcattagttatttagtttcatccattctcaatgtatacagtttcttcttgtggtagagttttttggccaaagaattcttcatgtaaattgatgccaacaagttccagaggcctagagccttttcttcatcagcaacttccctcagaacctcatctccaagactaagcaagatagcactgtgtgcttttgtttcaatttccagcttctttcttttgtcatcaatcaagtccattgcatcaggatccagagcctcatagatcccttgatgcactaggaaagctctcattttaatcctccataagctgaaatcattggagctagtaaatttgtccacctcgaaccttgcagaagtcatttcagatcgggttcttgaagcttgaatctgattcttgatgacttgaatttggttcttgaaagtttgaagatgaatcttgaacacttgaatacagttcttcatcttcaaaatcaaccttgctctgataccatttgttgtgaagaacacccttgattcttggccaaaccagtgccaaagcaacaagaacagcagaaaaatagaacaagtaatcaagatataaacttcaaaccagaaaaataccagaattgaacaatgaaagataaatagacttagctttgaatcaaatagaaaactttattcaattgtcaagcacctttacaatccgatccatgtattcaattgagtctaagtgtagaacacattacaaatcaaacctcacatggtagaagtcatctctaaggatgagcaattctacttttacaaccctcctaaacactcacaagatt

SEQ ID NO: 336969 - DNA, 537 bp, Cannabis indica
tttctcaaagtgttttctcctttctcttttccaaaataaattcctgcaaaaaatgtaattaaactattataaaatgattatgcaactgtaaatcaacttaaaaaccacaactctttactcaaattaacatagttgtttctcattgtcacttttcatcatgtttatttgaatcagatcaatttccaactattataaaactaatttgccaccatttacataaatcgtaccttgtatatctgctagcttttggtacacgtcaagtgacactccttcataatttgtaaaccattttaaaacgatattgcaactgtaaggcaacgcaaaaaattaaaaaaagccttattcgtaacatgtggttccttaattagaatcagatcttgttttttgtttttaagaatctgaattgcctgttgtacaccagtgaatcaaccagaatgcaactgtatatgacgtatattcattgttaaaaaaaaaattcatttcatacctttttttggtattcgagggggagctccagatctgtttaatacagattta

SEQ ID NO: 336970 - DNA, 671 bp, Cannabis indica
aattatttattttacatctacatgtacctattagtataaggggcaataaggcatttgtctgaattagtcatcctagtcattcgagtgactagtgcttggcaacaattactattagcccctgcatcgatggcaatcgcacccggattcagaaattcatatactcgattcagcccacccatgtccaacagtctttctttcaggtacctgataaaaagtcataattaataactgttgctgtcaaaagaacattatcaagtttattattaagagttagaaattatacttgcaccaaactcctatttgttgggctcccaagtattgcatggtgcacaattccttaatgtcactcttagcaagccaaatagagtcatctgcgaccccaaatagctcattatcaacttgtaattggatcatggatgacttgcgccaccttctaacgaagttccaaaaggcaataatggagaaattttggcatggttggacataacaagcatgaacttttaccttactcggcctctcagggtgttttagaggctgtgttggaggaccaagtaaatcttcagagcttctcttcacaggttgcttctgaagtttctatgtgggtggttgtgtctatatatatgaaaaaaataataaagttagcaatgtcattaacgaataaacacaataag

SEQ ID NO: 336971 - DNA, 661 bp, Cannabis indica
accgacctgtcatatgaagaacaaccagtacagattttggacaagaaaaaaaaggtgctgcgaaacaagactattccgctagttaaggtgctgtggcggaacaacaaggttgaagaagcgacttgggaattagagtcgcagatgcgtaaattgtatcccgagattttcaggtaaatttcgaggacgaaattcctataagggaggatagttgtaacatcctggaaaataaaatgatatttaaaaatgatatttaatagacatattttattaaatatgtaattattttggtaacgaagtaacattatgatcttacttagggtaattagtaaggaattattgaatgattataccaagcgtaatttattaattacgaagattatattgagatatatgggtatcgatgatatcatttataaaataaaaatatttttcggacccggcgactgtggaatttagcaatgtggtcagaaatgtcacgatattgatgggagaattattttgaggatattccggactaggttagaatttttagaatgtcagtttaatagattagtaaaattaccaaaatgcccctatgttatttttaaaagttttgggaggtatattttttcttttagtgattttttaatttttgcccatttgacttttttagggctgccta

SEQ ID NO: 336972 - DNA, 975 bp, Cannabis indica
atttttaaccgtttttgttttttaaagactttttacatttcttttgctatgtattatttaatgtttgatttgtttacttcactttagagttttgcaaccaagaggtagtttcaattgaatgtttcaaatttgacaacatcaaacatcccaaaatatttcctctattaatcgaaagtacaaaaagggactttctgctgcaatgatgcattaactatcaaaacttcctctccttgttgatcatgtttttactacgttgcacatgtgacagacagcttgaaggatgtagagctgaagtttcccttaatctacttggtggattgcacacaaaatgattgtagtttgatactaagatcattaaatcaggtgagtcttttggaatgcttgaatatttattgccttactatgttcatgaagcttcattcatatagcttttctactattttagtccattaatttgctgattgaaagagatgggaattgggtctcgctatatgttctattctttggcctttagtccacctgtatgaataaaatcactttcatataatgcctagtaaactgaaattggtccactctgtagattatggtatatttaccgttgtgggcatttaaaagataataaaaatatgccactgggtgcaggtagtttcacctcttctgtaaatggcaagctgggattagttatacacgactctagtcatcttaaagcaaggtgttgaagttttgattcatcttttgtaaaatattgttgaaataggcacaagaaaggctgttaattttggtaggacacgctaatttttttttaaacaaaaagtattaatttatgctttttttagtgtcttaaatattcggatgtgataagtccgaaagctgcaattataaatgaagatgcattcctgccattcaaccgaatgtgattttagttttccctgtgtttggtgtccttggaatttgcagatggaagcttatcctgct

SEQ ID NO: 336973 - DNA, 1244 bp, Cannabis indica
acttagcttcacgcttcagttgaatcaactcattctccggatgagctcgttcaggccgagcaacagcagatttccccttcttccccgtcacggacttagaagaaaagtcctctgggtaaagcccgtactgcaccagattttcatcgaaggtcaactggatgatatccctgtcttccgccggcaaccgggcaaggttttgagccctatccctaagagtaagggtgaggggaggacggtgatatgtcagaatctgctaaaaccgagtccgggtgatgttcggatccttcaccatgaagtactcatcaacaaaacgccctattttgctgatggccttgtggtctgtcccgctcaaccacttgaagcctggctgagagaagtaaaaataccccgacctgccttgcttgggggtagacttcaggtcgaagaaccaagcgacctcgtggggagaaggagcatcccatccctgggaagcgtagaggacgaagagagcggacaaatacttaatgcccttgggagtaatctgagccgggcagaggccgaagaagtccgccacatcccggaagtacttgtgcaagggcatcagcgccccttgctggccgtgacccccgaccaggcacacatccccttatcagggtttgtggcacgattgtcgtgggcgggaatgtagcagtccagctcgcccaggtatccgtcctggtcgagagtgcgaggcgtgcctccgaaatcttggacggaggactcacccacctggcgcccaaggcaccctgcctcctatgaggaaccgcctcagcaagctcctcagtgacgtaatcaacgccctcaaccaggacgtccccgtcagcatcaactggttgcccagcctcattgtactccccataattagggggttcaatctcttcctctccctcagcagcgggagggctgcccggacgcgcctcgtccagctcctcaacctcctggacttcggcgtccccctcacggtcctcctccattgggaccgccaaatcctgttcggcgtcgggcagagtggcaagccgagccacctgggggtcagaagcgtcagccagacgcgtagttttcttcgtacgagccatcattctatggctgggtacggaatcagaagaatatccttctcttgaaggagaattagcacgaagacgaggatggacttcgtgcagaagttgaagcagctcctggtcgatttgatgctcgggctcccaagactcacctgggttcatctacaa

SEQ ID NO: 336974 - DNA, 565 bp, Cannabis indica
cacaaggtttttttacgtggttttgcagttaaaaatttgcatagtccacgagtcaatcttatttagatttctgattgtgttttctctttagggcttctcttatataagattttttcgtcccttttttgagcttttctgccactatttataattacatagtgggcagttaattacaaagttgaccgaaataattttacagcaatcatccctaaaatcgtgggattatattatgtagtgtaaatgtagtttatgatttgaaaatcgtatagctgtgatttttccccttttactgggtcaaaaatatcgtgtattaaacacgtttttaactgttgaatctgatcccaatagcgagttggggccattcttcctttcgaggtcgacaatgtatgtcttgcgtcgatcacggttatttataaagaaatcttttggcttgccaaggttgtgagcctcgctcctgtttgttggatgaagctataggaagtcttcccatagcgagatggtcatctcgcatacttgttctttgagccgatccagcttttacacttagtttgctcattgcaagcta

SEQ ID NO: 336975 - DNA, 936 bp, Cannabis indica
aaaacaaaaaaattatttaaattttttttaaacagtttttttcttaatcaatattttggactccgacctcaacctagaccttgggacccagactctagcgccgaccccaatcctggactcggactacggccccagccccagacccgaacctagacctgacttaaataaaattaaaaataaaaataaaattgaaagttaaagaacacacttttgttttctgtttttaaaattgaaaaacaaaagtggttatagaacacatttttatattttttaaaaaatatattaaaaacacaaattttacttttattttttatttttaaaattaaaaaacaaaagtgttaccaaacgcccccttaattaataatacaaaataatcataacacttactgggtatcattggagtttgaatatatatactgtaacatatctctgtccttatttcttagtgtattttgtagtttaaaatcttcaaagaaaacattatctcctttggaagtatttatgggagacacattatcttttgatgatgaattattttctactattgcacacaattcttcctcatacttccaaccaatattcatccgttttatctttttatcttcaatattttcctgtaaatttatttctgcattcctttttgttgtaagacactctctgatttccttcaattctttatctaaattttaaattttatgctcaatgctatttctctattcatgatcattcatagacttcatactattaaaataataagagataaaaaattttttaaatttttttattattcaatatatatggccatcataattgtatagcaaccatatattaattttaaaggaatgtttccattatgaaaatataattattattaataaaaatattattaaatagccaattaaaataatccaaatataagaatatattatttaaaag

SEQ ID NO: 336976 - DNA, 887 bp, Cannabis indica
ccatttctctattcaaccaactacagttagattttctcttgatttttaataattcgcttactattttcctattgttatgcttatttgtgaaaaaaaaagcaacaattttaattaattggtgatctactttgataattttttttacaatctttagattgatgaaatgatttcaacgaggagcgaaaataattaacaatcattaattttatagttgttattacatcttctttacacaaaatttttcaattttttaaagaaaaaaaaaaactatataacttgaacccatcttggactgacacactataatttggcacttaaaagtgttgaaaaaaaaaaattgagcgtaaaattacctctaattagaggtcattcatactattttttaataattaagattatgtgtgtaataactttaaattataaggagttttgttgcaattatttcaattatttaagtttgaaaaaataattgctaaaagatctttacttattgataaattgcataaaattaattaataattataagtaatttaattttaattaagtttttataagaaaataaaatatcaagttacgagttatttattattatttttttaatttctaaattaataatcacaaccattcaacaataatctaatggtaaaaaataaatataaccataataattacatatttgatgtaaccgttgaaataagctccttctaatgtgatatatattatactaataatataaaaatatttctccacattcatagtcacctacaccccttcaaatagtttatgaaaatataatttaaaattaaattgttatgtagttcttccctctattaatttgatgaaaattatttatggggttttttcatttttacatttcaaaacagttt

SEQ ID NO: 336977 - DNA, 590 bp, Cannabis indica
aacataaaatgttatttctgatctttattaactagtaaatctaattatattgaaatgggttttatttagggcacaaaacccaacactctgttgttcagtcaagtcgttcttaacaaactgtaggatagagttagaagtgataaataaaatactagaacctagatgaacaactaggctctcacataacaaagaaacactcttctctcgaataagataaatgcaaaaaatgaataatgaaagagctgattcgaatggctgctctctaggtcctatttatagaacatagaaaccctagagacagtcacaagatcgaatctacagctgtacaaaactttcctacgatcaacacgatctgcagcatcagaatcgaaaactgacgcagcaaatcagacaagaaaaaggaaacttgctataatcgggtctgatcctcaattaatacttgattcctgccataaacagattagatattctgattgtatcttgatacaatcgaatttaatgagaataaggcatttaatcaaggttttcctttatgaaccaactttctataagagaaaagattctcttacaagaaatttccaaacaaagga

SEQ ID NO: 336978 - DNA, 1244 bp, Cannabis indica
aaaaaattacaaaaatattttaatatggaaaaaaatatatttttactctttgaaattttttatttacaaaagtacatctttagtaaaataataaattattttttggttgttttatagttctcgtgaattcttttttttggttgttttaagctattttataatttatttttatagatgatttctcttttacaaacatatatgtgtaattaaaaatgttaggccataaaattataaataaaacataaaagggcatttttgtaaattctcctttaattttttttattagggctcgtttggtagactgtataaatgttgtattgtattaaataataaataacactatatttggataaagcaatgtattgtattaaattttttaatacattaatgtaagttgtattatttaatacatagtaaatgatccatattagcttgtattataatatttataaagaatttgaggtcaactccaatctctgacccagatctagggactcaaacccgggactttgacccgaaactgaagacaggactgactcgaatccggctcggacccagacttgaaccctgacttggacctaaccggttgtaagacctcggtttgaccgggtcaaaaagtattatatatataataaataatataatatatatgtatgtatgtaaaaaaaaaaaattaaattgaatatatactgaaccttgtcgtcccctctctctctatttatatctctatcattttctctctctttaaacacaaacccaaaagaaaacccaccatgaccaccactccggcgaccaacctccggccaccgcctgaccccacgcgccaaacagaacgggaccccaggtgccggcgacctcaccccccaagccccgccgctcctttcgccaccgttaactcgggatcgcaagtcaaagtttggagtttcaaactttgaacgaattttccggtcacctccggcgtccgtttgacgaatcgtcttcaccactaaactcagctcgtcgaggagaacaacctacactaaaccatttttcccggttcgctactttttctggtgatatttttgtagctccgcccctttccggcgactttccggtgacatagtgtaccattttgacaaacggttggcatgggtgtgatctactcgtcgaggtggtcgttttgatatacactacccctattttcggcgacgttttcggtataccgatttttaccgccaccgattgttaatgtgcaccgcttaggt

SEQ ID NO: 336979 - DNA, 528 bp, Cannabis indica
ttacaaatctgagtatttcaattgtttgatgagttttattttttgcttgtttattttaatgtctatgttagttgtatttttaggttaagataaattagtttgttcttatttatgcaagacaatatttgatcctaactctattggttccatttagaatttttctatttttgtcttatatggagttatttacctaacttatcatcatttaaatgatggttatagaactgaatgtgggactaatattttccaaaatatttgtgtttgttttttagtttaaggggacttactatggaggaatgtttctaaaataataataatagaaataaagtgtatggaagggagtagtactagtacttatgattgtattgatgaatagatgtttggagtagtacctaagattgtattgatagtgtatgaagaggagtagtacattactaaatatttaataggttgttgtattgatattgggaatggtgagaatgaatcattagagttaatcttaaattagtatatatataataggcacca

SEQ ID NO: 336980 - DNA, 767 bp, Cannabis indica
ataatgtgtgatttcctaatgaaaaagattcaattttgatctttgttgtgattcttgactctttgagtaacgaagaacacgctttagttttgaaaaaacacacactttgatccaaaacatactatggccacccctaggttcttatttaagacatggctggctttagggttggctagttttagggttttaccctaggaagctggccggttcatgcctgggtcttgtgaacctggccagtcttgcatgggtcatgtgaacctggccagttcttgcatgggtcatgggaccctagccgaccttctcaatgttttgggaccttggccagcctaggccttggtcccaagtgggtggctagtttttagtcttcttttgaccttggcaagaattctgtcatggtcttatgaacatatacaacctttgtctcatacatggttcccttagaaactttgtatgacactttatggtgagtctaatatagtcgaatactcaacttaagactcaacatttgtctaagttgttacacttgaaattgtactttgttgatacccatccgtgtacgatgcaattatctggcaagtacccttgggtacgttgaaccagagtcttgtctaaaccttgtcactttgtcaggttgctcacctccccctgtcttttgtgtgcagatgatcccaagtgactattggggaggtgactattatatcgacgaagatttacttggtcttctctgttgggttatgtgccctaaataaaacccattacaatctgat

SEQ ID NO: 336981 - DNA, 443 bp, Cannabis indica
cctccagatgatccatctcgctctgcgtgggacatttgcaacaatgtggtcatgtcatggattcttcagtctgtctctcgtgagatcgctgctagtatcatgttcaaaaccacccctcgtgagatgtggactaaccttcacgaccgctttaaccaaagcaatggtccccgcatcttacaactcaaaacctccgttagcaatgtcaaacagggtgataattccgtcaccacttattttactcaattgcaagctctttgggacgagctcaacgaataccaacctaacatcccctgcacatgtgattgtaattgcagcgcaatgcaaaaggttcaagactattacacaagagaccagataattcaattcttgattggtctcaatgaatcttactggggcattacggctcagattttactttatgagccacttccctccctatccaa

SEQ ID NO: 336982 - DNA, 1086 bp, Cannabis indica
acccacaatacttagggccgagcataacacattagttactttctgtagactagtcgctttaatttttagtattttggaagtccccttctcgtagatcgaattgctcatacgtttgacagctagtaccctagtaccccacatttcacattaactgattaactgtaacgagtcgtattatggtatagctgagcaatatggcaccatgacaaatagggcaagtcatatagatgcgagctgggatttagaaccactcgagccatttgatataatcaagattacaggctgtagggattttagcggatactacggtccttctatcccctcttctagtgatagctcgccttcaagtagttttggtaaatttattaggtggaaaattacactccacacttccctttcatttgcctttaaataatttttatattttatcttgtctcgtagatatgcatttcgaggatgtcatggaacggaaagggaagaaaaggggaaccaactcaggggctcctgctgatacggaggtggagccttctaaaaggccaaagaaaaccaccgcccacaaaaagaagaaaatatctaagcctatcgacctcgaggtctctgatactgagacccatgaacatactcctcctccggtcgatcccaacaccaaagcacctcctcctaacacaactcatgcctctgcttcctcgagccagacaattgaaacattatctgtcgcatcggggaagactggttcataatttgcccaggtgtttgggactgcctgttggcgccaactcatggctctcctcccccacgattgggatctaatcaatcgtggcaatccagaagaaatgcttttgaggagcttgtatcatgcccacatggtaagtatactgtattaatccatatatttcttctttctttttcctccctatttcttatgttcatttgctcgtaattctctagacttttttcctctctttttcctcccatcagcaaatcctggagcagctcaaatacttggagagcgagatctaaaagtcactagcccaacgcgaggccatgattaaacaatggaacgacgctcagcaggaaatcacccgt

SEQ ID NO: 336983 - DNA, 547 bp, Cannabis indica
aaataaaaaaaattattaggcttttatttaagtaaaatttaagtgtattataagcaacaaatattcatagcttagttggttgaggtggatgatataagtgaaaattacatgaaatatgggattttgtaaaaaagttacaaacatatggcctttataggtttgccactcttctatggcattttttcacatttaagattttttatggtatttaacatgccatatttttgtaaacctattatccaaacacatatttcatatttttgtttctagcttaattagttttatttttttagtttattttacatttacatttacattttaggattttttttctatttgaaaaatttataccaaatacagtactaacttttttttttttcaaatactacatttataatttaacaaggaaatttttacatttatacttttcttaattttatttttcctttttactgtttcttacttattaatgcttcaaaaagttttttttttgtcttttttatatattttttagtcaattttggctctcttttttcttttcattttt

SEQ ID NO: 336984 - DNA, 706 bp, Cannabis indica
tctttcatagacgttatctttccaaatcattgttgttcggaatgccaggctcgggtgagaggataagcaaccgaaggattcgttatcgaatcttacggggaggagattaccgaatctggatggagagaaaagaaggaagaagcaacttctgattaaaggatttaccggaaatgttgttttgtttaaagatcgatccgacatggaaatgggatttttcagaaaccctccatccatcaaagcaacaaatccctgaacctccatcccattcctctatccaaaacctccacctgcctagttgttcttcgtcaccggattcccttctcttgttggattcgagaaaagagaaggacacatttgggatggttcaccgaaccgcgaaggaaaaaaaggtctctcgagcctcttctacctctgtgacagaaataaggagagacgacaaacaaaggaaggttcaaaccctttttttccatctcggatctactctcggttagtcgaggggcctaccagaggttgaatagcctacacctccctcttttaataaggtcttctccgggcccgacttcttttcgggctaaggaaagatctcttgagcctcgaggtgacgaacaactttgatgaagattatcccaaaccaacacctgcgatctcatttgaaaatctcctcttttccggtgggtggatggattcctttgatagggaaacaaac

SEQ ID NO: 336985 - DNA, 1678 bp, Cannabis indica
atctcaggattaagatctatagacttaagatcaaccagtgatattgacttagaagatataacggtaagtttatgatgtcttatccaatgttaatatcggtccaatctgatgtatactccatacatccaatattgatatacttatccaatacattagaaaggatattacacttatccaaggtgtaagtataccttatcgctgattatcatgtcagtctaaatctagtgtactagcaaattatgggacttaaacttttgaacatataattatgattatatttcactatgctgacaacactataataaatatatgttctggacttaatagaatttatacattaagtatataatcatgaaataaatcatgtgaaccatgcaatataaattaatttctgatcttttattatttagtaaatctgattatattgaaatgggttttatttagggcacaaaacccacaaactcttacttacactaatataaaactaaaagtgcatttcaaataatctcaacaccttgatgtctagatcaagtgtagtatgtagtattatctctgtaataggatttgacaggttgtattcaatacaacctttctccaccattacatatccttaatcacaaaaacttgatattgtgaaattcctctctatatgtctactcctcttgggttactagattctttacttcttggcaactatttctgtgttggtcaagaagcaacactaatagttatatcattattggtacaacgctaaaaactcgatagaactttccataggcttaataagtatccctcctgtaactttaacattcattctcattggtagattagagacttcagataggtttttatacttctctaaaatcactgctccaccccaaagtaatcaccatctcatcaatagactttctagcattaacgcaagtctagaaaactgatttggtgtagtctaagagtattaaaatatcacccttatcaactaacatataattcctcttttgatcttaagatttacttgattatcttccaatgtttcttttctagattaaacggatacctactcaaagctctcactcaacagcagatgtctggtccaatgcatacaatagcatacatgagacctctcactgttgatcattaggaattctttttaatgacttttatcttttctagaataattgaaaatgttccttagataaataaaatctatatataggagtcaaaagactttctatagagttagcgattataaatgctccaacattttactaaagtaagttgcttgcacttgagtaaaccaggcacaccacaagccataagtttagataatctcaaacctataatactaggatccgtaagttttgataagtccattgaatagacttattatcgaaattttccttcttgtccttgtaatagaaaacctttggttactccatatgaatggttttaaccacagttctcttggctttgcttcttagttccttattctgactatccattacttgtttaaactaataatggatttttatcacaagtgtcttccaagtcataacaggttgagttcttggaaacgctcccactacgataaggtattgtgactatttgtctaagaacattaatggtattgtcctcctcagttgtgtcaagacaatagaggcagtaggaccatcttata

SEQ ID NO: 336986 - DNA, 814 bp, Cannabis indica
ggtaataaataaaagatttggacatccacataattattaatatttataacaagtagtaatttttatatattatgtgagaggactaattgggagattttgcataattatacttgcacttaataaatatttaagattactcatactaataatggcagaattacaaaaatagagtaccatctaattacaaaaatatgattatcataactaaaaactagggttccgttaaaataaagtttaacaaacaaccatactactattaaaacataaaacattcaacagtatatattaccactgtaaaatatgaccacactctttggcgaagatgtttcattgttctacggagctagcaaaacatcttttgtgccaccattactcgattctccaagaggatggatgggttcgtattcttcgggaggatttgaactctcaatcttttagttgttaaactaattaaattaccactaggctacaacatatatttagcattaaaagcattattatttattttaaaaacttttacattaatatacatagttttcaaattatttatattaataaccttacataaacaatcagcacaaacatgacgtaccagacaaatttttgttcttttttttttttaattttttttttaaaataaaatttttgcatattatcactcattagtagttgaaagtcaaattttaaaaaaacatgtgcagtccttgcacgttctgttcttttcaattctttttattttttaacaaaatcaggtgtgttccttttttttttctttaaagaaaaatattaatttctctctcttaatagatttttt

SEQ ID NO: 336987 - DNA, 1072 bp, Cannabis indica
catgcgaggcacaaacaggatgcgaaaatctgtagatttcacaaggacattgggcacacaacgaatgaatgtcgtcagttgaaggacgagatagagagccttatctcgcgtggttactttcaacaatatgtaaagcgacaaggtaatggacaaaaccagccaaatccacccaataacccaggcaaccacagattacaacttcctcctgttgaaggagaggacattttggttatctcaggaaggccacatcttgctagagaaagtagcaatgtccaaaagagacatgtcaaagaaatcaagaacgagcggacagctttcactccagaaccatcaaagaaagttaagactgaggaacctccaaatgtgtttttagaggaagacacaaagcacgtgaggtacccacacgtcgacccactcatgattacaatccagcttgccaacaaaagaataaaaagggtgttggtggataatgggagcttagtgaatatcctttacaaggattacactgaagaaaatgggattgcaaaacgcaaagttaaaaccttgcatggtgaatttgtgcggattcactagggacagtgtcgccagttaaggaattattgaactcatgttaactttgggcgagccacctatatccaccacaatgatgcaagactttctagttgttgacttaccatcagcctacgacatattgttgggtcgtcctgcaataattcaactatgggcagttagttcaattaaacacctgtctttaaagtttcaaacactggcgggagtaggtgtagtgcgaggtgaccaactactatctcaggattgctatcgtatagagctacaaaataaaaaagatatcaactaatggcagttacaactgaggaaggcaagaagcaagacaaggatctagatcctcgagttcaagatgaaaggaatcaattaaaaccaatcgaggaattggaagaagttattttagatccagaaaatcccacaaagtgtgtattcattggaaaagatctggatgaaaaactaaaatagatactaataagttttttgaaggcaaaccaggatcagttcgcct

SEQ ID NO: 336988 - DNA, 666 bp, Cannabis indica
tttaagcctcaattggaaccgaaaaacgatggattccaaggttgaggagcttccaaccaatccaaaccaggggaaccccgtagcccgctatgggagatcctcacaagtgatccttgaaggtgagtatcatcccttgtgaatggtggttggagtcggtttatacatatcattaattttgtatgtttttttttgctccattgaccttttttcttcgtctccacttgaatagacatagatcttgtgagcgatcttaaaagtcctcctctagttaacaaggaatcccagaagaaggttagcacggcttcgaatgaatggagagaagctgtcgtggtttctatcagagaatccagccaacccaaggcctgcactagaggacctttgcgccagcctctttctgatatcaagaagtttcctgaggctgggaaagaggtctcggcttcaggaaattggatctaatgatgaggagaatgaggtttatgcagagattaaggctctctacgtgtagacagtctttctcgagctacacatagccggtctttctccaagctatgtgtagttggtctttctcctctcacccttaggaagatgacttaatggtttgcccctagaggcatttttgtaaagacaagtttgtaacccaacttgggtttttcttatcttaaatgc

SEQ ID NO: 336989 - DNA, 563 bp, Cannabis indica
ttattagatatttttatttaatttaagtttttctttttcttggagttaaacctctataaatatcagtattcattctttacatttaaataaagctcttgcattttttattgatcccgcgtcatttggccaaaattctatttaacacctctaattattctaaattacacttaattttttagaccatcttcattgagagatgtataatttacattagagttattaagaaaaattaacaaatcaccgctaaacctgaataagctgcccaaaccaaaccgaataaaccgacaaaaaatacaatccgaataactttatgaaaaactcaaaccacccaatgaatatattgggcgggttgaatattgttctaaccccgtccaaataactcgaataaactgatcgatttacataatattttttactaaaattacgtttaatagttaaactattttacatttaaaatttgtattttaattgtatttaaatattaaagttgaaattttaaatttacatatgagtatttttttttattctattttttaaaaaatattgtttaatactttaatgtt

SEQ ID NO: 336990 - DNA, 982 bp, Cannabis indica
tgatggatggaatgatgactaagtggtatatgtgtaataaaacaaactttgtaagtaaaaaagtaggtataagcgtgtatgagtaattttgtaataaattgtgtaaaatggatttttcatgtaaaaatttcaaaaattaaagacaaaaaattaaaagaaaaaaaacacagattaaaattaaaagacacatttatttctccaaaagagacattaaatttaaatagaaacggtacaaaaattaaaactaaattataactgtaaatcaaaataaaaaaactcaaactcagaagtgcttgagcaaacgaaggaaccccagaaaaagtaaacctagaaattaccacaatttttgtgagaaaccatgcaggagggaaacacgaaacccagctagcccaagaagagattcatcatcctcgtgtgaaatcgaacgaaacccaaaaaattggtagaagtataaggtttttgaaatgacgtttcatcatcgaggtgaagaagatcctcctcctgactacagtaagtcccagatccatattttctagggttttttgtgttttcaaaaaatgttggtgttgtttgggtgaatgtgagtagaatgagttaatggggggttttatacgaaattttcagtaggtagtagctttaatggtttgtggtggggcttgtgtttcatatcctatggagtggttggatatgatgttaaagtggaaggtttgaaattattgttgaaaacagattagtcaaaggctgttgggagtctttagttgttgttttctttaatgggaacatttccacatgtttttatctattttatattattccttgtctgtttgttggcattggggatgaattgctattgggggttaatttttgttgggggttaatttctattcggggttaattgttgttgggggttaattgctattggcggtttaattcaaaatgttggataagttttattggttttgcctatgtcacctgtaagttt

SEQ ID NO: 336991 - DNA, 877 bp, Cannabis indica
atattgtaccaatacattctgtactgcaaccgtactagtgttggtagtatataaatcacataatatagcatgcatataacacatatacgtataaacttttataataatcttaccttgataccaaattcaggtgtgctggctaacctgtgtggaacagctgctcgacgaattacatgcccctaaatcacattattcgtaaaatttgtgagtgacacgctaaagcactttctagggacttaaacttgaaactaaaagtttccctatcaataaataacatggcaatatcctaaatatcgcaaaaacgagaaaaactagggttcccaaaactgctctaaccagaattctagttctgtggggtttcttgaggaccaaccggaattctggttcctactggtcccactgaaccggtcgaccggttcagtgtaggaaaatttcaaaaatttacaactcactcaaatcaaccccaaactcaaccaaaccttccaaacttgttcaatatatcccaaagaacttaaacaaggcaataaaacaaccctaacatgctcagaaacacaaaacaccattggagagcaaagcttgatttcttaaactcaaagcttcctcaaacaccacaacagctcctaaaaccacttcaattcaacagattacaccataatttaactttagattatcacaacaaacaccaacaacaactatagaaccctaatactcaatttcatgcataattcataacttaaagccttcaaaactagagaaagagatgctaggaattttaccttgacttggatacactaagagcttgttgggaattccttgaactactgaagaacaagctcaaaccctagctgctctagggagcgagagagagagagagaga

SEQ ID NO: 336992 - DNA, 562 bp, Cannabis indica
aaaatacactataatccaatcaaaccgactgatatacactccaaatttgcattatatttttcacaaaaagtaactttatcatatatttacgtcgaactttagtgttgtgctccaatatacaattacaaaatttaatgtttaattaatatttttaatataatataaaatataataccttctcattaattttttattattttattagggtttatttttcaattttaactgaaaaaagtaacaatattatataaatattttcagctggccaaataaatacatatacaacctaaataaaaaaaaattacagaaataccacttacacacactttcaacacgtacaggatcaatacttcctaggcaaccatagtacaaccacgtagcaacccaacgcaatcgaaatgaaaattcaaccagaaagataaccaccattaattctggcgatttcacttgagaagacgaccagaatcaatgaaaataggggatgttattttgaattcatgaaaaaaaaaactgtaaaaaaactactacgaaaactgaaaattcaaccgaaaatccagtttaa

SEQ ID NO: 336993 - DNA, 876 bp, Cannabis indica
tagttttctgcctcttgatggcctcaaggaagttaagaccctacttccaggcttaccccatcaaggtgctaaccaaccatccgcttcggcaagtcctatagaagccggaagcgtcagggagactcctcaagtgggccatggaattaagccagtttgacatacactacgtaccgcgcatttctataaaaggacaagccttagctgacttcataacagaatgcaatgaagcaaaggctattggaagcgtaccagtactgcataccccggcatggaaggtattcgtgacgcagcgtcaaacgagaacagatccgatgctgggatagctatgatatctccgaacgggtttcggctccaggcggccctgcgttttgaattctcggcttctaacaatgaaattgaatatgaagccctaatggcaaggtggaagttggcaagaaccatgggagccacgagagtagaagtcttcaacgattcacaactggtggtaaaccaagtctcgggagaatatcaaacgcgtggggagaaaatggctgtgtacgtagctattgttttggagctgctccatgaattcacgaagtacaaagtggatagaatacccagagaaaagaacgctcacgcagactttttggccaagttggcatccgacagcgaggttgagagactgtgggtggttcttgttgagcgcctcacggaaccaagcatcaaagttaaagatacggtggctacaatcgagctggagccaaattagatggaccccatcgtcaaatacataaccaaaggcgagtttcctcaagaaagggccctgtccagaaggatacagtatcaagcgcatcgatatgtgatgatgaataatattctctatcgaagaggactcag

SEQ ID NO: 336994 - DNA, 680 bp, Cannabis indica
tgtcgggattagtcgggaatttagaatttcccaaaataccccttagtacccttttatgttattttgtgtggaggggcgaaattgtcattttgctccatttgtatttttgtcctttagtggacttagaaatattttattcagcatttattattaatttgtggctgagataattaattaaatactatgttgttcattttatcaaagtttaaagaaaaaggaaattttcaaaaccacaattttctctcaaactctctccctctttcggcctccttgagcagcaaggaatcttaggatttttctttgtgtttcaagctaattttcaagattgtagtaagctcaaactcttggtaagatttttggtaacttgtcttgatgttttcttgaaattttgaggaaaaatggatagttgcatgcttggtttttgttgttgttgctgctgggtctatgggatgtttgctgtggtttttatatgtttaaattgattagatcaaagtaggtttgatgcatgctagatggattaatcgagtttgaatctttttaactcaaaaactatgattttttatggttaattgaggtattagttgctgtggttgttgattatgtttgggtttgttttctggggttacattatggtgatacatggtgaattgagtaggttttagtgcatgttaatgggattt

SEQ ID NO: 336995 - DNA, 400 bp, Cannabis indica
taaccggacctagacctagactcgaaaccgtaactagacctggaacaagactccaactcaaacctaaacacgaactgtgacacagacctggatcccaatccagaccaagactcggaacccaaacccgcaaccaaactcctacccaaacattgaaccagactcgagacacaaaacaggggtcgggacctagaaccgcaaccctgtctcaatcgtgaacccaaactcggacctacgacctaagaccttaaccagaaccagaaccagactgggacccgtgacagggatccaaatctttacttgagatcctagaaatggggcttggaacagactcgtagtcggtgtttgaatctgggactcagactaggacctgaacccagaccaggacccaaaccctgaccca

SEQ ID NO: 336996 - DNA, 581 bp, Cannabis indica
agatcctggtaaaataaattccaacacatcaatcatctgccgagacatgtttgtacagaacaaaaatagtatggttagaaaacagccatcaaaaaacacaaggcatgaaagtcaagaagctcaaaagtaaagtaaaatgcaaggtgactgcccaaagactcagaagtccatcatcacctgacattgatcttatctcaaacatgacagccttcccttttctggcaaaagggggatatggccaaacaggtgaaatgggctcccttatgcaaactgcatgttcaataggcatgggcgtggctgggagtttcttcttccgctttagtggggtcacctgttcgtcctcgacttcatcttcaggattcaaaggttcctgagcatactgcttggccctaacacctcccttcaacttagcctcgcgcttacgttgaatcagctcatcctccttgtgatctcgttcaggttggccagcatcaaacgtcctcttcttccccgccacggacttaggagaaaagtccttggggtaaagcccatacttcactagattatcaccaaagatttactggataatatccctgtcttcc

SEQ ID NO: 336997 - DNA, 671 bp, Cannabis indica
ccatgatagtcatgcttgttggaatttgtccaacgatgaggggtagacaaatttttctagaggtgccactccttgaccggagaaactatagacaggcaggagacatggggttagatccttcagctgtagtcccatcttttcatcaccagtttaaactatatatttgaagaggctgcattatcaatcatggttctgaccaccattattggctatctggacttccacgaccagcgggtcgttgtgcagaaacctgatttttacagtgtcttcatcgttgaaggttatggtaggccctcctgctcgtagaattttgggcttcctttcttctacggtcaggataacttcctcttgttcgtgctgctgttcgggcatacctctcccgagcttttcatgagtctccagcaatatgcgggcctccaacgataaattccagatgtccatctaccggtggaggaagtaaatcttggttattgtcgttcctctgaccctgatcggtcttgacatacttctgcaggtgtgggttatttttccttatcaggaattcaatttccagcttcaggttgttgcgtttgttagtatcgtggctgtagtctcggtggaaacaacaaaactttgtcatgtctctgttgctgacatctttcttcatgggcccgggcttcttgtacggggcc

SEQ ID NO: 336998 - DNA, 614 bp, Cannabis indica
tgattatattgaaataagttttaatttagggcataaaacctaatatctatgtgggttgctatacgaatttgtagttgcgatttaggttgcagcgctagttgtaataggagtttctatgtagatatccgtaaaaatgcaaaaaaaagacaaaaaaaaaaaaaaaaaaaaactaattttgaagtagaaaaatgaaaaagctctaaaaatcttggtgagcacaaggggcatcacctcccaacaactaataaatcccttacaattgttgaacaatccccatttagcaaaagtttcatttttatttaagtatttatatagggaaatttcattatttgcccttaataatataacccatatcaaaatttataccctcccttaatttgtacaaatttagtccattgattacatgaacttcccattttacctttttttttaaaaaaaaaataaaattggtaaaaactgaaattggatctttctctttctcttccctctctctcgttctcgtgcaccactctctctctctagaaaaaactaaaaaaacttctaaaaaatttccctctctctcgtcccactctctcgtccctctctctcttccctcttgaatgcttgtttctcgg

SEQ ID NO: 336999 - DNA, 818 bp, Cannabis indica
agcttgcccaaaagtgaggggtaggcgaatttgccctagaggtgcgactccttggccggagaaaccacatacaggcaagagatagggggttagatctttgagctggagccccatcttttcataagcggtcttgaataggatgttggaggatgctccattatctatcctagttctggccaccatcttattggctatctgaacctccacgactaactagtcgttgtgtggaaatctgattttgacaacatcttcatcattgaatgttatggtgggctctcctgcccgcgagattttaggctttctctcttctatggccaggatcacttcttcttgctcgtgctgtgatgttcgggcatacctctctcgagctttgcctgaatctccagctatgtgtggacctccaataattacttgtagatgcccatctattggtggaggcaacaagtcttggttgttatcacccctctgattctgatcggccttgacgtacttctgtacatgcgggttatttttccttattaggaattcaatttctcgcttcaaattgttgcattcattggtgtcgtggccgtagtctccatgaaattgagaaaacttggtcatgtctctcttgctgacatcttttctcatcggtacatgcttcttgtacggggctagtgactgagtggccatgtaaatactctctatgtcctccgtcaggatgataaatgcagtatatttggcttgattctctcggggagcctgttcggctttgccgacgaactttccctttttcccattcccttgcctattattgaaaggggttcgacgtgctcggt

SEQ ID NO: 337000 - DNA, 710 bp, Cannabis indica
tcttatatggggctagcgactgagtggccatgtaaacactttctataccctcagtcaagatggtaaatgcagtgtactttgcttgattatcccgggaagcctgctcggttttgctggtgaactttcccatcttctaattcccttgcctgttgttgttggaacgtttaccatttgagctaaaattatttgggtaatgggggagttgggtggacgttctagtggaaggagcttttgactttccagggttttgctcgccttctgctcgctgaatagcctcttcaagtttgatgaagccttcagcacggtcgagaaaatcactcattgagtataccgggccgttcttccttatgtccttccaaagttcaccgaggacttcaatggcccctgtattgcggacaactttccatgagaccttggtcgcttccgtcatgaatctactgatatatgcttggagaggctcgcctggtctttgcttgacttcaaccaggtctcctgaatgcaacgaaagttggcgtacggaggacaattgtgtatggaattctgaggagaaaggtttccataagttgaactttccaggggccagcttgaaatattattgatgggtggttccaagagggtagcaggaaaaattctgcaacatacctcacctcgtatccctacagatccatttgcatctcgaaatacttgaggtggtaaagaggatcttctct

SEQ ID NO: 337001 - DNA, 1294 bp, Cannabis indica
tctcatgcattaaacttcctacaacttatcctacatattatttaatcggttgccgaaaacctcggtcaacaactagcatttctttttccgtagtggcatagctcagctgagcatcattcagagttctactagcatattagatggtatgaaacaccctgtcaactctttgacccaagacagctccaatggcgtagtcacttgcatcacacatcaattcaaatggcaactcccaatttggtgaagtgactataggtgctgatatcaatttctcctctagaccttggaaggccttcaaacattcttctccaaactcaaaaggtaccttgttaacaagtaaattggacagtggcttggagatctttgagaaggccttgataaatcttcggtaaaatcctgcatggcccaaaaaacttcttactccttttacagaaattggaggaggtagattctcaattgtagacactttggctctatccacctcgatgcctgcctttgaaatcttgtgcctcaaaacaattccctctgtcaccataaaatgacacttctcccagttaagtaccaagtttgacttctcacacctgattagcactttctgcaagttcctcaaacaattgtcaaatgatgaaccaaaaactgagaaatcatccataaagatctctatacaagtctcaatcaagtctaaaaagatcgccatcatgcacctctgaaatgttgctggagcgttacatagtccaaatggcagtctcctaaaatcgaaagtgtcatatggacatgtaaaggttgtcttctcttggtcttccggtgctatggctatttggtggtaaccggaatagccatctagaaaacaatagtactcttgtccagccaaccgatctaacatctggtcaatgaatggcaaaggaaaatggtctttcctggttgccttatcaagcttcttgtagtcaatacagattcgccaaccagtaaccgttcttgtagggatcaactcatttttctcagtttttatcactgtcatccctcctttctttggtactacttgcactgggctaacgcacttactgtctgaaattgggtaagccaccccagcatctaactacttgaccacttcctttctgacaacctctttcattggtggattaagtcttcgttgtgcatcaatagttggtttagcgccctcctccattagaattcgatgcataactgttgagggactaattcccttaatatcaggcaatgtccacccaatggctttatgtgcgcacggagtactcttagcaacttgtcagtctccaca

SEQ ID NO: 337002 - DNA, 759 bp, Cannabis indica
catttaactctttgttcctctctatctccgcccagacaaaagaaaagatgaaggtcccaatggccactccggcggcaggccttcaacaaaccaacctttcatcgtccaagtccaaggcaaatctgatgaacctcgccactttctctccaccctcataccaatcgcagcaacgggacggtgaacggctccatcaaacactaacctgtaagttttaatctctctattactgataataataaatgatgaaataaaccaactctttctcgggttctctgtttggaaagcgtgacagtgatactcccgtcaccgtaggagaaaatggaggccacgggtggcctcgccgagttctgaaacgcaacacccttgagccacgaagccaccaccgctgttctggctccgtgaagaagctcatcagagctgcgagttcacaactcgatctgcctctttgaagaagctccctgagcagatctaaaatggttgttgaattttgggtattttttttttgtgttattatttcatttgtctttgtgtaattttttttttctgtatttgattaatttgtaaaagttatgtgtaaatttttgtaaactttttttctattttaactttgtgtaaattataaattataattattgatatgtatttatttattttatttttcttataattataatatttaaaatggtatgatatcaagaacaaattattaatttatgtatttttaaattgaattattaataaaattattattataaattt

SEQ ID NO: 337003 - DNA, 666 bp, Cannabis indica
ttagacagaaacatccgctaataaaatcgactgaagagcaaggagaacatcgctctcagtaaaaagatgacctgaccaataacaagcatcatgtgccatacagtgcgcggttttgttagcagactgtttaacatgaccaatgaaaacattacttaaagaagataaaataaattggcaatcctgaacaaataaaccaaaaatagaaggcatagagaccgaactaagaatagtttgaacaactaaaatgcaatccgtctctaaaatgacatttgacttgttattcctctttatccaactaagtgcctccttgacacttagaatttctacaatttcgggtcggcaactaacagaagaaatagttgaaaacgcctcaattattcgaccatcatagccgcgtgctacaaaaccagtaccgatctcatttgtgtcttcaaaaaccaccccatccacattaaattttatctgttcagcagccaatttggaccaatgttctctcgtgtcactatgattagaaggcagggaacccgagtccagccgattagcctgagcacacgtccattgtcgaagagtggtatgagccagtcaaacaacatcagcatcactacaacttataccattccaaagcatatcattctgagccttccaaattgcccaaccaaccatgac

SEQ ID NO: 337004 - DNA, 558 bp, Cannabis indica
aacattaaatgttatttctgatctatattaataagtaaatttgattatattgaaatgagttttatttagggcataaaacccaacaatatattgatagagagagaaagaaactttgggaaaacacgaggttgggtttcggggttctttgagttcagccatggtatccattctcgccaacagtggtagtggatggtgcttggggcctgtcgtggctttgccaagaaatgggagaccaaagagagggaggaaggaggagcaggagaggttagcacttcatgtttaggggtttctagtgactgcaagcacggtggtgtggtccgtttggaccatcgccagccaaaaatagttcatcggagcctggacaggggcgccacacaaaagcaagagggagagagaggtaggggacgtgaaagactgaaagagatggtaaaaataattcttttttttttttgaaatgatttatctaagtaataaatatggggtttaaaaaataagtttacatatatatggtatagtaaataccataaaaaagtctaaaaattaaaatatgccatacaa

SEQ ID NO: 337005 - DNA, 963 bp, Cannabis indica
ttggcttcaattcctcggtcatttacaataaagctcagaaacttatccgagctgactccaaaagagcactttaagggattgagtttcatgttgtatttcctgaggactttgaagcattcgtcccagtcatctatgtgccccccagccttccgagatttgatgagcatctcatccacatatacttccatgtttcatccgatctagtctttaaaaatcttgtttaccaatctttggtatgtcgccccagcatttttgagacgaaatggcatgactttgtagcaatatagacccatatctgttcgaaaacatgtatgttcttggtccggtggatgcattttgatttggttgtaccccgaataggcatccatgaagctcaatattttgtgcaccgctattgcgtccacaagctgatcgattctcgggagtgggaaatagtctttggggaatgccttattgaggtcggtgaaatcaatacaaactcaccatttcttgttcggcttgggtatcagtacaggattagcaacccaagctgggtagaaagctttaattatgaaatttttgttgcatagcttttctatttattccttcagggctagggctcactccttgtccaacagccttcgcttttgttgaactggtcggaagttgggattaatatttaggacgtgcgaaattatagaaggatcaattctgaccatatcctcatgttcccaagcaaaaatgtccaggtttgctctcagaaattttattaaggcaattttacttcgagcaacaaaccttttccaatttaaagctttctgggcagaatatctcggtcgatctcaatctcttctagttcttccataggttcaacattgctgcttgggtccataagtcgaggatccacatcttcatcctcgccttgtgaagttccctacttaaaaatgttttttccgtcgttcgagctctagctagaggatactt

SEQ ID NO: 337006 - DNA, 1010 bp, Cannabis indica
tattttttttgataggtatattttttaagaatatgaattgaaagaaaaaagttaaaaaaaaatacagtacaattaaaaatataaattttatataaataaaaattatcaaaatggggtgcctttagaactttttggggtgtaaataaaattttccttaaaatatatatgaatttaatactttaaaattcattaaatcccaaaatacccttctcataccttccctctttctctcgaccttctctccctccctctctaactctcaccaaacacaaccgatacccacgaccacagattcagacctagactaaacccatgaccaccgcaccatctccggcaaaacccactccgaagacaaaacgtaggacaaaaccgaggaggatattgcgaaaccataaaaagaaattgtaaaatccaaaaccccaaaatctatgagctcaaccatcccaaaactcccgaaatccctacccatcgttggagttctcaactcgcttgttttcggtattttttttttaatttttgacaattttgcgaagatccctaaatatcgcaaaatcatgaaacatcgctaaatgtctccaattcataacatcgctaaacatatctctaaatgtcgcaaaatcatactctagttttcacgatgattagcgatgtgctgtgcatattttagtctcatatcacaaactaggaaacggtctgcgcttcgcgtgcggtataagaataatgttggatttaactctatgtagtgttatattttagttaatatgtttttatattttgtgtcaaatgtgtcaatctatttttaaactgcgtgtaattttctcattattaactcgaagcataaaaaacatattatgttcgtgttaacctactttgacttattttgttattactggagttcagaaaaatgtagatttatccattgaaaaacttattatactatatatatatatggtttttatatatcataaaaaattaaatttttaaaatattttcaatttctttttaaaaaa

SEQ ID NO: 337007 - DNA, 620 bp, Cannabis indica
atataaatatatttaaaaacttaataaattaaatgtttattctattcttatctataaagaaaatataagttaaaacaaaattaaatatttctttgttatattttgttatatttattttaatttattattgaaaacataaaataataatagttttttttatttgttgttagttatgtaaaagaaataataaatattaaatattttaatattaaaaagtggtctattcaaattaatcaattttatctctacttttacgaattggattgaatttacgttattatacaaatttgattgaattcaaaatataaaatctacacttagtgcggatcgaatgcactttgagtaaaatgttacgtatttaattcgacgaacatggctagtttttatattgaataattatcttttttaccccctgtacttgtgatactatactattatgccccttaatctattcagcttgttataaatagtccttgtataattttatatgcatacatttagtccttctgtttattttgtttaaaaatactgtttgtattgatgatgtggtattataacaaaggatagagtagtaatttcatctctttttagagggaaaattgactatgaggtggcataat

SEQ ID NO: 337008 - DNA, 729 bp, Cannabis indica
tgataggagcggagacacgatactcggtgattaaaaaactagttttttgcctcctgatggcctcgagaaagttgagaccttatttccaatctccctcgatcaaggtattaaccaaccacacgctccagcaagtcttacaaaagccagaggcgtccggaaggctcctcaaatgggcaatgaagttaagccaattttatctacactacattccacgcatttccataaaagggcaggtgctagcagacttcatcaaagagtgcaatgaagctgaagctaccgcagacatacccacaccaccagtcccgacatggaaggtattcgtggatggcgcctccaacgagaacggatccggagcaggggtcgcaatgatatccccgaacggacttcgactccaagcagccctacggttcaaattctcagcttctaacaatgaagccgaatacgaagccctaatagcagggctgagattagcaaaaaccgtgggggctaaaagagtagaagtctacagcgattcacaactggtagtaaaccaggtgtccggagaatatcagacgcacggagaaaaaatggctgcatatgtggcgatagtctgggaactgctccacgagttcacggactataaagtagaaagaatccccagggaaaagaatgctcacgcggactgtctggctaagttagcttcagacagcgaaattgagaaactggggtggtacctgtggaacgcttggc

SEQ ID NO: 337009 - DNA, 558 bp, Cannabis indica
caactatgcgatgaattggggattaaaaaagcattttcagcagtcgcatattcgcaaagcaatggacaaacgaaggcagtgaataagatcattaagcataccatcaagggtaagctcgaagaacgtaaaggtacatggccagaataaattccctaagttctatggtcatataatacgactcctcgatccacgattggtgaaaccccctttttgctctcttacgagtgcaaagccatggtgccagtcgaggttggagcaggatctctaaggagatagatatgtatttaaacttagcggtaatacagaaaatcaattgttacaactcgattttctcgaggaaaagcgcaatcaggctcatttgaagaatgcggcatataaacagcgaacaactttttatttcaactacaaggtcaaagaacgaagtttgcgagtagatgattttgttctatgaaaggtcatgccaaacacaagaaactcagcacaatgagtttttggtgacaattgggaaggaccatacctcatcgctgaaaaaaattggtagtgcaacctatcgactat

SEQ ID NO: 337010 - DNA, 861 bp, Cannabis indica
tagcaaaaatcccaaatatccaacaaattatccaaaactatccaacaattcacaaattcttcaataaaaattggattggaagtcttagaatcaatacctcaatgacaattcctcctttaatcatcctccattgttgaaatcttgaagctcttgagaaagaaaaggatgaataagggtttttaaatttttgggtgaggttttagggatttggggttgattttgagtgggaattagtgtttgatgagagaaataagggtttaggatgattgatgatgaaagtgtatggttaggtttggttgaatgagatgttgaatgggattagatgaagaaaatatggtggaggaggtgttttcggcgtggagaggttaaagatttgaatgtggtgtaagtttgaaatgttagggatttcccctttttaaacaattctgaccaatctcgccgcggccacatatagcctcaccgcggccaaaacacgtgaaaaaagtcaaccattctgtagggcttaaatggccgcagcggtatgtcccctcgccgcggccagattttgtgaaaatttacttctctctgtaaagcttaaatggccgcggccatatgtttcctcgccgcggccactggaattttttttttttttagataaaactaggacaaactagagaaagaaaaataaacagtaaaacttaaaaagaagttcaactaaatcataaagaacacttgggttggcctcccaacttagcgctaactttatcgtcgcttagctagacgttgatcgagatcttcatagtggcgccacgaatcatggcgggacttggtttgtatcaaattagtacctcccaacgtagagctttaatcgctgcccacttc

SEQ ID NO: 337011 - DNA, 764 bp, Cannabis indica
gctgcgcataatgtggctaggtgggctttcacccaaaattttacaggtgttatggagtaatcctctatacctgtttctatcatttataatgaccgcgaggttcaattttctttatctatgaaacgccttattttcagaaaaagtgtaaggtaaaataaaaaaagtgaaattttaataagttattttaaaggataaaataaagaagttattgaacatcttattattacaatatttatcgacatctttaatatataacatttttttaaataattaattacattaatatttttttgaaagattaataacgactattcctattcttgtaagatcttgcaaaaagattctagatagaggctggctggtgtattctgtacacgtatttttctattaaagttttttttttgtaaaataactatagcaattaaaaaagttgatatcgcctaattagttacactacaatcactttcactcaaaaaaaaaaaaaaaagttacactacaatcacggtagtaaacaggctatgtcgtattctttttttttttttgaaaacaagctatgtcgtatttacaggaaggtaaactacaactaaaaattaatataaatagaatatggtagaaattgaaatgaagtaaaaataataaaatgtggtttttacactacatactgaaatttttatttttttttacttttttactgtggggtagaattttttgcaaaaatactatgtaagttttatattgtatattgtgttaagttttcacagttg

SEQ ID NO: 337012 - DNA, 669 bp, Cannabis indica
aaaaaagggacaaaatcacatataaatataagaccaattaggatttttgccctctgaattttgatatgtactaaatcatgcttcttgaatttttaaggtcattaaaaatatcccttaaacaattgagattattggatttagaacttttgtccaattttagtaaaaaaatctaacatagataaaagttcagagacatgatttagtacatatcaaagttcgagagacatgatttagtagatattaaagtctggggagcatgatttagtacataaactatcactgaaatagtaaaattaaatgaaattagacaaaagtccttaaatttaacaatctcaacagttcagggggcattatttggtaacatgtcaaagttcaggagacaaaaatcctaattagcttaaatataatggcaaagacatgctccaaaaccaccgcgaggttttatataattatttttttcatttgaaaaagagattttacttaggagttaattaaatttatgatagttcctatgatgagaaatagaaatcaagtgactatggcattaatattcacataaataataaaagagaaatgctaaagaacaccagtggtgcctagcaccctcccatgtgtcaatatcgctattggtccaattaagtatcgggtcccatataatttaatataggg

SEQ ID NO: 337013 - DNA, 529 bp, Cannabis indica
ctatagccacacgccatcttttgttatttggccaaaacacataaacctcaccattgctaccatccgttcaccaagttatatagagttacaagcttaaggttacgattagttagtgtggtcatttctaaagattaaggtatgatatgatatttttttgaggattcatttatagttgaatcaggttaagtttactgttacggtggtattattttctaatcataatatttgaaactaggaattacgagtaccgaaagaattggatctacgcaagtaaaaggcaatcaagctattttctccacactcgaggtaaggaaattaagtagaaaaaacataagttttctgtatgtaataacattcatagaaagagtgggaatagtaaaagagaagttaactaaggtcttctgcctaactctttattgtctgttatttaatgtactgtataatatatatttaaataatatgtttataagattcatgttatttatgtatgtttacagtattagagcatggccattgctaaaggtatata

SEQ ID NO: 337014 - DNA, 943 bp, Cannabis indica
atgttgtagggagagctatttatggaggttggttattaactaaattataaataattgttctaacatttatgctatataacaaggttgtaacaaaagtaaagaagtacatcataataaacattcgtttatgaacaaatttttatttatttatataatgcttgaatttaatttagtcttatattaatttaagttcttattcgagtttaataatttgtaattcataaataatgatttctactaattttgttttattacttatctctcttcgctatatatatgagtgtactcttaataggtattacacatgaatgggtaatagtagaaaaaattgagttttatgcttaatttttttatttaattagaaaaatctctcattgtttcattgactgaaaaataataataaaaaaataatttcgacaataaaaatgataaaaaaaaacgttgagtttaacttaaatattttttatacgaacatatttttaatatagtataaaaagagtatttttttgatattttctttaattaagtagctaaattaaatatataaattcaaatttcttttttgttatttgtcatcgaataaaaatttaatggtttaatattttaaaaataaatatttataattaaatttgtttagtactcatcaatgggtaatacccattgcgaagtgttccatatatattaataaatatacaaataaaaactaatgtatctattaattctaatttttattattacaaaaggagaaaaactaaaatatctataactaaattatgtaccaatccttaaaaaaaatttgaacaaattaataatttcaaacttaaacatttaaattaatttcttgtgatcatgaatttattttgcaagatgtactaaaattaattttaaaaaatttataacaataaaattttatttgaatttaaattttaaaagggaaatttga

SEQ ID NO: 337015 - DNA, 1315 bp, Cannabis indica
tgatgatgattgtacatgccttgttgatctttggtggacaaacctgctggctctgataccaaaattgtaacgccttgatgattaggtgcctacagtgattttccaataaatgtgccacctttgctaaatcaaagggttttccttgaaaatcgtgtcaaattaatttttttgatctaatagtaaaactttataaacttttatatatttatttacaaaattcgagatcccgaacttaaacttttacaaacttaattgaaataaatttataatctggtcgctcagcaactacaaaatacaactccagatgtcccgagaccgaacactccaagtcgcgtcgcctcgacatgtacaatcttcatccaagcccagagctcactcctgcacagccttcgttgttcctttacctacacatgaaagtaacatctatgagtcaacagacttagtaagtaaaccatacaacaaaccatataatcacgacttgtgtctaggcgcccatacacctatcaacaaggcttaccagatgacttaagaaggttcttaacaattgctgctactaaccatgatatcatccagcatcagcactatgattgccctgcgggaccgacactatgtttgtgccgctatgacagcatcaatagcacccaaaagtataattagccatgatatcactcttaaccagtatgatgcctgtactactaaactgacataatgattgtgttgctatgatagcgccaattaatattttctaagggaatatcattcttaaccagtacgacgcccgtattgctgaactgacacaatggttgtgtcgctatgatatcacccaaatatatatattataaacacaccatgcacatatatcacacatatacacattcacatatatacaatatgttctatgctattcttacctcatttccaaattcaagtgatttggtcgacctgaacggaaaacttcgtgctggatggatgcataatcacataacataaatgggtaaacgacgcgccaaaaccctaatccgggaaacccaaacctttaacttaaggttctgccattaataatcattaccccaataccctaagtatcaaggaaataaccaactatggcactctaaataacacgaattgacaacataaaaaattcaggaaacctaaccctactccggttaaccggttttgtagggcctgtaaaaccggttaaccaatttgcaccaggtaacccaaaaaatttgaaatcatgtccaaaccatgcctaaaccaatccaaaccttccagaacacttgtaccaaccccaaacaatatattccaagcaata

SEQ ID NO: 337016 - DNA, 872 bp, Cannabis indica
gattttgtcccgggatccaggaataggggcttggacaagacccataattggtgtctttatctaggactcggacaaggacctgaagctgaataggaccgggactgcgaccaggacctggacctggtctaggacccagacttggactgagactcgaacccgaacccgaacccaaacctgatcctgaacctgaacttgggactcgatcccggacccaaaccaagcccctaaccgagactaggattaggaccgttacatggacacgaacccagacccaaaatcgaataccgacccaaacactagactaggatagaaacacgggacctagactcggacccagacccaaactcagacctagacctagcaaaggatttgaaaagacccgtacccggactcggactaagactcggaccctgaccccaatcttgacccagaccctgacccagaaccaaacccagacccaaaatcataactagaactgtgactaggacccggacttgagaccagaaccaaacccaaactcggaccagaacttggacaaagaccttgactaggactgggacttcagacctgggacccaaacctggattgggacttggacctgacctggtctgaaaccctcgtcgagacccaaaccaagatccagaccctaactcgaacttagaccaagattgggaccgagacctcgacccgaacctggacccagaccatgacctatgaatcgaacttagatggggacctagactagggacctagcccctggaacccagacccacatcagaatccaagactcgaacccgaaccaggacctgacttgcacttaggaatttgaagtcagacccagactcagacccgaaacctaccctagacccaaa

SEQ ID NO: 337017 - DNA, 961 bp, Cannabis indica
tcttctaattcttccacaggtccaacattgctgcttgggtccccaaatcgaggatccacatcttcatcctcgccttgggcggtttcctacttgggaatatttattcccttgtccgggctctggctggaggatacttccttcttagccttggccactgcaaggttgtaacattcccgagcagattgctggttccctctaagacaccctaccccgtttttggttgggaacttcaggcacgagtggaatattgatgtgacagcttttaagtcatacaaggctggtcggcctagcattacgttaaaggctgaaggaacatccaatatcaggaattgtgccatgatagttatgctcgttggagcttgtccaactgtgaggggtaggcggatttgtcccagaggcgcaactccttgaccggagaaaccatagacgggctgaaggcatggagttaaatccttgagctggagccccatcttctcgtaagcagtcttgaacaaaatatttgaagaagccccattatcgatcatggttctggacaccattttgttccacgaccagcgggtcgttgtccagaaatcttatatggacaacatcttcgtcgttgaatgttatggttggctctcctgctcgtggaactttgggcttcctttcttccatggctaggatgacttcttcttgctcgtactgagctgtgcgggcatatcgctcccgagctttgcccgtgtctccagcgatgtgcgggcctccaatgatgacttgcaagtgcccatctattggcggaagcatcatatcctggttattctgaccttggttggccttgacatacttctgtaagtgcgatttgttcttcttgatcagatgttctatttcccgcttcaagttgtagcattcgctggtgtcgtgaccgtaatctccatggaaccgacaaaattttgtcaactactgatattgacttggaaagata

SEQ ID NO: 337018 - DNA, 664 bp, Cannabis indica
agggcaagaaacttgaggaggaagagtttcctctctcgttacaaagcgcataatcacaagatcgtgggatcattgttgaatgctaggatcgtgggattgaggctgtatacaccgatagtggaatcgtgtgtatgccacatccacgcaagttgattcctgagttatagggattgagctggtggctcacgaagtgcttggttgaattcgctaagtgttgctcattctgcacggctcgttgagtattccatcatggacatgccagcgaggcatcctgctcagtatgttcatccgaccaggtgctctaagctgatgccacgtgtcaccattcttatgatgccacgtcagagtgccagttttgggataacaaattcgaatatttaacataaaaattttattagtttattttaagtaaaacagcaaaataatatacaaataatttggtaaaagtggtgcataacatgaatttagtatacaaaataatttatttaagagaaaataattggttgtttgggatgcgcagaacacgaaaaaatatccaagtttaaaaaaaaaaaccacctcaaacgagcaacctgcaataaaaatttaatgttcaaagtttttaaaaaatttctatggaaagtttagagcatgtttggtattgtttttatttttattttaaaaa

SEQ ID NO: 337019 - DNA, 569 bp, Cannabis indica
gagaatgggaattttaatgggtcaggaaatagaaatgcaaatgggaatgggaatgggatgggaatgagaatgggaattttaatgggtcgggaaatggaaatgcgaatgggaatgggaatgggaatggactgggaaatgggaatgggaatgggtcgaggaatggaagtggggatgggaatggaaatgggaattggccggggaatgggaatggaaataggaatgcgaatgcaaatgggaatgggaatgggctggggaatgggaatggaaataggaatgggaatgggaatacgaatgagaatgggccagggaatgggccgggaaaggggaatggggatgggaattggggtttgaggtttggggtttgaggttttagagttttggcgttcatggcacgtttactatacagtattcagaattggaataaattaatagaaaaatataatggaataaatgaaaaataatcggaatcaatatttgtaatatgttgtttactaaatttttttagaaatggaatagttgtgatttttcttgtttactttattagtaaacgtaatcggaaggcttaaatt

SEQ ID NO: 337020 - DNA, 1233 bp, Cannabis indica
gatgaacacccctagtttccatgcgaacgaacccttggtctaaaagtcaccttttggtcgagcagcttgtgctcaatccttggttggccatacaagctcatcctggccggcctattgactccccttggctagccaaacatggtggtatagctccttgatggcttgcttaaatcctttttcttgctgcttgacggttttgccatgcattataaggagaccttatcttgctattagcaaggttgtattccatatgtactctgtctttgcttatgtggagatgccacgtcagatggacaaaatttgggataaaattttcctccaagtctctgttcaaacatctggtggatagggactttctagctctcgtcttgtttgtagtagtctttatcgagcagccttgtctagccaagtgttggctttttgcatgacatgcttttatatcattgatcttctctctccatatatgtctcatcttctcttctttgatatctcttttttgtacctgccattcataagttttaagcttttaggaactttttgattctcatgttagattgtaatcattttggtatgttgatccacatgacagttttagaatgtgtaatgtgtgattttctgatagaaaagattcagttttgtcctttgttgtgattcttgactctttgagtcataaagaacacaaggcacatatttgagttttgaaaaaaaaaacacacatttaatttcaaaactaaccctggccggccttggaggtcttgcttgagacctggcaggtcctaggacttaatcatgggagttggctaactttagggtttcaccttataaagctagtcagttcatgcttgggtttggtgaccttacccagttcatggctgagtcatgggaccctggtcaaccctttttgcttgggaaccctagctggcctgggcattggttctaagtaggtggccaacattatttcttcttttgacttcggtaagaatcctgtcatggccctgtaggcatatacaaccttagtctcagacgtggttcccttagaaactttgtatgaaacttaatggtgagtctattatagtcaaatattcaacttaaaatcaacatttgtccaagtttttacacttgagacttgtactttgctgatacccagccttgtacaatgacattgtctaacaaataccattgggtatggttgtccagagttttttctatggcttggaacctgcaaggaactct

SEQ ID NO: 337021 - DNA, 1172 bp, Cannabis indica
ttaaaaacatttataaaaaaatatttatcaatgcatcatatttaaaaatgataaaattaatatatatcctccatattattagaatattaaaataggtatatcctccatattattagaatattaaaataggtacgatgcgtatgattacaatgaaatttttaaatatcacctcaacaaaaatattaagataacatattataaaaattagggttatttttcaatgattgataatttcttacttagataatatggatcttcaataattgttgatctatacatacgtatagcttttataattataatcattagaaacactcaatttattgattgtactttctcgtgttaccattggtaaaattcctgcaactatacaaagataagtttcaaataatgcaaacgaacaaataaaattaagataatgtattataaaagttagggttactttttcagttgtcgataattttttatttagattaagtgaatcttcaatgtttgtcgatttatgcatgtgttactattataattataatcattagaagcgttcaatttattgattgtactttttcgttttagcattggtagattttactgacaactatacacggagaaaagtttcatattacgcaaaaggaaaattatatataaagttactgtttggaaatatgtatattaagaatttataaatctcatgacacttcggtttataagttgcaaaattaacaatcaaatcctaatttagactaagaacatttcactacaaaatcttagggcatctttattatggtgcgcacttcaaatgaaaataagtattacaacagtataattaattagaatatttaaatatgtacaattgcatatagttaaactctaaatgtcaaaaattaattaagataaaacactacaaaaatgagggttaccttcccaattgtcagcaaattttatttgcttgaagtgtgtcatttttcaatgattattgactaagcgaatttattccaagaagtgttcaaaataatttaattataggaaatattatgaaagaaaatataatcgtaggaaaatgtataaattttatttattggctgtgtaggataatatatagttatatatattaaaagtgtctatctaactgcatttcttggtttaacggaatatacttaaaaataaaagaatat

SEQ ID NO: 337022 - DNA, 629 bp, Cannabis indica
ataaatttacattctaaaaattgtaaaaggaaaacttaccctttgaacacctctaatctacaaaggtttttttagtcaataatttaatttaaattaaaaaaaaaattattagttatgcacactacaagaaattaggttaataccggcggtattattcccggcggaatagcaccgccggtaatagtctgggtattaccggcggatttagtaatccgccggtaatagttattaaataaaattcatttaccgaaaatatatattaattaattataaatatattattaccggcggataacatttattaccggcggaatcccgcctcgaaaaatgagggcgggaattttgccgcccatttaattgaaattagtattgccggcggattaataccggcgggtcccgccggtattaattggggattctgaccgtttagttttataccggcggaacccaattaataccggcgggtcccgccggtattaaaagtctatataaacccctccccatttcagaaacccattttccccatttttcatttccacctcccccattcacctcttccccttccttcaaacacagccgccccatattttccaccttctccgttcaacttttttccggcaccgcccgtg

SEQ ID NO: 337023 - DNA, 764 bp, Cannabis indica
ggtgcaaaccggttagccggtttcggcagggttccttgagtgtcttgttttctcaaaatcttgtccattatgtgccttagttgggtgttttcctatttcttgagttagagtaatcgagagtataacagaacctagggtagtaggttctggtttcccgaattagggttttaaccatgtgatttacccgattttattatgtgattagggcatccatctagcgcaagactttctgttcaggttggccagcacacttgaatctggaaagaaggtaagaactatgtataatgtgtaatatgaatatctgaatgtatatatgtgttaagtgtacatgcatgcttatggctaagttgcagtaccaacacttgtatagttttggtatagagtgcattggtatagtgaatattgtttatgggtacagtatagtgataccagcacaagtacgggaatgtactgagtgtgtgtggtatatcactcagtagtacttagggtacaagacaaaccctaccaacactcgtacagtgaggtacgtagtgtatgtggtatagtggctataccctagtattgaatgttcttactcatctgttaagccttgtaaataggtgtatgggcgcctagatacaagtcggaaattatatgatatgttatatgcttttcttactgagtctgtcgactcatagttctgcttctatgtgtaggtaaaggaaaggcgaaagctgaacaggagtgagcctggctaggatgagattgtacatgtcgtggcagcg

SEQ ID NO: 337024 - DNA, 2286 bp, Cannabis indica
ctcacttattgcctaatcctagcaacgagaaagctaaggccctactttcaggctcatcttgttcgagtataccctgaccaatcattacaccaagtatcgcaaaaattggatacctcttgacggttgctcaaatgggcagtggagttgggccagtatgagattatctttcaaccccaaacagcgattaaaggtcaggccttggcaaattttgtggttgaatgtacgggtaaagaagagagcatttcagaaaacaacccagagccagtacaaatacctcagccgagtaatagtgaagacaagctgacttggaagctacatgtagacgggtcagctatagatcaactatccggtgcaggaatcgcccttgtcacacctggggggcaacacctgcacactgcagtcaaatttggatttaaggcatcaaataatgaagctgaatatgaagctctgatcgccggcctaaaactagcctgggagatgaaggtcgaacacattgagatctgcaacgattcacagttggtggtaaatcatgtatccgtagagtacgaggctcgagggaaaaagatgatagcctacctaagcaaaatacacgatatgcttgcatagtttaaaagctaggctctaaaagaatttccaagggaagaaaatacgactactgatgcattagctcgacttgcaagcagtaatgcaaatgataaagcaaatctgattcctatccagtgtctcgaaaaacctagtatcacaggcacaaaagaggttgaaatgattgatcatccccaaactagatgacgccaatagcaccctacctcagcgttggaaaactcccaaacaatagaaatgaagctcagaaaatgaggagaaaggctacacggtacatcatggtagagggagttatgtataaaagaggattttgcatgccattacttaggtgtataacacaagaagaagctgcatgacttttatcagaagtacatgacagattctgtggtaaccacgcagtcgggcagagtttagctaagaaaattataaggcaagattatttctggctgacaatgattgaagactccaaggcctacgttaagaaatgtgataaatgctagagatttttaaagatacctcgggcactgcccaatgaactgagtcagatgcaaagtccctggcctttcgccatttgggaaatcgacctgatcagaccgttgcccaaagacaaaggcggagtgcagtacgtagtgattgcagttgattactttaccaagtggattgaggccgagccattggcaaccatcacgtcaaaaaagtgcaagaattcattgtgaaaaacataatttgtcggtttggattaccatacaagatatctcggacaatggcaaataatttgacagtcaatccttcactgatttctgtgcgaaccatggaatcataaaaagtttctccacagtggggcatccccaagcaaatggtcaagttgaagcagtcaacaagacattgaaggacaccctaaagaagaaacttgaagatgataacggaaattggccggaagaacttcctgaagttctatggtcatatcgcacaactgagaaaacagcaaccaaacagactctatttgccatgacatatagatatgaagctatgctgcccgtagaactcgaactgtcgtcccacagaagattaacatatagcaaagaggtcaatcatgtactccttgcagaatcacttgatgaagttaaagaaaagcagaccgcagaaaaaacttaacgatattttaacaaacaagtgaaagcatagaaattctttgtgggaaagatggtcttaagaagagtatttttgaacaccaaagatagtacggcaggtgtgcttggaccaaactgggaaggaccatatcaagtggtcgaagttctagaattaggggcatacaagttgggtaagtatgatgaaaagatgcaactcgttttggtaccaaggtattggaacgaggaacatctaagaaaatactaccaataaaagtaccaggtcggatgaacatatcaagtacgaaataaaagaatatttgttcttaagtgaatggccttctgggcggaccatgcccaaaggtttggataaaattttcaagtactcaggttggatgaccacctttggaagtttttattttttgcaattttttttgttcatgttgagctaaatcagatcagatcagcataatagctttgatgcaaattactacggtaacagacatatttttgaccaataaatgaataaagatgtttatttaaattcaaattgagtcga

SEQ ID NO: 337025 - DNA, 1104 bp, Cannabis indica
ccataacctggcaggaaaccctagatttcattctatgccataacctagtagaaaaccctataacaatttcattctatgccataactttgcaggaaaccctacaactgtttcaatctatgctataacctgaccatttttcatatcactgacgctcgtatctacacgtcgccaggaggaaactctacaatggtttcaaactatgccataatttggaaattttcatatcattgacacctgtatcttcatgtcaccaggagtattgcctcacctaatcaggtgagcctgtacctacacttggtactcatatgtcactgatgctcatacttacgcccagtacgtcaccaggataatcacattacctaattaggtgagcccgtatatcacattcctagtatcattacattatcattgcttaaccaattaatcttttcattatataacaatattaaccatatttcaatctcaatatcaatcaattcgtaacactattaattatattacaatacaatgtactatgcagtacaatatactattcttacctttaatccaaatttatacatgttggccagcccaagtggagaactatccttgatgatctcggccctatgtcacaacaacggtaaaccaataagcatttatcccaaaacacttctcaacagctgcaaaggacaacctagggtttcctaccaaaccctatagcacaagtacactaaaataaaacttatatttcggctctaaaacatacaccatatgataaagctcgtcacaagcttcaaaacggtatatagaacgtccaaaacagacaccgaatgcaaagttatgacaaaaatacgatttctgatctccaataaattttaaaaaacggtaaagcacgaaattccaatttttcaactcaatgaaacaccctcgaaacctatccaaatcactccaaacttcatcgggcacatatataccagacatactaccatatttacgtaacagaaattaaaattgagcccttagatagaaaacgccattatcattcgaactaagctttaaaaagttttaaactcaaaatttaataacccaaaattacctcaatttcaacaagcaaacatcgaaact

SEQ ID NO: 337026 - DNA, 789 bp, Cannabis indica
gaaaaacgttctttgagctcaccattcggaacatacgactcgcaacactataagcatcacatttagagtaaaatatcacaagcttagtttcgatatactcgttcccagccagaaacttcaccgtttttgatgatccgagcgtggatttgctgaccagtggaaatatctcgagcgtagacgcagccctgaagaagctctccataaatttcaggctggacttgaagattatcgagcttcattttagtgaacaagtccataacttcttgaatttggccctgtttggcagagcgaagcgatttggtggcagtgagatttgttaagaaaactgaaagcttttttttttttttaatgaaattcggggaaagggtttgggtgggtttgttagattggaagagtttggagattgggaggaagaggaagagaagccatgcatgaagaattagatgatgatgatgacatgggcatggccactgaaacacatacatccatagagaagaagataattggtgtactactgctagtcaaactctagtgcaacttcagagagaagggcatttgagtaataaggtattaattttttttaaaaaaattatatttttaagttttaagaatttttcttttatatttttacgatatattttttttaaaataacacgaaaataataaaaaaacacatcaaaacaaaaaatatatatatatatatataaataataaaaaattaacaataattaacaacaaacataaaaatcgtatttttagtaaataatattaaaaaattaacaaaatatt

SEQ ID NO: 337027 - DNA, 570 bp, Cannabis indica
agcaactaccccctaatagaaatgactctggtttgttcatgtgttacaactgtaacaagccaggtcatatggcacgaaagtgtaagaacaggcctagttctgctccgcaggctaacctgacagaagagctgccttttacagctatgatttcagagatcaaccttattggtggatctgaagggtggtgggtagatactggcgcttctcgccatgtctgctatgatagaaatatgtttaaaacatatgttgctgctactgaggatcagaaagtgttgttgggtgactcccacaccactatagttgctggtactggaaatgtggaattgaacttcacctctggaagaactgtgattctaaaagatgtgatgcacactccagagatgaggaagaatttggtctcgggctaccttctcaacaaggcggggttcactcagactataggagctgatttgtttactttaactaagaatgggatatttgtagggaaggggtatgcaactgagggaatgtttaaattgaatgttcaagtcaataaagttaatgcttctgcttatatgttgtgttctttta

SEQ ID NO: 337028 - DNA, 549 bp, Cannabis indica
attaagagactttattaagtctaattaataatatattaaagggaaattttatttgatatttaattttaattattaaataaatggttttggcattaaagtggttgaattgaaaaatatggtatttgtaaaataataggataaatagttaaaaaatggtaaaattgcaagtggtgggcccacatcctatggccgaccactagtgcttaattttaccatttactgattaattttttaatgccaaataacttaaacctaaacctagaaagattcctataaataaatagtgatggactcaaaactaacatttgatggtagcctaagtcacactagccttcaatcaaactttgagccttctatctctctccaattttgaatccttctctctctttctcttcaatatttcgaacccttatagtgatagagtacatgcccacgcatagaaagttggtactcaatcattgtgtgtaagactgtgaagaatccaatcaacttaaggagaatcgggctcagatcttggtgatactctgctacaaaaaggatacaagggtt

SEQ ID NO: 337029 - DNA, 1036 bp, Cannabis indica
gagagctatgaagtcagacaagtaaagttcacaacttcatattttcattttttcggcaaagtgacttactcgtaaattgagtagttttgagtctcccgattccgtgaaacaaacatctccgataactggtgaacgacttcaccaaaacataaaaattaactaagtgatgtcaaaatatcacttaagcatcaaaaaatacatccccatcacgttttcccactcacccagcgtacaggttggcatcatatgtcaacttaggcattggatgtcaacctgggcgttggtatcatagtagcctttagtaaaacagccatacgtcactcaatattgatctgattgacgcgatttaacttattttttgaagctatttcaatgccctatcaagtcaggattcacgctccaattgcaattctaagaatatcaagtccaaaaatttcccttaagagagttacaaatttaagctacaacttacctgaagcgggtcccgcagattcgacttgttagaatattagctgtatattagttgtaaaaaattagggtaacttgtatttagtagtttcctattttataattagtagttttccatttagtctcctagctttgtatataaatatgtactattctatgaaatacagacacaattcgattcattattttctacatggtatcagagctttgtgattcgaaatttgaaatttgggttcatagaaaaaagagagattagggtttgagtttagaattctttttcaaaaatcctatttggagtgcgaatttattctcaccgcccacttaggagtgttgcccagccgccgatctgccaaaccctgaagtctggtcgctagattcctcgcgcgtggggctcacgtgccgcctgaagtttctacgcattttcccatgcgtcggcgcgtggaggcacgtgtgacagcgttttcgacgacgttcttttgccagttctttgctctgttcttctaagcccacttgcatctgtttaaggttgtaatttggtttttttttttgccttcttcgtgtttgggtg

SEQ ID NO: 337030 - DNA, 610 bp, Cannabis indica
tttttttttttttttttattgtgtgacaataatataatttattctttctcatttgtatgttatattaacaatttttcacattctaaatattaggtacacccatggccataacttcctggttggctacatagtttatgttattaaatatttttaaataaaataaatattcataactaaagtaaatatttatcaatattataatatataaattaaaaaaaaaaccaaaaataaactatcaatccatttattttgtgttattattttgtctttaaattaattaaaaaaaagttggaactaaaaaatttagtataataaattctatgacttttgcctcccaactatgagctatatattgtgcctccgaattttttaagttaacggttctcaaactattatcaatgttctgaagtagtacttttgttaaattttgttacacatgacaaacaaaatgtagatgtgaatgtttagaccattaatatcacgtcattgccatgtatttaataaaaaataattaaaaaattatattttaaaaattattactaaaatcaattaataattacaaaaaagaaaaaaaaagttaaactaatattacaaacttttaaattagttt

SEQ ID NO: 337031 - DNA, 493 bp, Cannabis indica
cataccattcgcgtgcgcgcatgaaggtgcacagccgagaaacctcggcgctgcgggctgccagcaggctgtccacgcacgtaggggggatttcaaacatcctgggcgtgcgtcctttggacagcccgtgtctgaacacgggtgacacccatgtgtcacttgatccgtgcgcgcatggggtgtgtcaccacacctaagatttttcaaattttcaaaaattcataactaattcaaataaaatcgaaattaagttttgtaaaaaggtgaattgcttaattgttttccatactatccaacaaaaataattcaagaataaaattccaattactttacgtaaaaaatttgcaaacattaaacaatcatcaataaatacatagatcaacaagaatcacatctaaatcattcatacatcggtttaagttcaaatttcttaaaaataaatcaattaccatggcactgaggccaggtgttggaatttattttaccaggatct

SEQ ID NO: 337032 - DNA, 705 bp, Cannabis indica
ttataaaggaaatagagtctatctgtagaggttttttgtggaatgggaagcacaaattgacaggtgtggctgctgttgcttggagtaaggtgtgcaagacaaaatcagcaggtggattgcagttgaaatcagtaggggattggaacaatgcagcaatgtttaagtacatatgggcggtagcaaaaaaaagaggataacctatgggtgaaatgggttcattgtgtgtatattaaagtggcagattggtggcaatatagtgctaacacaaatgatagctggtattggagaaaattagtttcattgaagggtaaagtcatggaggtttttgatgaaaatgaaatacaaaactgctgcaatcagtataaagtgtccactggctatacaaagttggttcctgctggtgtgaaaaaacagtggacatctatggtgtggagccgattgaattgtcctaagcatagttttattttatggctctccatgctacaaagattgaagacaaagaatagagtgaagatttatagacctgagattgacagtagctgccatttatgcagcagtaatgcagaagagagtgttgatcacctcttttttgcttgctctttcactcgagaatgctttgaattggttaaaaagtggttgggatggaagactagtgtgcaaagtattgtaaaagttgtgttgtgccttggaaaaacgtaggatgag

SEQ ID NO: 337033 - DNA, 700 bp, Cannabis indica
aggaagaccctaaatcattcattgaggtttgtagtttgtgctctgggtttgagtttttatttacgtatttttggaggttttggcttgggcgtagacttaatagacatttgctcttaatctactaggttcaagagtttcataatcggagttttggcttagatctgatctacttggttcaagagtttcaaaatcgggcttttggcttagatctgattgtttggtttgcattttgtttgtaatatttagttttgatttcaaatcctatttttttttgttcttggcaaataacgggtttgtttatgttaaatggatgcattaaaatttttttatatagtttatgaatcttttgggtagaagaatttggatttgttttggtttaatatttgaaaatataattcacttttgattttagtttgctcaaaatctgtatttaatttgtttaattggtttcaattagggctgaacatcgagcgggtttaccgggtttcaggttggcgggtttcgggttcaaaaaattgaaaccgaactcggacctgaatagggcatgggttggcgggttggcgggttggcgggtcacaggttggcgggtttcggttggtcgggtttagcgggttggcgggttgacctggtcaactcagtcaactcggtcaactctttaaaaaaaattaatttttattcaaataattatttttttattttt

SEQ ID NO: 337034 - DNA, 586 bp, Cannabis indica
actgatcaatggagaaattcgttcgtacaggcaaaaagtgacctgactttgtatatctgtcgacgattacccacatagaatcatactcccgcgtagtcttaggtaatccaaccacgaagtccattataatgtcttcccatttccattctggtaagttcaacggctgtagaaaccctataaccctctgatgctcagcctttacttggtaacaagtcaaacactttgaaacatattccactatatcattcttcattccttgccaccaatacatggctttcaggtcttgctacatcttggtcgaagtaggatgaacagagtaagaagtaatataggattcatctagaatctcctttctgatatcagcatctattggaacacatacatgatttgtaacccgtaacataccactgctatcaatagtgaaatcttcaactttgccagctaatactttgtctcaaatcttattcaactctggatctttatgctaagcttctctgattctttccaacaatgtagactataaggtaattttagctagttgtcccagaacgaactcaatattagcctttatcatctcatctaccaa

SEQ ID NO: 337035 - DNA, 745 bp, Cannabis indica
ttttttttttttttggagattaataacttttttacttttcatttttgttacagttaagtttcttgcatccatcaaaacacaagtttgagcacccccgcttttgctatgagcgattagaatacgttgggcaaaagattcaggtgaaaactctctttatcattgcaattgtctctgcacatctaaagataatgctttaaattcgcagtcgcctatccttttgtcagttgttataaagtacttaaaaagctttgttaaattatttcatttgtttattaccaggatcttgtaatggcggaaagattattgatgaagcacttagatgcacccggaaagtggctgcaggagaggcaccgtcgtgttctcatgaacaagttctgtgggagatatttgagggacaggcgtcttcatcagtttatcatctattcagaagaggttcaagataaatacgaacacaatcgaagattaaggaatccagccaccactgctgttcaacaagccctccatggactttcatacactgtatatggaaagccagatgtgaggcgcctcatgtttgaggttttcgattttgagcaaatccaaccaaaagctgtgtaaaatagaaaaaagggaaaaaaaggtacgaatccaatggaatagatggtaaaaaaaagaataggatatacttacatcaactaaactgaattgaatttgttacatgtattgtatttcataattcattttagatgtgtcaaaagtgtttctt

SEQ ID NO: 337036 - DNA, 1238 bp, Cannabis indica
cacatttaagaaagtgtcgagccttatatatctgacccacaagggaatcttggtacagaagtaaccgccaaccttgcttacccaacaaagaaagattatactcacgcaaactccgaaaatccatcccaccagatttcttatttttgcatagtttcatccaactaaaccagctcacacctttcctactactcgaacgccaccaatacttagccataaggctttccaaatgtgaacaagttttcagaggcaataagaaaacagacatagcaaaacttggcaatgcttgtgctacagttcttagtagaacctcacgcctagcagtagacaagaaatgaccctcccagctttgaatgcgcttctgtattttgtctttcaaaaaccccagatggcatccttatttcgtctcatgacacaagggaggccaagataagtactatgttcatcagcaagtctcattctaagggtcccacccaatcggtctcgagtagcattaggcacattagtactgaagaagacagaggacttactgaaattaacttgtgaccagaagcgatctcaaatagctgaaagcagatattatatactcgaagcctctctatcatttgcacgaccgtatcaaagataagaagccctcagcacagataagaaataagtaaggtgatagaggatcaccttgtctaatacccatctcaggaacaatcgggcccagttcatgaccaccatgaattattttatacctcacagagctaactatagcaataacaagatcaatgaaacgcaagtcgaaacccatttttctcatcatagctcgatgaaagccccactccacacgatcataagctttactaagatccaatttgagcaccatataggcttctttgcctttacgctttcttttgagatagtgcataacctcaaaagctatcataatattatcagtaataaggcgtcctgagatgaaagcagcataatttgaggatatgatctgaggcagcacttctttcaaacgattcgcaagcaccttagatactatcttatataggacgttgcacaaggatataggccgaagatcccccatcaaagtaggttgcttcttcttcggaatcataacaatattcgtgtcattcagtccatcaagaatactaccagtcacaaagaattgacaaacttggttcacaacatcgctcttcactatttcccagtaattctggaaaaaacctggggtcataccatcagga

SEQ ID NO: 337037 - DNA, 695 bp, Cannabis indica
tcagctgatgatagcctgagcgaagatcgatcttggaaaagaccgtcttccctttcagttgatcaaacagatcatcaattcgaggtaaaggatacttgttcttaatggtaagcttgttcaactcccggtagtcaatacacattcgcagggttccgtctttcttcttcacaaacaaaaccggagcaccccaaggtgagtagctcggtctaatgaatcccagattcaataactcttgcaactgtatcttcaattccttcaactcagctggagccattcggtacggtgccttagacactggatccactcccggagccaattcaataacaaattcaatttcccgaacaggtggcaatcccggcaaatcttctggaaagacatcaaggaactcacataccaatctcgtattctcaggccctgatgtcacaggttggctagtgtccactgtagtaactatgaaccctagacaacctctacccatcaggtctttagctttcaacaacgatattctcggtatgcgtgccccctgaactttacccacgaacactgctgggttagcactatcgggctcaaacaccaccatcttccgcttacaatcaatcattgctccatatttagacagaaaatccattcccaggattatgtcaaaatcagataattgcagttcaattagattggcggtcaactcacaaccgtca

SEQ ID NO: 337038 - DNA, 534 bp, Cannabis indica
ccccacgatcagcggcatacagttctctgccacccccggatatagtcagggccaggccttggcgccagcatcatcccattttggaaacccctcagggatgaatagacaagctccttcgcactccgctccgaccgctagcctggcaggcccttcccaaggttcgaggagtaaaagatcctccaaaggcagcacccaaacaggggagaagcgccagaaaagggggtacactccccagtacacccaatacacgaagctgatggactcccaagagcgtgtatactttgctactaagcaaaatacgcactaccggagaccgcacctgttgtacaaagataggtcccagagagatccgagcaaaagatgtgagtaccacaacgacatttgtcatagaaacaatgaatgcaagaatctcaaggacgagatccaaaacctgatccgattgggccacctctacgaccgggcactcgcctttttcaatggcgtatggttgcgaagcaatggtcccggtagaaacgttattcccgtcccacagga

SEQ ID NO: 337039 - DNA, 908 bp, Cannabis indica
actcacggttctgtaagctttacctttgtaaactaattaagatatattgcatatatgtgtaattattatttaaccctaaatgcggtcttgaaaatatttggaccactgtctaacctgcatgcctcgtgggttcgcaggctaagtcctaagtaatggatgcccagcgaaatgtcggaggacggggcaaaagggttgagactggaggtggtcggggttgtagaaatcctcaaaacccctgtggacgcggtagaggccgcggtcgtgctcctaggggtggtcaagagaatccacctcaggctccatttgattaggagcagaggtttgctgagatgcaagccagaattactcaacaagaagatgagattcaaaggcttagacaacgggatgctcctgttgagcctcctctgcagcctcctgctgttgcaattcctgtggtgccagcaaagcaacctattgatgtaaagcctttatatgagagatttaggaagcaagcaccaccagtgttctttggtggtcctgatctgcttaaggcagaacactggctgacgatgattgagaggatattgaattttatgggagtggtcagaaatgacagggtggcatgtgccacgttccaatttcaggaagatgccttagtgtaataggagatggtgtccctcactaaggatgttgctagaatgacctaggaagaattctgggacttatttaattctacgtattacaatgaggcgataccgcagtgaaaagcagaaagagtttgttgagttggtacagggcgtgaacatgacagtgaccgagtatacgaccaagtttgatcgcttggccaaattagcctcaaggattgtaccaacggacttcagtaaaaaggagaagtacttggcggggttgaatgccaagattaagcatga

SEQ ID NO: 337040 - DNA, 789 bp, Cannabis indica
aaagattgcctaattaggcaacgacaatgtgatgataccatgaatgtgatatacaggctcacctgattaggtgatgggatatacttttcggcgataccttattaggtacgagcggcagtgacatgagaatgccaagctatggcataaattgaaaccattgttagatttcttcttggcagcgtaccttattaggtatgggcggtagtgacatgtgaatgtcgagttatggcatagactgaaactgttgttgggtttcttcctggcagtgtaccttattaggtacggacggcaatgacatgtgagtaccaggctatggtacgggctcatctaattaggcaatgcgacatattgttgccaggttgtggcacagactcacttgattaggtgacacagtgatattatgtacaatgttaaattatggcacagggattcggtgatgcaattatgcgatatatgagtgtcagactatggcacgagcttgcgtaattaggcaatacaataaaggatcaaattaaagtatcgacttgcctaattaggcaatgtgatgtaataaagatagttactttattaggtaacatatatataatttatattattagatgaatatgatttctattattgatataatagttttatattactaaataactttatattgatgtttattcgtgaaagatgccaatagtgatttgaatttcatcttatgagtaatgtgtgattgtttgattctgattgtctgagtttaaatgataatatttgaataataaattatatgattgttgttattac

SEQ ID NO: 337041 - DNA, 973 bp, Cannabis indica
ccaccctaggctggtggttcctgatggccgaacaaagagaaagaaggagaatgaaggagccctttttcttctattttctaaatcctctaaattgcctaataaaaggtaaattaactaacctttatctaaatatatggcagctttccttaattggcaaagacactcaataataattatacaaaaatggtgaattacttaaatagccccaatataaacctagttcaataatcggcttagggtaaaatggttcagaaccacattcccaccaataccaaccaattaaacttacatgacatattttctaacattaccaaattctatatatgctcaagtgactaagatatcctccgttgccttttccatcgtcaccgagctaaaatcacagagatagcatattattcacatttaacataatcattcacacaaaaattccaatataatgataataataataaaattagcacttataatctcactaatctatatttaattattgtggtcgctacaattatccactcgttaaaaggatttcgtccccaaaatctaacctgaacagttccgggtgttgagtcttcatgtcggactccaattcccaagtggctttctccactttactatgcctccagagcactttaaccaacgttatggttttgcttcgaaggactttttcttttctatccagaattcatactagttgctcatcataagacaggtccgtgtgtaattctaatgcttcaaaactcaagatatgcataagatcaaacacatactttcttaacatcgaaacatgaaatacactatgtaccgctgacaatgatggaggcaaggttagtctataagcaacttgtccaactttcttaagtatttcaaaaggtcctataaacctaggacttagcttgcctttcttcccaaagcgcctaattccttttgcctgctctgggaagcaagccttcgagctttaatcttgtctatt

SEQ ID NO: 337042 - DNA, 1096 bp, Cannabis indica
ttggtcacttgcatttcctaagttcaatttttatctgttcgacttttaggtttgagcagacttatttttatagcaagttatgaatatatagtagacttattccattttttattcggcttgtgtactagtacggggttagctacccaggccgggtagaaagcctcgattatgaagttgttgttgcgcagcttttctacctcttcttttagtgcttgagcccattccttgtccaagagtcttcttttttgttgaacgggtcggaagtttggattgatgtttacggcgtgtgaaattatagaaggatcgataccgaccatgttctcatttgaccaggtgaaaaaatctaggtttgctcttagaaattttatcagagctgattttacttcaagcaacaaaccttttccaattttgagtttcctggtcagaacacttaggttaatttaaatttcttctaattcttccaccggcccaacatttgtatttggctccccaagttggggatccacatctttgtccccgccttgggcagttccctatttggaaatgctcttccccttgtgcgaactctcaccggaagattcttcctttttggccttggttagggcaaggttgtagcattcctgtgcaacttgttgatttcctttcaagcatcctaccccattctttattgtgaacttgatgcacgaatggaatattgatgtaacaatttttaagtcatataaggttggtcggcctaacatgacgttaaaggctgatggaacatcaagtattaggaattgtgccatcacagttatgctcttcggagcttgtgcaacagtgaggggtaagcgaatttttccctaaaggtgcaacactctgctggagaaaccataaacgggctggagacaggggatcagatctttgagttggagccccattttttcatatggtgttttgaacaagatatttgatgtgactgtcagtagtcccgtgatccataagtggaaataccgagtaagctatacaatcccacaccgcctaaggaaggtcaagtgggatgattcttagactgtgtaggtatgggactacacagttgaagagggcttaaatggattga

SEQ ID NO: 337043 - DNA, 813 bp, Cannabis indica
atatagtttgggtctgggtctaagtccttttcttggtcatgttcgcttctggtttcagttctagtttcaactcatggggtacgggtcgagtgcaagcattagtcccggatcccaagtcttgaggtgggtcttaggttcaagtttgggtctgggtcaggtcccaaatctcgatccaagttctggtcccagtttgggggtccaattcccgggtttgggtcccccatctatgttcaggtcctaggtcccgatccaggtctaagtttatgttctagttcaggttcaggtctagagtcccgattcgagtccaggtctcggtttgggttcaggttcgagttcgggtcccagtactagtctgagtctgggttttgggtcccaggtacgagtttggttcttcggtcccgggtctgatctaaatttttgtgtctagatttgggtttgggtcccgatcttggtctaggtcgtagtcttggtttatgtccaaggtcaatggtcccggtcaaggtccaagtcctagtatggattttggtttgagtttgggtcctgttacagtcccaggtctgcgttcctgtcccagtgctggttagattttgtgtccagaatccggtctggatcccggttttggttcgggtctgggtacggatctgggttcgggtcctggattcaaacactgactacaggtatggtcgaagcgtcagctccagattaggatctcggtcttggatccctatctcgttccagtttgggtcccgggtctcgggccgagtcctaagtttgggtttggggttgggttccgatagttaggtcctaggttct

SEQ ID NO: 337044 - DNA, 616 bp, Cannabis indica
agaagaacatgatgaatggattcgctagctaaattacagaaaggacacatcaaatccacattcacatgtttagtattaagctgtgtcttagttggaaggcatcctgagatcgctcgtcaaataaaatggtgaacttttaggggaacatcaagctaccataacagcttccatctcgcatggttttcaacaatcataccagtaggagaagtttcttgcaatagcttataggcacttttcacagtatagaaacctgatggttcacgacaccaataccaatcatccttcacagctgtagcactagttgaatagaaacaatgagatttctatctctaacttcaaacatatcttccactaattccaagtcccaagccaaatcacccaccaaaaacagactagaaaccctttgattgaccaacccacgattaaccgaagtaacatatgagtaatccaaatctggcaaccacgggtcttggagtgttaattccatttttggcatatttaattgacaaaaatattttattattctttgtatatttcggctggcatttattgatatggtttccatatttgtgtaaatctaaacttggaaggaaagttgactagctttcctatttat

SEQ ID NO: 337045 - DNA, 874 bp, Cannabis indica
tgagattggggtgcagttctaggtcccggtcccagttttgtgtcttaagtttggttccatgtttaggtcttagtttgggtccaagttcgggtcccgagtccaggtctgggttgggagtatgggtcctggtctagttacggttccgggtcttggtccaagtctagttatggttcgaggtccaggtccaagtctttgtttcttacctcttcccatgtcccagtctacatccgatttcgattccaattttaggtcacaaggtatgggttcgggtctaggtttgggtgtgggactaggttcaggtctgggtctgggtctgggttcgagtctagggctgggtcccagatctagacaccgactacgggttcagtccaagccctaggtccagatccggatcccgatctcgattgccgatttggttccattttggttctaggtcacaagctgggtcctaggttgaagtctgggtctagagtggggtcttaggtctcgttcctagtttcgttgcccatgcccttatcctgattctaggtctaggtcttagttctggtcttggttttggtcgtggtctaggtttgggtttgggtcctagtctcggttcgggtttgggtctcggtcgtggtttttattttgggtttgggttcaggtttgggtccttgtcctggtcctggtcctagtcctagtcttgttccagttccagtcgcgattctgagttcaagtttgggttcgagttcgggtcggggttcgagtcttggtccgagtttgggttgaggtttggatctcagtttaggtctggatcatgcttcgagtgtgggttaaggtcctgggtttgggtctagggtcaggttcgggtctgagtcccaggtttcgatctcga

SEQ ID NO: 337046 - DNA, 916 bp, Cannabis indica
tttgcacccgtacttcaagaaggttgtggattatttttgcctttgtccgacccagttgactcgcaagggcattaagtacttgtctgccctgttcgtcctctacgccattcaaggatggggtgtgccgtccccccacgaggttcacaggctttttgacttgaagtctacccctaagtagagcagctcgggatacttctacctctctcagtcagattgcaagtggctgacgggcaccgtggacaaggatgttagcaagatcaagggttttgttgatgagtactacttcgtggaaggcatggataccatctatactcggtttcaaaaaatcccaatgtaatgatgtccacccttcacattggcacttagggacagggctcaaaagatgctccagctaccggatgctgctcagaatatctctttattgacctcgcaggacaactttgtgaagtacaagctttatccggcagactttataccccagcctgtgaaggggaggaagaagttgtccagggctggctgagttgagggagttgagcaagagaaggagctcattcaacttaagcttgaggctaagttgaagggtgatgctagagccaagcagtatgctcaggaatattctgagcaggaataggaggcacaagaatattcagagcaggtgaggccaatcaagaagaagaaaaccctcttgactgagcagaggcccatagaacatactatccgattaagggagcctggtgtacctgctcgcccgtcaacccttgtagagggaaaagggaaagccgtcctagaggagcaggaagactctttggatgatgacgccccatctgtgcttgttcgggaaaatgctcctgccagtgtgtagagtacttcatcttgcacttatttttcttgattttcatgccttcatatattttat

SEQ ID NO: 337047 - DNA, 520 bp, Cannabis indica
atcttttgagtaagctgaaacattgtaattagcaactatgatgaggatgcactaccatagaaaagggctaccttcagtatggtgtgatagcatccagttgcgggatcaaaattaaaaaagacgaaaataaaaaatcttgccaaggacaatgatcctattttcactgcacacacttatgtctgacaagtgtgttcaattttgtaagtctcctctctaaaataaattaaaaatcctggttcacaatttttagtaacatgcatattttttctcaacatcaattaagtatgatttgttcttgagatactaattagttattctcttttgaaagcataacatgtatttttgtcatttgtaatgatttttgattaaatggcttagaatttcttatatttattgtacatattttattttcggttctttaaaaattaaaaaattaaaaataaaaaaaagaaggaggcgttggtgacttgattcatgggctaaggaaatttgtgcttaattggtaagtatcaatatttat

SEQ ID NO: 337048 - DNA, 1276 bp, Cannabis indica
aatcgtcaatgaaagtgacaaactactcataatcacctctagctttgacattcagtgttccacaaagatctaaatgcactattcttagtggttctttggcacactctccctttacaaagaaagaacgttttgtcattttacctttaggcaagattcataaactagtaattcacccaaagtgatatttttcaatggaccacctttggttaacctttgaagtctagcataacctttatgaccaagacgtaagtgccaaagatatgtttcgtcttcattatcgatattttgcttttcgtagtttctaagtttagctatcttaaatagttcattattaagcacaaatagttcatctggtctaagaacataaagctcttgttccatagatgcaacaaaaatttgaatatcattacgagaaatgatagaaccaaaactccaaaaaattcaatttaaattgttgcaactgtaaacatgaaacagaaatcaagtttttactgaaatttggaataaacataatattgtctaaattcaaaattctattatgaaacttgagttttgcttttcctctagctctaaccgatacaatttttccattacaaactttaagtttcaactcttcagattttaaataatttcaatttttaagcagctgcaatgaacaacagacatggttagtagatccagaatcaataatccaaatagatttatcattctctaaaacacatgattcaaaaactgaagcattactattgttcttagtgttgagaagtctaggaaattttggtttaaaatgtcccttcagttcactatgagaacattgaataatatgtctacttaattgttcttgtattgttcgaattgctggttcaatctcttgtgaaatataatctgaagaagtgaaatcactttctctattcttcttaactgagcctgaagtagtaggattgtcagaggaatcattctcaatatctttagctttctttttgcccttatttgcagtactagagagcaacctccttgcaagtgacaatgtcctttcataagcacgtagttcagcgttcaccttgtctatgtcagacgagttctaatagttagtcataaaagatacaacaaattaattaaactctggtgataagctgttgacaacaaaatgaactcttttctcttttgataaatcaattctcaacatatttgctttttagaacttcaggttcatcatgagtaagtgtgaattgatgctcttacaaggagactgttgggaattattttaccaggatct

SEQ ID NO: 337049 - DNA, 573 bp, Cannabis indica
aaaatatggaattgagataatacagcttacatctgtaaacagcgatatgggcgcgcggatggaccctgctgtagggtgaggcgccgagaatctcggcgggtgcagcctcctgtgcatgccatcgtgtttgaatgtacggcgtgacacgacttcaagcaaaaaattttcatgggcacgcgcgcgcgcaaggctttcttcttcgaagcctggtgtgtgcgattgagcacccattcgacagccatgacatccaatcttccgaaattcataacttcctcaatttttatcggaatcgaattccgtaaaaatcaaaattgcttaatttttcacaagaaatccaaataaaatattttcaaaaagaaaataaaattattttcatggaaaatttcataaatcacatacattcatcaaataatcacataaaccatcatgaaaccatccaaatcaacacaagcatcgttttaattcatatttcatgaaagtaaatcattaccatggctctgaggctagttgttggaattagttttaccaggatgtagatttactaccatgtatgttatttaacatcctaaatat

SEQ ID NO: 337050 - DNA, 498 bp, Cannabis indica
acacgcatttccagtctttggaggcgccttgaacaaaggaatcctggctgaattaggaatactttgcaaagacattgctagagtctctcggagacagaaaggggatgactccgactctaattgtgaggaccgggaaccatgcgctggacacatattggaagcggagctccccaaaaattttaagatgcctgaaatggcaacttacacaagagattcggaccccagtgaccatctgtcctgatttaatagggtgatgaccgtcatgagggtcagcaatgatgcaaaatgtttatgctttccactaacgttgggcgggtgtgctgaagaatggttcaaaaaattagagccaggattagtggactgctggaacaagttacaagtcagtttccggagacagtttgttgcgataagatagatcaacctcgaggtcagcgccttgactaaaataaaacaactaccttcggaaaccctaaaaaacttcataaaaagattcaaaga

SEQ ID NO: 337051 - DNA, 654 bp, Cannabis indica
aaagagtttaacaaaagtaaatattaaagtaaaagttaagcgttaggagcggcaggggcagatccttctgcgactttgctgacagcctcgtccacgacttcctcagtgtccgcagcatcagcatcctcgggaaacagatttcctccaccgccttcagtctgcgtgggcgacatggctcgaaaagcctctgccatctcagcggctttttccccaaggattgagaagtcgaagtctggaattttggaaagagtggtataaatatagtcagagaccgcttggtcatactgcttcttcccattctccttctcgacctccaagtcgcgagacatctcctcgaccttcatctaagagttcttggcttcaagctccacttgctccttagacttgcaaagttctttgagctccttgtccttgtctgccgcttcctattttagtttcttgacgctctccttagagccagcaacaactgctttcatgaacatttccacagaacgcggaataagctcttcagatggagtcctctctgccttggacatgaactcctcgcccacaaacttttcctgcagaatcaggaagtcgcgagttcagacagctggatcgatcatgactttcttccccttgtcttgtggagccttagccagcttcttggaggaa

SEQ ID NO: 337052 - DNA, 531 bp, Cannabis indica
ttttgtggaagctctcatgaggccaggtgtttgatcactcctactcattaccatagaatttgttggttgttttttgggaaatttttgtttatcatagattgggccatttatttcaattagtaactatatttaaggggctcatttcaatgacaccatagctttaatatactttaattcaaaatgatattgattgactataggagtagagtagaatgctattagagaaaaccactccaaactaacatgcatttatggtaataataatcatgccttatcatatttgcaataagattaaatttaaattattataagccaaatttgagatttttagagtttgcaaccttttataagaaggtatccaaagcattatgggcaatttgatagtgtgaagagtgtctagcacgcgcggcagagagatctgcataaagcatgtccacacaaaattcaatttaccataataccctttaagaaggcgacagtacataagtattccatacataagtgttttttttttttttttcctttattttc

SEQ ID NO: 337053 - DNA, 627 bp, Cannabis indica
ctcaaatcacaatccaaattgtaactcaagttgtaacccaaattgcaacccaactcaatttgcaatccacatcgcaactcacgcagcaataccaaaataataaaaaaaaaaaaatcaactctatcatctctagttttgatctctagatttggtgcgcatgtgagtgttacggtttattcttaaaaagcctataagatatttctaattattaataaagagtttgaacattttaatatatgtataaatattaaattattaatatttattattaaataatttatatataaatatcgaaaaattccttatttatatatgaggttgtgacttgaagctgtacaaaaaattaagatcgcttagttatgaataaaacagtcagcaacatattaaaattatagaatctttaatcaatggttgctggttcactaatgcccgttcttcagtggaagtaatctcagttcagattattaatgtagtatgacatctaagtgaaggtgttgtatataatagagattatatgcaagaatcgatatgaataaagctatctttttctaacatgttgtttaccgtaaagacttaattcatatcataatgttggaatttattttaacaggatcttagatctactca

SEQ ID NO: 337054 - DNA, 818 bp, Cannabis indica
tgattgagagtacacaaggatgtcatcgataaatactataacacatatatcaaggaatccttgaataccctattcagcaggtccataaaagttaccgaagcattggttagtccaaaagacataaccaaaaattcataatgtccatacctggtgcggaaagtagtctttggaatgtcctattcttggattctcaactgatgatagcccgattggagatcaatcttagagaagaccatcttcccatgtagctgatcgaacaagtcatcaatcccaggtaaaaaaaacttattcttgattgttaatttatttagttttgagtagtcagtgcacatatgtagggatccatctttcttcttaacaaacaacacatgagatccccagggtgacatactagttcgtgaaaaccctaggtcaagcatcccttgaagttgaatcttcaattctttaagctctgccaaagccattttgtaaggtgcttaagaaactggctccgctccaagtgctaaatcaataacgaaatctatttctcgatgcagtggtaagcccaaaatttcatcaagaaatacatttaaaaattcctgaaccactttgatgtctactggccaaattgattcaggttgtgtggtatccatggattttgtgccctaaataaaacccattacaatatgattagttatcaatgtaagaagtttgaagtgatttatgtttgcatgaatttttcacgcttattttttaatatatatatttaatatatgtacagaatcagttaagtccagaacatatatttattcacaattacagtattgtcaacacagtgg

SEQ ID NO: 337055 - DNA, 1019 bp, Cannabis indica
tcatgtgaccaggcaaaaacgtcgagagctgctctacaaaattttactaaagctaattttattttgagcaataaaccttttccgattttgagtttcttggctgggatatttgggtcaatttccacttcttccagttcttctattggcccaatatttgtatttatttccccaagtcggggatccatatcttcgtccccgccttgggtgacttcctattgggcaatgcttttacccttatatgaactctggccggaggtattttccttcttgaccttggttagagcaaggtcgtagaattccagtgcaattctttaatttcctttaagacatcccactccactttttgttgggaatttaacgcacagatgaaaaactgatgtgacagcttgtaagtcatatagggtcggtcgacctaacatgacattaaaagcttaagggacatcaattatcaagaactgtgcgattatagttatgctcctcagagcttgtccaatactgaggggtaggcaaatttatcctagaggtgcaatgctctagccggagaaaccatatatgagcttggtgcacgagatcaagtctttcagttggagtctcatcttctcataagttgtcttgaaaagaatgtttgaggaagctctattatctatcatagtccgtgccaccattacctctacaaccagggggtcgttatgtgggaagatgacatggctgtcatctacttcagtaaatgttatggtgggctccctacacgtggtactttaggtttcctctcttccacggccaagatcgattcattttgttcatactgtaaggctcgggcatacttttcttgagctttgcctgagtctccagcaagatgtgaacccccataatgacctgtcaatgaccgtccactagtggaggaatcaattggttttgattgttgtctgcttgggcggcccacattaaagcgaaaaaacttggatgtgtctctcttacttacatcctttttcctggcagaaggttttttataagacacc

SEQ ID NO: 337056 - DNA, 578 bp, Cannabis indica
attggttgccgaaaacctcggtcaacattttggtgctttcattgagagctgaaggaagcgtctgaaagtagacactacattacaacgaaacaaaaatggtggagactcgaagcacacgtcaacctcgccctcttcaagatgctcaagatccaaatgatgaggacgtggcctcaagagcaaatgtgggctctgaggaagaagaaggaacccctgatgacgagtatgaaggaaactttgacgagtacgacgcctacgatgaaggcagctactcagagttggtactcttaaggaaaaaggctaccgatcatgaggctgaaatcgcagcccaaaaagagcaaaaccaaaaaatgcaagaggtgatgctggccatgcaaaaagccatggaggccgcaggaatccacttgcatcctaaagccatccctgctgaacttggaaaggaaccagaggaatcctcgccaagtacccaaaagcagaggtctagggaacctagccctataaggtatccctccggagggaacgaaaagaaaaccctacttccacccccggaaaaagaaaaaggtacaggatccgcgaaaggt

SEQ ID NO: 337057 - DNA, 1289 bp, Cannabis indica
gatcaattgatatattccaagtgtgaaacctgaaactaaagaaaacaagtataattctattctaaatataataatatcgaaggaaaacaactataaaaagtaaccaaaaacataggctaaaaatagcctaacaattagaggaacgacaatatccaagatttactacctccaccggtagatggacatctgcaagtcatcgttggaggcccgcatattgctggagattattgaaaagctcggtagaggtatgcccgaacagcgcagcacgagcaagaggaagttatcctggccgtagaagaaaggaagcccaaaattccacgagcaggagggcctaccataaccttcaacgacgaagacgctgtcaaaatcagatttccacacaacgagccagtggtcgtggaagtccagatagccaataaaatggtggccagaaccatgatcgatgatgaagcctcttccaatatcttgttcaaaactgcttatgaaaagatgggactccaactcaaggatctgaccccatgtctcctgcctgtctatggtttctctggtcaaggcatcgcaggtctaggaaaaattcgtctacccctcactgttggacaagctccgacaagcatgactatcatggcatagttcctggtattagatgttccttcagcttttaacgtaatggtaggccgaccgaccttgtatgacttaaaggctgtcacatcgatattccactcgtgcctgaagtttccaacaaaaaatgggatagggtctctgagaggaaaccaacacactgctcgggaatgttataaccttacggtggccaaggcaaagaaggaagtatcctccagccagagcatagacaagggaaaaaacatttccaagtagggaacttcccaaggcggggatgaagatgtggatcctcgacttggggacccaagcaacaatgttggacctatggaagaattagaagagatcgagattgatcctgatatcccgaccacaaagctgaagatcagaaagggttttttgctcaaagtaaaatcagaattgataaaatttctgagagcaaacctagacgtttttgcctagtcacatgcagatatggtcagaattgatccttctatcatttcacacgttctgaatatagatcccaaatcccggccgtacaacaaaagcgaaggctactggacaaagagcgagcattagccctaaaagaagaagtagaaaagctacgctacaacaattttataattgaagcattctacccagcttgggtagcaaatcctgtattggtgcccaag

SEQ ID NO: 337058 - DNA, 852 bp, Cannabis indica
gtgtatgattttgtattaaacctaacttgaattctatttaatgatatttgtagtacccaatatgactatgaagaaccctatggtgtcactgttgactgacaacaagctctctggagctaactttttcaaatggaaaaagaacattaatattgctctcataggtgaaaataccttgtttgtgttgactaaagagcctcccgagtagccaggtgagaatgcgacaaaggcagtcaaggaaaagtttgagcgttggcagaatgctaacaataaagctcgatactttatactttctagcatggtcgacaccttgaaaatagggtttgtcaatagtctcacagctgctgatatcatgaactagttgactgaactgttcgggatggcgtcaaatcaagctcggtttgaagtgactaaaaatttcatcaatgcacggatgtagcctgatcagaatgtgcgtgatcatctgctctagatggtaagttacttccaaaaagttgagaatcatggagctattatagattaggaaactcaagtgagtttgatcttaaatagtttgactccagcttttctacccttcacctcaaattatgtcatgaacaagttgacttttgacttccacgtgttaattaacaaccttcacacatttgagaatttgattggaggaccacacaaaggaggagaaaaagctcctagttctggcattgctaatggtacgtccaagtgtgaggcaaacattgcctctacttcaaaaccctgtaaaaataagaagtggaagaatagcaagaagcctcttaaagctgttaacacgaccaataagaataaaaagactgctgctgttggattatattttaccag

SEQ ID NO: 337059 - DNA, 1125 bp, Cannabis indica
catcaatccaatgataagcttgatgctagatctgcaaaggcatgtttctaggatatcctataagcacaaaaggttatagaatctgtataaaccagaatgggaagcctaaggtgattatttctagaaattgtgtgtttaatgaaaataattttcctcacttgaaagtcaagaaaggtagtgtgttacctgatgcagattcatttggcaagagggaagatttggcagagtttaaaatcgagcttaaaggatttaaaccagatgagaagaatgacagtatagacacagctccagatgagactgaggaactacaagatctgtctgactaccagcttgctagagatagaaccagaagaaaaatccacataccagcaaggtttgcagaaggtgatttgattgcctatgctttgtcagtagatcattcatgtgacataccagaaccattgagtatagaagaggctttaaatggaaagtacaagaaggagtggtcccgggctgtggatgatgaattaagctcgcttcataaagaacaagacatgggtattcgttccgagacctgaggataagaaggtaatctcatgcaaatggattctaaagattaaagaaagtgtaacagaggatgagtcagtaagatttaaggcaagattagtttccaaaggtttcactcaggcggaagggatagattacattgaggtgttctcatctgtagtgaagtataagaccattagacttatgttgtcaatggtaactcagcaaggcttagaagtggagcaacttgatgtcaaaactgcatttctaaatggttatttagaagaagagatatacatggagcaaccacttagattttaggtggaacaagatgaaaaagagatggtttgtaagttggaaaagtccctatacggccttaagcaatcaccacgacaatggaacaaaagattcgacaactatgttcaggagattggttttacaaggtccaagtttgattactgtttgtatttcaagcacctagaagagtcaaaagttgtgtatcttctactctatgtagatgatatgttatgacaaggcaataatcaaaggaattaaagataaactcaaggcagaatttgacatgaaagaattgggacaagt

SEQ ID NO: 337060 - DNA, 689 bp, Cannabis indica
cgcagagtgactgcccgcccggaaagtcagaagtccatcatcacctgacatcgattttatgtcagacataacagccttcccttttccagcaaagggataggatgcccaaacaggtgaaatgggctcccttatgcgaattgcatgtcccataggcctgggcgtggccgggagtttcttcttcctcttcaatggggtcacctgctcagcctcagcctcaacctcggcttcatctttaggattcatatgctcctaagcatactgcttggccctagcacctcccttcaacttagcctctcacttcagttgaatcaactcattctccagatgagttcgttctggcccgctagcatcagatttccccttcttcctcgccacgaacttaggagaaaagtcctctgggtaaagcccgtactgcaccagattctcattggaggttaactggatgatattcccgtcttcctccgaaaaccggacaagtttctgggctctatccctaagagtaagggtgaagggaggacagtgatatgccaaaaatctgctgaaaccgagtctgggtgatgttcggatccttcaccatgaagtattcatcaacaaaatgccctattttgctgatggccttctcatccgtaccgctcaaccacttgaagcttggctgagagaagtaaaataccctgacctgccttgcttgg

SEQ ID NO: 337061 - DNA, 575 bp, Cannabis indica
acgccgaagagataagaaattggccatgataaccttcctcaataattaaataaacatggcaaggcatatataattgatcgtagtagcttataagaaaatacaacatgtagtgtttgtgtcccaaggaatatcacggggttgggagatatgttttaattatataggtacattcattgtactaattatcaatggtggcatgatataaagacttgcattcatacgagttgttgatattaatgtattattgaatatttcatgtattgttgccatcaacacatttttttaacaatgaacattttcatcaacgataattaaagttgagtacatcaaatggtagacaaagtaacaaaattagtacaatatctaccatgagtgcatgcacaacgtatttgtatcttcattatggatgaaaataagagaaatacccagaaaaattctctagaaagatgtgatgaagtgcccgaggtcaaatacgtcaacccgagttcccatagtggcatgcaggtatgcactaggcacccaagtggggagaaacatctctaaaatttgtctcgtttatgtttaatctttttttt

SEQ ID NO: 337062 - DNA, 1009 bp, Cannabis indica
taaatgcagcattcctatttatattttaggatttcttttttctttattattttttctcttttacatattatttcatttaaattagaaaaataattataaaataacaaacgatcatgatttataatatttttactcatttagtaaaaatatttgcaactatttattagaatataaatttatgaaataaaaaattcgaaaaactaattataaaataaatattattttttttaataattataacaataatatttgtcacaaaatcttcatttttttatatattttaaaatagcaaattatatttttagtttcaacactattaatttgtttatagtatacacgttaaaatattatttttttaaattatatcatttaatataaatatgatatatatatatatataaattataaaaattggacaacaccgcgcgaagcgcggcttagttccctagtttagaaataaagtcttgatattatttgatgtagttctttaaaatccaattttagcacgtgaagagacatagacactactaataataatattggagacataaggtgagttgtattccactatagcctataataggtatatatattcatgaggtgtatcattttggttccatacatatatgtcatacacatttatgttttcgatgtatttttaaatagagaaatgctgaagggtatcattggtgctagtcagggccagtcctgagggtagacgggctaggcgtgcgcctcgggcccccaaacgctcagggccccgaaattgtgaaagaaaaaatattaatatataaataaaatattaaatatgaagaaaatataataaaaattgttggtgtagtggaaaaaggtcttacatgatacttttgccagtacatttttgtgctggcaaaagttggtattgcgctggtaaaatagaatttacttgtgatgtgttgacaaaagggggttggcaaattaatattggtattaaaacttttgccagcataaaatgaaaagcgttggcaaa

SEQ ID NO: 337063 - DNA, 801 bp, Cannabis indica
tttctagttgcatcataaatatagtttcctctatgtcatcaatagagaggaactttcttaacattcatctggtagttgctctaagtcaagatgagactaaaagtgacataattattctaaaagaatcttttgatgagactggagagaatgtttatttataattaatgccattcttcagtataaaatccttggcgacttgacaagattttaaatgtcattgtccttcattgatttcatctcatcattcatggcatcaattcacttttgacaattaacactttgtttgacttgttaaaaattgactgaatcatcttccattgtccttatgtcaaactcatactctttaagaaacacaataaaataattttaaattacactttgtttctctcttgcggattgcctaagtagcacttcctcttgaggttgttgagtttgctcttttggaacaacctcttgatggcatagggagttccattggtgaatcctcatagttgtcttcaaatatttcttaacaatgtcaaaaggttgatcattgtcaaaaaataacatttggtagaaaaaattagagtaatttgcggcataacctctttaagtggtcaggtttttgcaactaacctccaattctaaaattttggtggtaaaacctcctaaacccaagttctgttagcacttagccctttctatctattttaaggtgttaagtgcaaggttagaatgtctacgtgtacacagtgtacacgtggcacagtttaattagtccacgtaataaatatttaaaattaaaataaaaaattaattatt

SEQ ID NO: 337064 - DNA, 828 bp, Cannabis indica
ggtctaacttagcttgttgttttaatgggacaaatcctagagaattgtcagccattagacaaacaaaatagtgttagatctcgacagataagtatttgtaaatgcaacatctagttgtacatccaaagatgacaacttacactagtgtttacaatatgaaacaatgaatagatttataaaataagaataactttgactctcgcctaaacgggagatcgttagattcttattttatttgaaattatcttttattagtttcctcttacctttttcatttagaatttgcttaaatagtatattattggatgaatagtttataaatcatcttcttatgatgtcattataattttcttatgaaattgaatggtacagatgactatattttcgacatactatcccgaaatgatgtaaatcgtcgatcttataaaatctcctatttgtatatgtttactttaggcaaattagacttagagttagattagtagtggtagtccaagagagaataatcactcattgtatatttggtataaatttaaatgtttgactttaaattttagattccaaatagaaattttaaatttcaatttttagaatacattgaacaatacagtacaattttcacaagttcaatatccattttatattaatggattctaacagtatgtttatgtattgaatatgagttttgtattctgtgaccaggatccacttggactattctaagaactctctattgtaactagacctaagtcataaaaagaccacaaccacattctaatatatctatggcattttatcttgttcatagtggttttgacaagatcattc

SEQ ID NO: 337065 - DNA, 784 bp, Cannabis indica
ggcactttgagtttccgaaatgatatgcgggagaacaacctgaaatcttgcaacaagaaccttggtaatgagctttgaaataacatttgcaaaggctgatcggttagtaatctttcatgttctttggctttttaattttgggatcaaggtgataatggtacggttcaatttagtagggtcagcaccttcattgagaacccccagcacagctttggagactaaatcccccactaaatcccaatgttattggtaaaacatcgctgacataccgtcgattccggggcttttatcaggactcatacttttcagcgcttcatcaacctcagctctagtaaaaggctttgtaagatcatggttcatatcagtagtgaccattgttggaatggttttaagaacagagcacatcgctgcatcatctgtggaggaattttgaaaaatattctgaaaataatcttcaattacagtgactaggtccgagcgggagtgtactttgtgtccagaattattgatgagaaatttaattttattgttggagtgtcgtgctgaagctttcgcatgaaagaaatttgtgtttcgatctcccaaattcatccaatctacacgtgagcgttgttgccaatacatctcttctagttctaatacatcatcaagaattaattcagaggttttaagctcttccatgatgttgttagatcgaaccgaagtgttattgagttcattgacgcgggattgagcctcagcgatcgttttcttcatacggccatattgttggaaatattttacc

SEQ ID NO: 337066 - DNA, 707 bp, Cannabis indica
ggaaagctgttatgtctaaaatacgatcgatgtaaggtgatgatggacttctgagtcttgttcgggcaatcaccttgcctattactttctctagtttttgagcttcttgatttttacgcttcatatctgtttcttctaatcatgctgttttcgtgctgtacagacatgtctcggcagatgcttgacgctctgaagaagagaatgggcggatgctctagtgccattcctccgaccaagaagtctaagggcggtgaggggtcctcttctaaggaaaagaggcctgctggggaggtcattgatctttctaaggagctaactgctgcaaacccctctacccccaaagctgataagtccaaggagtctagaccaccaaaggtttggtctgaactggtcaggagtgatcctgaacgggtgcgcgcacctactctacctttgctggtgcttccacaggtcaagaagggcaaggagatattggcccattacatgaaccagctggttcctgaggtcagtgaacaactggctggtgctgacaatgactcttctttggaattgctggtgggcagagtcttgaaggagttcatcatggtaattcttctttgatacttccctttaatcttccatacttaactcaaatgctaaagttttttccttgtgcaggccggtttaaagttggcctacacttactcccaggctaagtctgctgcttc

SEQ ID NO: 337067 - DNA, 939 bp, Cannabis indica
tggtgccttttacaactggggcactctgggtaagtggatcgggtctcagaactatcttggtgactgcctcgaccatggttcccccggaacctcttgttctaacctgagccagcggttgcagtggatgctttccttttctgagccatggccgaaccactacctcccctgctaaagcctaatgcaagaggggtaggagccctgccaaccactggtgtcctagcagactctgtcatgcatccagttacaccctcagcttgcagtgccttttccaccatttcaacataggttgttttgtcgtctgtagtaatcatcaaatcatgtcgaatcttcgcattcaatccatccagatacttctcctttttactaaaatcagttggcacaattctcgaggccaacctcgccaagcgatcaaactgggtcgtatactttgtaacactcatgttttccttctgagtcaagtgagtgaactcttttcttttggcacttctgacggcctcattatagtacttggcattgaaaagttcctagaacttttcccaggtcatcgttgtaacatcgtgtatcatagacaccatgtcccaccacactagtgcatcctcttgaaacggaaaaagtggcacagaccactctatcattcccggtgacgcccatgaaattcaatatcttggtgatcacagttaaccactgctcgactttcataacatccggaccacacaggaaaactggaggtgcctgcttacggaacctttcatacagaggttccatccgattcactacaatcactggttcggcctggataacaggggcaggtgccactggaatttctagaacaagcactgcaggagcaccctgctgtctcaatcgctggatttcattatcttgttcatcgattctggcttgcatttctacaaacctattttcctaattctgagcttcctg

SEQ ID NO: 337068 - DNA, 1535 bp, Cannabis indica
ctttatgcttctgatgtctgttttctctaaccatgttgtttttgttccgtgtagacatgtctcaaaagatgcttgatcctatgaaaaagagaatcggaggaagcttcagcgcatctcctccggccaagaaatccagaggcagtgaggggacctcatctaaggaaaagatgcctgctagggaggttattgacctttctgaggagctaattgttgcaaacccctctactcccaaagttgctaagtccaaggattctcgaggaggaagtttaaataggcctgagcaacaaaaaggtggatcgaagctgatcaagggtggatccgagctgatgagagctcctactcctcctttgccagtttttccagaggccaagaaaggcaaggagatgctcgcccactaagtgaaccggttcgttcttgaggttagtgagcaacaggccagtgctgacaacaactcatctttggagctgctgatgggaggagtcttgaaggaattcacaagggtaagtctttcctgataatttccattaatcctctttacttggctcagattctaaagttttttctctgcacaggctagtctgaagttggcttacacatactcccgggctaagtctgctgcttccacgaatgcaactctatctaacaccatgagagcggaggtggacttggccaagaaggatgctaaggacgccagggtggaacttggagctgtttggatggagctgggtgaagtcaacaagaagctttttactgctcagaagaaaataactaagttgactaaggatcttgaggcttctgactgacttgaagagaccatcgagaccttatctgcagaagtgaacagccttcaagatgaaagaacatcccttcgagccggttggaagaggagaagaagactaagggggaggagcttacagttgaggtgacgaggctgggagagaatgtccatgccttagagacagccgatgtcgacctcttctatgacttttggaaggctaatcctcaagcaaacttcgattacttgggtgaagccaaggacatgtacctcaagttctgcgcttcccaagtggtttgtgttgaaattgaggcggctgcttctacctctggccaaaatgctgatgtacctcccattcaaacaacaaatcctccagctcctaccgccccagaagatctgaaccgagagcttaggactccagctgtttaaatacttcttctcttatccttctttttttatatatatgttattcggccataaggccttttttaagacatcatgactggccaagcggtctttaaacttggaattatttttcattttacagataacaagctgaccaggcagcttttgatcctggtattatgcgcttttgttatctttaatgaatttcattctctatttataatcatcgtgcaattgtggttgttttatatttaccaaatgctttgtacaggtataggtgcccccaaagtgaccgagcaaacttatgactcttggtcacttatttcttacaagtatacttttttatctattcggg

SEQ ID NO: 337069 - DNA, 660 bp, Cannabis indica
agtgaaaattcataaataagacatagtctaattttagaattataattttttaattaaaatcaattaaatgatcttaaaagcagtattgtctcaactagtatggggaccatgtgcctatataaccaagcttctaataagcagatctagaatttaccaagtaaattccctaacttattaattcctccatgcaccactatagatttggaattgcactctcagttatatagaacgctctatatgttccacgatatggatacactatgaaaatttaaccatcgctctaatcgcaataatcaaagatcctctatagatgatttacactgagtagggacaaatttaccgtttcacccctcaatctattttatccttaaaacacttagcttcccataaatgatatttcagtaaaccaatacactgaaataggagcatatagctgaatatgttgcaaagtgtttaacttgtcagcaagtgaaggctaaacaccaaaggcctgtaagcttgctgcaaccaatgaatcttccggaatggaaataagaagacattgccatggactttgtgtttggattgcctaagactacgggacagtacaactttgtgtgggtcattattgacagatttacgaagtcagcgtactttttacctgttcaaacgaatttctcc

SEQ ID NO: 337070 - DNA, 210 bp, Cannabis indica
ctactctatcactaaggggttcaaaacaacaaagaagaagaaggaaagagaggtggcggctaggttagatagaaggctcaggtttttctctgaaaggaataagatgcatcatcttttcctgaagccatcactacttatttatagtatgccaccaaaaacgccaactttcaaatttaacaatttaaatgtcaatttcaactatttaataac

SEQ ID NO: 337071 - DNA, 616 bp, Cannabis indica
ccaggctaagtctgctgcttcaaggaacatgactctgtccgacaccatgagggcggaggcggacttggccaggaaggatgctcaagaagccagggcgcatgtcggagctgttcggttggagttgggtgaagccaacaagaagctgtttgccgcttagaagaagatcactgagctgactaaggatctcgagcttcctgaccgttttgaggagaccatcgagaccttagctgtagaggtaaacagtcttcaggatgagaggacttcccttcgagcagttcttcatcggatgaaggaggagaaggaagcaaaggaggaggagctttcggccaaggtggcaaggttgaaagagaagatcaatgccttggacacagtcggtcttgagctcttctttgactttttgaaggctaatcctcaggccaattttgactacttgtgtgatgctaaggacatgtaccttgagttctgcgcgtcccaagtggcctaaggcgaaactgaggcggctggttcaacctccggtcagactactgatgtatctcttgttcaaacaacagatcctcctgctctatttggcccaaaagaaccgaaccaagagcctgggactccagctgcttaaaca

SEQ ID NO: 337072 - DNA, 1595 bp, Cannabis indica
ttcggaagtatcaatagattctattcttgcagttgctctatcagaacctttatgaacatatttgaatagatatttgattgatctagagtaattgtaaatctcgatattgatatgtgcatcaaacttgacaatcaaatttctattataagggacaacatatcgattatctaaaatgacagctttcttttcaatgtgtatacctttatttcttcttttgcagactggaaagccatctgtgtctattgtggtccgatcattaaattttttggtaaatgttttgtgcacctaccttgcatcatacatggaaagtttgaattgagttttccacaaggtccatgaatcataaatttgttaacgacattataaccatcaggatcaatatttgagtctagaatttctgcacttattattttgtctatatgttctgctcaaggatttttcaatgtcgaatgcaagaaaagtaatatgtgtgcatgaggcaatcctcttttttggaactcaattgtgtatatacctgcaataacattgagaaaatgttaaaatttacatttagaattgttgaaaaaactgtgaaatgattttcataaaatatcattttaaaataatttaattttgttgtgaattcaataatatgagaacttacatgcgattatttttctaaaaggttgttcttttttcaaatcgtgcattagttggttcaactttatttcaaaaactctgcatatcatatcaaccctattctcatcgtctttttaaccaattaaattaatcatgtcatttattactagccacttgggggtaaaatgtgtatgtatctaagaaattcctaaaaaagagcgaaggtcatttattaattgtgcccaaattttgtcagcagatgaaagaaaatcattaaaatcacccattaaaagccaagggttattataaatagtatcaccaaggtgatggagaagtttccacgtgttagagcggttattgtggtgtgggaccccatagaagccagtgaaagtgaatagacaatgattaggaaatcaaatgtaacagtgaaagtgacttatattataggaaagtagagttagatcaacatcttgagtccatcacaaaaggaggccgccactaaggctgacctgagggacttcaacaccatttgcaaagtaaagcttagatctaaatttattaatagcaccaatagggagtttagtctccacaacatacaaaatggttaatttacactacttaactaaaatggagagtcgacggaatgctcatttactccccaatccatgagcattctaacttatgatactcatggctcttggcgggtgcgctgatcaacacccacctcatcggggttactttcatccaaggattttgcgagattatgattgcgcttaagaagcttcctaaactcggctagattgatgcccgaagggcgcttgggcttaattctgcgaccgaggggagcacagagggttggcgcagaagatgctccaggggagaattgcagtggttgagaggtcgttaaatctgcaagtatagtggagaaggctcgagagaacggtacattgttgttggaatttattttaccaggatct

SEQ ID NO: 337073 - DNA, 622 bp, Cannabis indica
tatttatgttcctttggactcttcgtaatatatattaaattggcaaaattagctaaacattgtaattttattaagataataaaaagaatttatttttattatttttgttgttttcttattttattttagtgtgactacaaataattatataagctaatatatatattatataaattatatttacaatcgatgcgtaaaagaaaaaagtatttacagaaagttacgtgtcatttaagaactgacggcacaagttttttgtgtcagttttgaaatggcataactctgtttgcgtcacttccaaacagacgcaaaatgttataaagaaacttttatattttgcgtcggtttcaaaatgatgcatatagtttcctccgtcattttataactaacgcaaataatacaccatttgcggtagtagtgtaagatcaactaataatattgacttagttgatttaacggtaagcttataatatcttatccaaatttaatatcggtccaatccgatgtgtactcgattcatctgatactgatatactttgctaatgttcttgaaaggacataacacttatctaaggtgtaagtataccttatcgctgattatcatgttattctaaatccagtg

SEQ ID NO: 337074 - DNA, 703 bp, Cannabis indica
cctatcgataaataggataccaaaaccaaaaaaaacaggaaaaactaaggctcgggaaaaagccccaaccggcaatccgattcccaaccggaaccccagttcctgggtaccaaccggtcgaccggttgcacggggcttctcagaaccggtcgaccggttctgagcaggggacaaaaattcgatccctttaattcaaatcaagcccaaacttttccataacttccagaatacctgtaaacacagtaatgaagcaaacccaagcaacagaacacaacaatccacacaaattctcaaatcaccattagagagctaagtttgagttcataaactctaactttgctcaaacctcaaatcaacctatagatcccttcaaataagcttaaacaacctcaaaccattaccagaacaccaaattaaaatatttcaaatcacatagcaacctagaatctaaattcacaccaaaaacctaacctaaactacaagaacctcaaaagagagaaagtatgaagagttaccttgaacaaaactttcaattactactaatatctcttgattcaaactcacaaactacatccccagctgctgcccaagagaatcgaaagagagagagagagagagagctaatcttctatccttccttcattttcctcaagcttaagcaaagcccttcttctttttttttttctttcttattctattttaa

SEQ ID NO: 337075 - DNA, 599 bp, Cannabis indica
atttcaatacaatctccgtaattaataaattacgctttattattcatttactcatattttcctaatcaactcgtaattagtttaagtaggattataatcctactctaattcccacttaatcacatatttaataaaatatgtccaattaaaatatcaatatatttttcgggatattacagtatacttgcgtattaaccataatttttgtaacactctcaacacgaagttgaacaaggcatcagacctcttcctttgcatttcattccaaagtaaagatccaggtgctatccttgactgtagagccactaattgttgggttttgtaccctaaaaacccatttcaatataatcaaatttactgattaataaagatcagaattcattttatgttgcatggttcacatgatttatttcatttttatatttaatgtgtaaattctattaagtccagaacatatgtatttgttcatgattatagtgttgtcagcaaagtggaatataatcatgattatatgttcaaaagtttaattccctgatttgtcagtttattggatttagactggcatgataatcagcgataagtatacttacaccttggat

SEQ ID NO: 337076 - DNA, 841 bp, Cannabis indica
tgttatttttttataaaaatattactaagcggtatttttttatttttttgctgtgtatttttataagtttcgtaaaataaaaattgtaactgaccggtcggttataaaattttaaaaaccgaccataaccgatcgattttcacccctagttcttcttcttcatcttttttttattgttatttttttagtttcgaaagttttagtcacgtttgtgtctcgtgtggttggttttgagcatattttttgtagttggtttttgatgagtttctcttctgtttgaaatccatttttcctcttattttttccctcataactattttaccctttctcctataaatttttattttattttagttttccatgcttatgtccaactttgaagtagcaataccattacggccttttgtcctattcttgatagcattgacaagctcaaaagccactaggatgttatctttgatcaaacagtttggcaagaaagcgctatgtgtttcgaagatcacatggaggagcacatgtttaaaatagccaacaagaagcttggtgacaagcttagagatgacattgcaatggccaatgggtcgttaatcttgcatccattaaggtttttttatttttggaatgagagtgataatactcttgttcaaactagtggggtcagctccatcatttaaaatacttaacaccactttggtaaccaaatcactctcaacatatcaggttttttggtaaaaaattacagtgtaacgcctcgatattttgccttattttacaaaaatactattttcatgcataatttgaaaagataaaaaaaaaaaaatttaaatacaacagtggattt

SEQ ID NO: 337077 - DNA, 1452 bp, Cannabis indica
tttcgcttgtcattcctacttgctatgtgctaataatttctgaatgagattttgtgttgaaccttacttgatttctatttattgttatttgtagtatccaacatgacaatgaccaaccccatggtgtcactgttgactgataataagctgaatggatctaactttcccaaatggaaagagaacattaacattgctctcattggtgaaaatgccctgtttgtgttaactgaaccgtctcctgagcagccgggtgataatgcaaccaaagcagtaaaggagaagtacgagcgttggcagaatgccaacaacaaagctcgatacttcatgctttctagcatggttgacaccttgaaaacaaggtttgctaacactgacacggctgcagaaatcatgaaccagttaactgaactattcgggatggcatcaattcaatctcgctttgaagcgacaaggaatttcatcaatgcacggatgaaacctcatcagaacgtgcgtgatcaccttctccaaatggcgagttacttccaggaagctcagaatcatggagctgttatggatcagacaactcaagtgagtctgatcttgaatagtctgactccagcctttcttccttacacttcaaattatgtcatgaacaagaaggaacaagactttcacgagttggtaaacgaccttcagacatttgaaaatttgattggaggaccagtgaaaggaggatctaaagctcataattctgggaatgctaatggggcggctaaggctgaggcaaactttgcctctacttccaaacccaagaacaagaagaagtggaataatagcaagaagcatgttcaagctgtgaaaacagttaaaaagaaaaaggctgctactaccggtgataaaccaaaaggaaaatgcttctattgcaatgaaaagggccactggaaaccccaatgccctaagtttctagcaaagaaacaaggtatttctttctatgctataaactcatgtgttttagagaattattatccccttgggttattaattctggacctactaaccatgtttgtttgtttttcttcttatttcagctccagctgcttgaactcggatgctatcctagcgagttgaatcggatggttggacagatgggtggagatagtccaagatgaagatgaagctcggaatcttctatttttaaaattattatttttgaattaattgttttattttcagaataatttagatttcaattattagtttgggatttttattccctatttttcatattattgcagacaattccttttatattggagaattttataataaagttttctattttgaaatgaattgcatttatgaattgagcttcatttactttatcttgtatatgccagtaccaattatatttatatgttttaatgtttgtatgtgtatgtgtttttattattgatacaaattctatagtat

SEQ ID NO: 337078 - DNA, 841 bp, Cannabis indica
gcgaaggacattcttctgatcttgtacccagccataggatgatagttcgtacaaagaaaaccacgcgtctggtcgacgcttctgatcctcaagtggctcgacttgctactctgcccagcgccaaacaggattcgaccgtcccgatggaggaggatcgcgagggggacgctgaggtccaagaggttgaggagctggacgatgcacttccatgcagtcctttcgaggtggagggagaggaggaggttgaaccttcaaacttcggggagtacaacgtggctgggcagccactcgatgttgacggagacgtcctggttgagggcgtggactacgtcagtgaggagctttcttcggcggttcctcataagaggcagggtgccttgggcgccaggtgggtatgtcctctgtccaagattacgaaggtgcgctttcgaactctcgatcaggacgggtacttgggcgagttggactgctacattcccgcccacgacaatcgtgccacaaaccctgacaaggggatgtgcgcctggttgggggcccatggccagcaaggggtgctgatgcccttgcacaagtacttcagggatgtggcagagttctttggtctatgcccagcccagatcactcctaagggcttaagtgtaacaccctaactagcataggcgcattacgtgatttttaaacatactgtgcagctcgttgctaatcaacgaggtttatggaaaacgtgattaatcaaaatttttgcttcttaattaaacttataaattatttatacaaaatattcgggatcccgattacaaaaccatttataaaagttcactgtctatataaaatacttgtc

SEQ ID NO: 337079 - DNA, 1073 bp, Cannabis indica
ccaacagaagctaagaaataatcaaagaaattcacgaaggcttttatggagatcacacaggttggcaaagtttatcaaagaagattatctgtcaaggatactattggccaacaataaataaagacacacatgaatttgtcaagatatgcgataaatgcctgagattctcacatatacctcgggtaccgccaacagagttaagaatgatgatctcaccatacccatttgcaatatggggaattgacttgattggggcattacccacagggcgaggaggtgcaaagtaggcagtagtagcagttgacttctttacaaagtggacagaggctaaaccagctagtttccataacttgcaaaaaagttctcaatttcgttgtcaagaacataatttgcagattttaaatacccattaaaatagtatctgacaatggaactcaatttgatggcgagctatttactgagaactgtgaaaggaataaaattattaagagcttctcgtcagttttgagaccctaagcaaatggtcaagtagaagttgttaataaaacctcaaaggatactattaaaaagaagttggatgctgctaaaggaagataggtagatgaacttccacaagtactttgggctcacagaataacagagaaaatagctacagggcacactccattctcgttagcatttggctcggaggcaatgctacctgtagaaattgatattgcaacccacagacatgaattctacaatcgagaagaaaacaaagaaatccttaaattgtccttagatctacttgaggaaagacgcactgagtcgcaaataactaatgcagcctattagtatcgaatcacaagatactttaacaaaagagttaagaaaagacactttaatgttggagatttggtgttaagacgagtatttacaaacacacgagatgtgtctgctggagtggttaatcctaactgggaaggttcctatgttatcgaggcagtagtaggaactgggatctataaattaactcggcttaatgactcgctaataaaaaaccactggaatagtgaacatttaagaccttatta

SEQ ID NO: 337080 - DNA, 537 bp, Cannabis indica
aagatgttgttctttctgaccatgaaaaaagttgcgtatgtgcttactgttttgaaaccagttgtttctgagactccacctcctgccgagaagaaggatgaagtcgagaagtacgaatcgcaggttaaggaaagggactcctgggtagagaatgattttctgtgtaagaattttattttgaatggtttgtctgatgatttgtatgattattataattctgacaaatctgccaaggagatatgggaagcattacagaaaaaatatgacaccgaggaggcgggaacaaagaaatacgctgtcagccgctacttgaagtttcaaatgaccgatgataaatcagtcgaagctcagtctcacgagcttcagaaaatagctcacgaaattctgtctgaaggtatgactattgatgaacaatttcaagttgctgttatgattgataaattacccctcgtggaagatttaaaataactctcaggcataaacaaaagaagtttcgtttggaaagtctgatcactcgtcttcgaattgaggaggaag

SEQ ID NO: 337081 - DNA, 674 bp, Cannabis indica
aatatcacacagctatgaatatccagcttttactaagtcaaaataaacgtgtattaagtatgttgtaaatcgtattgttttggaatgtctccctgggaatagagtagaggcaatcttgatagcgagctggagttcttcatatttctttccaaggttgataatgcaaatctcgtcgcttttactctggaaacataacatcctatctgacaaccgcagcttttgatagcgagatgatcttttttgcgtgcatgtcttcctatggcgaggtggatgcctcgctataacttgctctagttcacccatctgctgtacttagtttgtatactatacattatatgctaagtgtcttcacaaacaatgtatctcatccacgtaatcgaggttagtttatcgtcttatacacctgaagttacatggtttctcgttgatgcgcaagacaacattttgtatatttttgtcttgcataagactatttagtcagctgagttgaaaacatattttgttaattatgcttttaaagagctattcctcctcagatataattttgattacgtgtctgagttcatattcttcccagtttgattacgtgtcttcgagtataacaattgtcccttaaaaaaattcttttttaataaaaagtgctttttaatgattacaaagggtatttttgtcat

SEQ ID NO: 337082 - DNA, 614 bp, Cannabis indica
aaaaaaaaaataaacattaaattcaatagattcagggaaccataccttatagcatgattatattgaaaatttattgatgttttacattagagaaaataaatcaatttcaagactaaaggtttctaatcaataaataatatatgtgtaaatatataaataaaattgtttagtgaattagtatttacataaattacttagttataatagatataataaaataattaaaaaattaagaaaaaaaaaaacataaaactcaacatagaaaatcaatccatgtttgtttatgatgaaaaacatgattatatcttgagaagaaaatgaaaaaaaaaatacctcatatccgctccatacctttaaacatgattatattaaattttcattgattacattagagaaaatgaacaattttctttttaaaggttaaattatatatgaaatgatatcaaaattaagaaaaattgaaaatgcaaagaaatggataataagctcttatatgacatctcttatactttcttttatttatatatgtattatttattatttatatatatagatagattatttatattagagatggaaattggtcggttaatgtacgggaatgcaatccccgc

SEQ ID NO: 337083 - DNA, 746 bp, Cannabis indica
agatcctggtaaaataaattccaacaaagagggtggtggagttgggtcaatacgaaattactttccaaccccgaacagcaatcaaagggaaagccttagcagactttatggtagaatacacaagcaaggaagaaagcataccgaaaagaaaccccgagtgggtacaaacacctcaaccaagtaacagtgaagataagccgacttggaaactacacgtagacgagtcagctacaaatcagctatctggtgcaggaattgcccttgtcacgcctgggggtaacgcctgcacgctgtagtaaagtttggattcaaagaatataataacgaagccgagtatgaagctcgaatcgctggtctaaaactagcccgagagatggaagccgaacacatcgaaatgtgcagtgattcacaacttatggtaaatcatgtatccacagaatacaaggccaggggagaaaagatgatagcgtatgtgagcaaaatttgtgaatttctttcacaattcaaaagttacggtctcagacaaattccaagggaagaaaacacaactacagatacgttagctcgattggcaagcagtaatgtaagtgataaggcaaacttggttcctacccagttcctcgaagatcctagcatcactggcacggaagaaatcaaaatgattgatacttccccaaactggatgacaccaatagccgcctacctcaacactggggaactcttagataatcggaatgaagctcgaa

SEQ ID NO: 337084 - DNA, 510 bp, Cannabis indica
tcttagaatacaccaagatatcaacaatgaataccacaacaaatttatcagagaaaggtctaaagactctattcataagatccataaatacaacagttgcattcgttaacccaaatggcattaccaaaaactcaaagtgtccataacgtgtcctggaagcagtcttagggatacttccttccctaatcctcaattgatggtagcctgacctcaaatcaatctttaaaaaagaactttgaaccaccaagttgatcaaataattgatcaatcctcggtagacgatatttttttttaattgtcatatgattcaactttctatggtcgacacaaagtcgcaaagtcccataagctttcttggcaaacaagactgaagctccccatggagaaagtctaaagtctgatgtaacccttatccattaacttccctaatgttttttcaattcacaactttgagggccatgcggtaaggtgcaatgaaaaatggttgagctccggaaattaaatcaatgc

SEQ ID NO: 337085 - DNA, 972 bp, Cannabis indica
ttgaaattaaaaaatagttaaactaaaaaaactgccaaaaccgccaaaaactgccaaaccaaaaattgccaaaaaccgtacggtcagttttatacgattataattgctaaacggtctgttacagttttcgtaaaataaaaaccgtaaccggctggtcagttataaaattgtaaaaactgaccataaccgaccgattttcacccctacctgatagggagatcgagttttgcattgatttgattcccgaagctcaacccgtttctattgcgccttaccacatggcacctacagagttggctgaattgaaaaaacaattaggggagttaatggataagggttacatcacacatagtacttctccatggggagctccagtcttgtttgccaagaaagttgatgggactttgcgactttgtgtcgactatagaaagctaaatcaaatgacaattaaaaacaaatatcctctacagaggattgatgaattatttaatcaacttggtggttcaaagttcttttcaaagattgatttgaggtcatgctaccatcaattgaggattagggaagaagatatccctaagactgctttcaggacacgttatctacattttgagtttttggtaatgccatttgggttaacaaatgcatttgctgcatttatgggtcttatgaatagagtctttagacctttcttggataagtttttggtggtattcattgatgatatcttggtgtattctaagacacgtgaagatcatgctgaacacttgacaatagtattacagacattgagagatcatcaattatacgctaagaaagagaagtatgaattttggatgactgaagtcaagttcttgggccatgtaatttctcaagatggtttcaccgttgatcctacaaagatagactctattctacagtgggaaagtccaaagatgttggaatttattttaccagaatcttagatctactcac

SEQ ID NO: 337086 - DNA, 562 bp, Cannabis indica
atttacttagaaaagaaaatagtaatctatcacctgacatatggtcggtcagaagcaccagaatccacaatccaagggttatgaggagtttgaataacctgaagtgcatgagtattgcattgtcttgcgactaaagagatggctcttaatgagttttgttctaaagacaacaagacaaaacaagtatcgaatcccagagaagacgaacagagagacaacaccagaaaaacatcgctggagtcggagaagagccagagatggtgaaacctgagagagacgacgtggaaaacatcgcgccgttggagactgccacacgcgcccacgtgctagcgcgtggagagattcgcggcggagggaggtgcgtggggcccacacgcaactcagatggacgccgaatttttgagtttttccaatcggaggtgggacaagctccctgggtcggaggtgagaatagaaaactccttttaattagttttctaagatagtgcctctaaaccctaatttaagaagagaaggaatgagaaaaataaaatgctttgagaaggttttacatgctttgata

SEQ ID NO: 337087 - DNA, 758 bp, Cannabis indica
taatattcctgtgatagaaaaaacaatattcaacaatcaaaattaaaaatacgacaaagaaaaaaaaagaaaaaataaaaaactggttacccaccacaaagatataaactaaaaattgaaagtaaaaacatatatattataaaaaaaacagattaaaaaaaaaaaagtaaatagaaaacctgaaacatgcacaattacaaaatgaaaaaccggtttcttaaaaaaaagaaaaattaccaaaggaatatcaacggaaggagcctcgctcttcttcttgccgagcgattttgaaactggtttcttcttgcctttcttggcaacattaacaaccttcggatcatcagcaaccctaggctcacaaactttatcctaaataaacataaaacaaaatacagttaaaccaaaatgaaaaaaaacaaaactattaaattaaacaaaacaacaaaaaaaatataagaaaaaataaagacataccaagttagaatgttccccaacattctttgatttttttttctttgacgcactagcgtcatcagaaacagcttttcttttcttagttgaaacaggttttgcgacaattttttcggtttcaaaatcatcatcactcgcagatggaaggacattcgtatccttcttactaacttttttacaaccgtgtttctgagaaacaacatcggctttaggcaattcaatatcaacctgaaaaaataaacaaaataaacataaaaaaaacagaacagaacagataaaaagaaaca

SEQ ID NO: 337088 - DNA, 831 bp, Cannabis indica
tgcatgagtgttgcattgtcttgtgactaaagagatggctcttaaagaattttgttctgccatggagaaagacatcaagacaacacaagtatagaacccgagaggagacaaatagagagagaggacgtcggaaaaaaaacgtccctggagttggagaagagtctgagatgaagaaacctgagagagacgatacgaaaaaccaccgctggagactgccatgcgctggcgcgtggagtgtcgcgacggaaggaggtggcgcgtggggcccacgcgcagctcaaatgaacgccgaacttttgggttatgccgattggaggtgggacaagctccctgggtcggaggtgagaatagaaactacttttaattaatcttttaggataaagcctccaaaccctaattttaagaaccctaattttaagaaaggaaggggtgagaaaataatgtgtttgagaagtttcaaatgctctgataccatgaagcaaatgagagaaaaatatttttatttctgataatctcttttagtatatacaaagggtatatataatacaaagtgaatacctagtaatgctagagtaaataaaaaatacattaaatgtaatttacagctagcttgattttctacagtaagtattgcaagcatatgaaattttgggttaggggattgatgattgtaattggcatgcataaagtagtttaattgttagctaattgcattttattgtttcatgagctaaatgaaaataaattaaaatctgtcaagggtgtaattgaactgaaattctggattgtatgtataagtgaaatttttcataatcatgttattgaagctac

SEQ ID NO: 337089 - DNA, 745 bp, Cannabis indica
atattaagttgctgtagataggttttggtttgaaacctagtaccagttgtgatattagcgagtcacttatgtctggtgttattgatgtgatttaggagcctataattcgccgagcagttgttccactcaggttgaccggcacacctgaattcagaattgaggtaagattagtataatatcatgcatatgttattacatgtttagcgtacatgttgttatgcctgttagattacattgatagcagtaatagcatacatacaattgtgctgattactgataaatgtatgttgggtaaaatactgatcgatgttgtcacaacaatacggctagagtatgactagcatattgagtataggctgacattatggtcgatagtattgtcttatgaacgttctagactaagtaccgtgtgggacacggggattagggttatgatcgggtgtatgggcatcagattataactcgggttatttgtttgttttatgttatgcttttcttactgagtctgtcgacttacagtgcgatctttatgtgtaggtaagggcaagtctaaagctgaggagctgtgagtacgagcaggtgaagattgtacatgtcggggcggtcaggcctggagcgtacgatctttgggacattgaatcttttgatgtatagtcgctgggcgataaactttttattatatgtatagcaagcttttataaagtattttgtaaacgggatcctgaaatgttatatatgtaatact

SEQ ID NO: 337090 - DNA, 964 bp, Cannabis indica
tgaattttatgattaaaagtgtgaatttgatgatagtgatgataggttgcatgttcttagattttgtggaaattttgatgaattaaatgaggaatttcatggattgacttggattcatgtttgtgagattggattgtaattatagggtattattctgggttgaaatttatgttatattgttgtgtgattgctggaaattaattgaggaatttggctttgaagctctcgagtatgagcttgatgtttgcttagttaagcatgattttgttgtgttttctcaatctaaaatttggtattttttttatgaggattaagatgcatttgagttgtgatttttgagccttaatatgcatttttaccctctatttggttggggttcgaaatctaggaaaatttggcatgtttaggccttaaaaatggggtttttgggtgttctgaacccagtcgtcgcgacgggatttttggctgtcgcgactgggtttggcagtgagaaaatatgtttttctcgattttgttttggccataacttttgactcgggactccgtttgggacgttctttatatcgttggaaagctcgttccgagctctatatgattatttgaattttaaatgccatgattgaattttatgacctatttgtaaaaatcccagattgtgtgtgactaggattaccggtacatggtcagaagtacccggggatttggaatctctgtctttgcgggacaacaggtaagaccgtagtttgcacgtagagtatgcgcagtggcacttatgttgaatatgatatatgtcagtaattgtaaccgggattagggttattaccctaatatgagcggttaatagcctatggttattaccctagtgatataagttgagtaaatgctatgccatgctaagtatataattatattgagatttagggattatacctcaaggcataatcaggttggactcggtactcat

SEQ ID NO: 337091 - DNA, 627 bp, Cannabis indica
atacttgtgagtagatctaagttcctggtaaaataacttccaacaaaaaccgtcaagcaacaactgaaaggagtgaagcgagctctcaaagggctttacctacatccctggccggccaagaaagcatatagggcggccagggtgagcctataggccgaccaagatctgcacacaaacttaccggccaagaagtgacttctgaaccaagagagtttctgttcgaccaaggaaacttggcctctacaaggaaccagtgtacaaagctatcctcaacttacaaaaggctggcctcctcatccaaaggctggcctcctcttggtagagctatagtgacctgtcaggttttggcaggagcatggccggccaggcctcatcctgtaggccttgggctgccagacctcatccagcaggccttgggcggccatacctcctgtaaagaccgcttagtttaatttggaaattagcagttaatcacgtttaattatgaaaattatttatagctatttaaataattattatactgttattattgaattcagagatgcatttctatgtcattcagtagttctcataattttgcatttccggtgcccggtaacatggaactcagtgtttggctcagtaaaa

SEQ ID NO: 337092 - DNA, 688 bp, Cannabis indica
attactgggcttcacaagagcaccaaacaagagagcaacaaggaaaacaaactgagaaacaaaccggccaatcccaacaggggaaacatccaagcaaaactaagagaacaaactaactaaggagagagagatacctggttgatgaagcaaaagaaggaagaagaggaagagtggaggggcttcaccaatcgaagaagagagtgtgtctgtttcaaagcaaaagttaatatatgggaaatgagatattgttaattattattaatatataaacagtaaaaacaaacaaaaatctcccaaaaaatttgtgaaaccactatgtttaagaagctacaagaagtgttcagctttgtgttgtgccttatatttgggtattaaagcttttttactggttttgatggctaataccacaaaaaagtctaagaaagaaactgagttttacttcgaaaatgagaagaacaacccaacgatgatgaatatttctcttctcatcagtatatttaacaaactctacactattatgtctgtatatacatatttttgttcaacttgtatcaaataagttgcaggtacagaactcaccaatggcgaagaggagaggagtagcttgagtgtttttcagcccctttcagttggacgatgaccgaggaagaccaagccgtcggagcgaggtggacgatgaggaagacca

SEQ ID NO: 337093 - DNA, 796 bp, Cannabis indica
taaaagaggtatgctcctagtctggttcatacatcgaaatctggttacatcccgagtatgcatccataaagctgagaagctcatgacctgcggtagcatcaacaagttggtcaatgctaggcaagggaatactgtcctttggacatgctttatttaaatcagtgaaatcaatgcatttgcatcatgagttgttgggcttgggcactagtacaagattttctaaccaatttgggtagaatgattcccttatgaagccacatgccaaaaggcgatctacttcctctttaagcgcttggtacctcacggggtgcattttgtggtgcttgtttcagacacctcgcacttcgaggtcaatgtccagtcgatgacactgacctgcggtgatatcgcgaccatatctaaatgtttccatgcaaaaacatccagattttgcttgagaaaaatgataagtttttctcgctgtcgaaaggttaatttagaacaaattttcaaaactttattatgatcagaaggatcgattggcacttcaattgtatcctctacagcttatgcggtgttggtataatcaaggatccttggatctagatctggtttcttcttatgcggtatctcctcgattttgaacacttcttgtcgaggagtcttccaacaggtatatcatatttactgatttcttcctctctgggagttttaatgctgcattgcagcactctcttgaattcatctggactcctcgcacagatactaccccagctggggtagggaacttcatggtgagatgatagatagatgtcac

SEQ ID NO: 337094 - DNA, 782 bp, Cannabis indica
  modified_base (750)..(750): a, c, t, g, unknown or other
ggcaatcccttttagtgtcctggcataccacactggaagcacccctgccctctacactctcccaagtgatgctttttacaactgggacattcttagtaagtgtatcgggtttcgaagccaccctgacaattgcctcgaccctggttccctcataacctcttgttttagcctgaaccacaagattcagtagccgcctttcttttctggtcagtggtcgagatactatctcccctactaaagcttggtgtaggaggagtaagagccccaccaataacttgagtccttcgagactccagggtgcactccacgacgccctcaccttgcagggcctttcccaccatatcataataggtggtgttgtcatcagtaatgatcattaggtcatgtcttatcttcgcctttcacccgtccaggtatttctcttccttgctaaaatcggttggcacgatttctgaggccaatcttaccaagagatcaaacaaggttgtgtattcagtatcactcatattttccttctgggtcagctgagtgaattctttcctttttcacgcttatggctgccacattgtaatattttgcattgaacatttcctggaacttttcccaggtcattattgtaacatcatcagtcagggacaccatgtcccacaacaccagagcgtcttcttggaacaggaatgtggcgtaggccactctatcattgccaatgactgcccataaaatttgaatttggtaatcacagttagcctnttgctcgactttcataacatcgggacctccct

SEQ ID NO: 337095 - DNA, 454 bp, Cannabis indica
aaggcaccagttgaagaggtcattgatctctctaaggaacaacctattgtggaccctcctaccttgaaggtcaccaaatccaaaggttcttggggagggagctcggatggacctgagcaagctaagactggatccaagttggtcaggagcggatccgaacaagttaggctcctgccccacccttggtattttgcacgaaaaccaagagaggcaaagacatgtttatccactatgtgaatcggtcgatcccagaggtgaacgagcaattggttggggcggacaatgatctgtccttggaattggtcctgggatgagttttgaaggagctttcacgagtaagtccttcttaacacctgaagaaaaaaaagagaagaagtgtggggagaaatgacaagaagatattggaacatcaatttggaagagatgatggaagcaggagtacattttggtcatg

SEQ ID NO: 337096 - DNA, 500 bp, Cannabis indica
aacataaataactgctaatttccaaattaactaagcgggctttacaactatattcctttgtctacttgatttttccagtttctactaagtatttacgttcccagttcgagtacttgccgttttaggtggaatactcgcaattgttcctcatattattccttcttattattattactcatttctggtgttgcgaaagacgctcgataacattaggcgccgtctatgggaaacgaagaaatacattcttgctaatacagaaagaaaatcatcatggctggaaaccaagcaaacggaggttttaacaacaaatccatcaacatcagaatgatgtacgttccgttgtctgggggtagaacaccacctgtggatgtcatcaatggtggagtaggtcgaggtaatgtcagacccctcaacctattccctgaaactgctggccctcaaaccgaggaaacatctacaccagcagccacaacggggcactttctgttgggttttatgcc

SEQ ID NO: 337097 - DNA, 616 bp, Cannabis indica
tattatgttgaaaatattttattaagatttaattttatctttgtttataaacaatagttagtgtttatggcataatagagaaaaagaaataaaaagttaagaaaatgcattatttttatttaaggaaatacaaactaattaggttttaaataaatattttctttaaaattattgtgatatattttatagtaaaaatattctgtttggatttaattttgtttgttgtttgaattaaaaaaatagcatttttaaaagaaaagaaataaaaaatggcagaaataaaagcccaaaactatgaaaattggcatttttgaagagccaaaacattccaagaaacaaggcccaatcgattcaaatccctcactcccagcagacatcccattcgcccccagctgccactgccagccagcaggtctctcccttccacgcgtgcgtgaggcgcacgccctcaccctggtcgtgtgtgcgtctcatgccatgccccgcgactggaggtcctctggtccgattctcttcagcgacaaatagtcaaaattgctcctttttacaaccaatcaaatggcaacacgtggcagcggtttaccacatccactaatccgagactcccacgtgtcac

SEQ ID NO: 337098 - DNA, 519 bp, Cannabis indica
tatatcgtggaacatatatagcgttctatatgactgagagtgcaattccaagttctaagtgtggattcaataatgaattaataagttaggtgataactctatgaaagtagagttatttatatctttttgggcattaaattagctttgttctcaagtatttttagtttattttagtgacttttatttggttttatttagttttgcataaatattaattttagtattttttagattaaattttaattaattttgtaatattttatcaatttaatttagtttcccattttataagcgttaatctcaatattgtgtatttttgtaaaaagattaaatgtacattttgaacttgtctcatgggttaaaaaaatggagtaactatcatcaaagtggaatgagctcacaaagtccaaataaattgatattcattattgggcctttgttttaatattgaaaagaaaaaacaaaagaaaaaaaaatgaaaacaaggagtagaagggaattgggcctggtgtgagtttt

SEQ ID NO: 337099 - DNA, 814 bp, Cannabis indica
tacttagttagtataatgtatatatacgctaatagttctaacagccaattcgccttgttaacacatctctacatattgcgaggtagatgcctcactatgtagtatcaatgtcacccttgcaattatgtcctctgacgcgaaatggtttctcgttactacgtgagtcaatagttcgtacatccttgtctcgctaaagactgtgtagtctgcaagttataaatataccctattaactctgcatttaaagtgttattctatttaatatttattaatataattaccattatatttactagttcatattctctgagattgacacgtgtcaccttctgaagtaccagctaaatttcgggtataacactatacctacggtttttatcaaaaaactgcctctaaatgttaatttcaaaccaggcgggtattttcacgtcctttagttttcttttttataaaatgggttaaaaaacagcatctaaaggctcatattatagtagtgtttatattagatatagaagtatacctacatgtatttaaaattacattgttatcagccaaaataattttattattacgtatatgattgaaaattcccaaaaaaaactcaaaagtaaaaacagtttttcaagttgtgaatattgaactatagctctatagattagaaaatgacacacatttaatattagtaagtaggggtgtttatccaatctaattcgcattattttgctcataatgcattcaatttgcactaagtgcagaatcatttagtagatccaatctaatccgcacaatagttcaaatctaatccaatccaatc

SEQ ID NO: 337100 - DNA, 648 bp, Cannabis indica
gacttaaggcataatgtcttgtctttgtctttgttcaagaaaaaaatctcaaccttaagagaattatagtcattatttttattgttgttatcccaatttttgcactctgacgtggcatcacacgatggtgacacgtggaatcagcctcgagtatctgctccaagattatagccctaacaggatgcctcggtggcatacttgaagcaaatcgatcagcgatctgcgcagaggaatcaacacttagcaaattcagctttcgtattatgagtcatcaacgaaatcccaataactcggggatcaaattacagggatatggcatacacatgatcccatgatcagtgtatactgcatcaatcccacgatctttgtactaagcattcatcccacgatctattctgtttatatccattgtaacgagaaagaaaacacttgctctccaagtttacagccctataaatagtgatacatgttcactgggcagagggtaacaaacagtttggtcgagaccttaccctaaatatactatctaagaattcttattcagagacactgttgtaagagctataagaaaacactactacaatgttagcctttagaggcagttttttcaaccccatttataaaaagggaagctaaagggtgtgaaaa

SEQ ID NO: 337101 - DNA, 591 bp, Cannabis indica
gaagacgagctcgattgagttttcccatcaggattgtttggtgaagttcacattttcaattatattatcatcattagagcagttgttcatcttcttcatccacaaagatgcatcctcttcaaacttgtattctacctcttgaaaaaactctgtttgttgcttgtaaagctgccaaatttttgaaccaaaactaaattaattagcttttcattcataataagtatatgtgtgcaagaattgttgagaatttggaagtgttgtggagaaaatagaatagggtgaggtgtataataagatgtacagggtttccttttaatattaattgtcaataaatggaataggttcatgcaacttaattatggtattaagtttccactcatcaatgtgagactctcacaaaaattaaccctaggagtaggagttggtcaggtagtatcaagaaagatattgggcctaactcaacttattaaaagaggattatcctcacataattaagtggatcaaacataggggtaagttgaaaaatgcctcttttattaatcaattaaccaaatttgcctctaattttatatttatttgaaacatacctct

SEQ ID NO: 337102 - DNA, 732 bp, Cannabis indica
ccaagcaacagaccctgcaccttggaacatagcttgacctttccaaagataagctctacaaatggcttcaatagatctcaataccttctttggaagaatcattatttgactccaataggcctgtatagcaataagaactgagttgatgagggtgattctcccagcaaagagagattccttgaactccaacttctaattcgagcagtcattctctcagctaatatatcacattctttccctgaaatccttttcccacatattggtatacccagataggtgaatggcatttcctgtctggtgaatcctgatatctgcataatgtgattgacttcactaggttgcatgttgctacagtataaagcagttttgctggcattcggatataatccagaggttaaagagaaggtttttagagcctgcaacatgtataagatactcatgaagtccccatgacaaaataatagtacatcatcagcaaaagcaagatgattcagtttcaaactagcacatctgtcatgaaattgaaacccctctttttcccccactttcttcatcaatctcgacaagtattccatacccagaacaaaaagcaagggagagatcgggtcaccttgtctaattcccctttttgcctcaaagaacccatggagagttccattgaacatcaatgagaatctaggagtggtaatacagttcatgactagctgggtgaattttgagggaaaattcaag

SEQ ID NO: 337103 - DNA, 684 bp, Cannabis indica
gttatatctcatttacaacttttaattttcctttctcattagaaaggtttaatcagaagtcattcacactttttgattttcctttctcgtcagaaaggtttaatagaaaagaacttaaaaaattttgaaattattttcaagtggtgggtttttaatatatcatgtatttccatataaattctggttaatcatacacatatgcccctcatgtaattttaaagaataacactttgtaattacttgaaaatgattaactttattaataactgaagttcaaaatattacatcaagaaatatgagtttcatcattaatttattggtagtagggtcgcaaatgtttcacgttccatagttatttatcaacgagccattcagttgagctaatttgtaaactccagttcctactatcgcttcgatcacataaggaccctcccagtttgggttgaatactcctgcaaatgcgtctcttgtatttgcaaatactcatcttaacaccaagtctccaacgttgaaaaacctgtttttcacccttttgttgaagtatcttgttactcggtgttggtatgctgcattagtaacctacgacccagtaagttttttatcaagtagatccaaggacaattttaaaagttcttggttttcttcttggttataaaactcacgtctatgagtcgagatatttac

SEQ ID NO: 337104 - DNA, 813 bp, Cannabis indica
aaaaaatcaaaacaaaaaaactattaaatcaacacaaaaataaatgtaaaacaataaacaaatataaccacttagaaaaatataaaagaaccacacacctcaaatttttttctcgtgagctcgccaaatgtatttttaggagaactaaaataaaaatataaccacaaaataaccatagagaaagaagaagaaatgttatagcgtccattttctacactcacggatagaaccaccacagcactacgagaacacctacgaaacaatcattaattctaacaagatggagtatgaacagtaaaatcgacgttagaaaaataactgtaaaataaataaaaaaattaaaaaaataaatacagtatactgcagtagacagtatttttgtaaaaaaatgacagtaaataaaaaaatcaaactgaacgatcgcgtattttgtaaattacactgaacacgtatttattattattatgcataggcactttaataattatagaaaagattattttatattttataaacaattatgtatataaatgttttattcttcatttaacaaagacatacacttcccttattttccttttaactattaattaacttgtcttaattattaatttactgctttttaatggtttgacaatatatagtctttctggttggatagtctaattttatgtaatatttttctatataataataataataataataagggttatttgcggcaaaacctcctaaagtagacatgtttttgcaattaaccccctaatctaaaattttggtggtaaaactacctaaaccactagtccgttagca

SEQ ID NO: 337105 - DNA, 1014 bp, Cannabis indica
agaaagagagagagagagaggacaaaggggagcgagattaggtcgtcgggctgctattggtggtggttttgtgcatcactggcctttgggattgagattgggtcgtaggacagggtgaagggattgataattgttcgtcgaacaaggagacagcgaaaatagcggttgtgctagggttcaaaatgaagaagacgaaatgatgagattcatttgtcaaagaggtgttagaaaaaattaactctttttgcttcagttgataacagtcaccaatcttttagcctctattttcaactgaagaaaaagaaatttgcgtcaatttttcactgaagcaaaatgtaaagacttgtttaaaacttcttgctttttttcctcggttcctcttttagcgttggaaatacaaccgacgctaattgcattctttttgattcagttaccatttgaagcataaaatcactgcttatttattgcatcagtgaatcatttttgttagacacgttggctgacgcaaaaagtcctttttgtagtagtgctagctttcggatgagacctattcctccttcttcttcttcttcttgaattttcgaaataccaaagccatttttcacaaaacaaattcagccattagtgattaagtacatgcccacacataacaagttggtcctcaatcatagtatgtaagactgtgaagaatccaatcaacaagaaggagaatcgggctcaaatcttggtgatactctgctacagaaatgatacaagggttagagatctgagtgggaggagtcatttaattccgctgcaaccactgtaaggtttctcataccttttatgtgtttatttttatctttttagaaatttatattaggatgttagaaacatacttcttagtaaatctagatcctcgtaaaatatattccaacagaaagccttaaaaaaacccctctaaaagtgatttttgtagtagtgatttttttttacaaagatagacagagagagaagatgagagagagagagaga

SEQ ID NO: 337106 - DNA, 814 bp, Cannabis indica
attttgtgaataaaattcttgttgccttgttatctaaatacaatgtcaaacacaagattgccactgcttatcatcctcaaaccaacgggcaagctgaactttctaactgagagattaagggtgtacttgaaaaattcgttaatcctagtcgcaaggattggtctcaaaggctagatgactttctttgggcttaccgaacagcatataaaacacctttgggtatgtctccatatcgattggtgtatgggaaggcttgtcacttgccggtagagctggaacacaaagctttttgggctataaagaagctgaattttggtctccaagttgttggagaagcccgaatgctgcaactaaatgagcttgaagagatgaggtttttctcctatgaaaatatcaagttgtacaaggagaaaaccaagagatggcatgacaagaggattcaacacaaagtatttgaagaggggctgcaagttttattcaattcaaggctgaagttgttttcgagaaagttaaagtctcgttggtcgggaccattcaccatcgtcaaggtgtacccttttggagctatgaatgtcaagaatgaacagtccgggaggatatttaaagtgaatgggcagcgactaaaatactatattggaggggaggttgatcgagcaaagacctccatcacattagaagaggcttgaggaagaaggacatcgggttgccatggctttagtgtatcacatttgggcaatccgggagcagaggaacaagactacatctagttatatatatatatatatatgttatgtaacaagtttggagtatgcca

SEQ ID NO: 337107 - DNA, 564 bp, Cannabis indica
agaaacttcccttttcttcctattgaacagtttagatgtactagtcaagaacctgcaaatcatgaaataaaattagctatgtatttttttttttttgtataactaaggaaacaaaatttcaagtactagcatacccaacagccctgacacgtccaggatgctctggtgtcccgagctcctgcgtttggatatcgttttggccatggacctaaatttttccctgagtaagttgctcctgtaattgaaccaaatgtacatattcaagcaattattatatgaattatatatactaactcattagtagtactcaattaaggattaatatatacttactatcttttggcaattttcttgtcgtaatcagtgacaagttttgttctcttggtctgagatttgatccaaacatggtggcgtgggggatcttgaacgtcgaggtcctttttttacattattttataacaattaaatgagtgtaattatattttaaagcacattattagaaatcattaattacttaccacatcttcccttacgtttaccattccactccgaccacttcgatgt

SEQ ID NO: 337108 - DNA, 578 bp, Cannabis indica
ataaatcacttcaaatttcttatattgataactaatcagattgtaaagggttttatttagggcacagaaccaaacagaaaacaccctaaattaaaatacatattttggctctaatctatgtctcatattgtagagctcttcataagcttcaaaacggtatatagaatgtctaaaacggacacccgagtgaaaagttatggctaaaatacgaaaattggcgaccatacggaattctggttggtgcagctctggaccacctggaattccggttcgccacacctaaaacacgaaaatttcagatcttcaaagtcccaaaacttgctccaaacctaacaaattgttcctgaacttcacagaacagttctataacatgtatacaacatatctcaacactcaaaaccaacaattaattaaaaatcacaactttaccattgttgagtgagttttgagttcttaaagtctaactcactcaactcaaactacaactaaaaactcaactacacacctgcccaactgctccagatcaaaccaaaaatatatactcaacataatccaagcatcaattaacatcaactcat

SEQ ID NO: 337109 - DNA, 499 bp, Cannabis indica
gcagtgcaaagcggaaagaatttgttgagttggtacaaggcgagggtatgtcagttactgaatacacaaccaagtttgatcgcttggctaaggtagcctctggaatcgtaccaacggattttagtaagaaggagaagtacttggctggactaaacgccaagattaagcatgacctggttattacaaggaatgatactacaacctatggagaaatgagtgataaggctcttcgagctgaaggagcagtgaaatttttgcatgaaacccgagagctttctaatgctggcgggtcactactactcctgtttctggccctggaaaagaaagtggagattccacttttgagcaaaagaaaagaacttttccatcctcgggaagttcagggcaaggtaaaaggttccgaggacatcagagtaaaggagtgttgggttttatgccctaaataaaactcaatttcaatgtaatctattttattcaacatcaataaagaaacagaagt

SEQ ID NO: 337110 - DNA, 527 bp, Cannabis indica
aatatcattcagttgacctccgcggacggacaattttgtgaagtacgggctctatctcaaggatttcattcctaagccagtgaaggagaggaagaggaaatctagtgctgaacgggatgagagagctcatcatgaggatgaactcattcaacttaagcatgaaggtaaaatgaatggaggtgcaagggccatacagtatgctcatgagcccttgaatcctgaagatgaggttgaggaagagcaggtgactccgctcaaaaggaggaagaaacttccggcccagcctaggcccgttgaacatgccattcgaattagggagcccagttcacttgctcagccatcttctcccgtactaggaaaagggaaggctgccatggcggagataagggacttgtcaggtgatgatggactctcgagtctttctcagacaatcattttgcaggatatttcgtcttgtttttaaactttttgactatcatgctttatgcttctgatgccctttttcctctaaccatgttgtttttgtt

SEQ ID NO: 337111 - DNA, 509 bp, Cannabis indica
aattcatattaggatgttaattaaacatacttgttagtaaatctagatcctggtaaaataatttccaatagattactttgagggtggagtagtgattttagagaagtgtaaaaacctatctaaagtctctaagtctactagagatactgaatgttaaagttgcaggaaagatacttattcagtctaaggaaagttctatacatttttggcatttgttccaacatttattaactgctagtattacttcctgactagcgcaaaagtagtttccaaaaagtaaagaatccagtatccctagaggagtagacatatatagaggaatttcacgctatcaaggattttgtgattaaggaaatgtaatgttggaggaaattttgtatcgaatacaacttgtcgattcctattacagagagaatactatatactacacttgatcttgatatcaaggtgttgagattatttgaaattcactttttttttatatattagtgtaagtgggagtttgttgg

SEQ ID NO: 337112 - DNA, 1160 bp, Cannabis indica
atatattcaaataattaatattacgttaagtactaaaaatttactacgtgtacacttatgtaacgtgagcaattaactgtgacacttaattgagacttttggacaaaaatgtaaagtattaagaggttctttagttgtcatgcgtcaagactgggttgtatttcttgaagggaaatttgctggtggtgtaaattctacagtcgcatctaagaccatgtagaaacgactaaactatgacatttgacatatggccaaattagtaaaaggaagttaactgatcgatatggaaataaggacgtccaaattgcttatgccttcacaacaactgattcaacgtattcagatatggttactaggtttgaggtgttttcattgaagttgttataagcattatgtcttacagttttatcaacaagttaagtagttcagtcaaagtggaattgttgggtgttgaaatactaaacttgatttaatatagttaatttttagaatttttttgttgctaccaaagtttctagactattcttacaattactaaagtgtctagagttttcttgtttgtttgagtactcttgaattttctagaattatctttcacttgtgttagtagagggaattatgtagaacaatgtagaagctagtaatttaataatgtttctagattagtccatagagtcctataaatagagatgtaatcccatcattttgtaccaagtcacaaatcacacaagttgagatataacatatagcttcttccattcaagtattctctccaaagttattcttattttccaacaaagtggtatcagagccaagtttgtgaaaaaaaatagcaagttgaggaatgatccccttctaagttccaatgctcatcaagagcaactatgacaattggagtattaagatgaaggcgctactaggagctcaagatgtatgagatattgttgagaaaggtcatgtagatcaagacgatgttgctctttcccaaactcaacaagatgcgttaagggattcaagaaagatggacaagaaatctctctacctcatctatcaagcggtggatgaagatgcgttcgagaagatctcaaatgcaacaacggccaaagaagcgtgggagaagcttcaagcttgcaacaaggagcagagcaagtgaaaaagat

SEQ ID NO: 337113 - DNA, 550 bp, Cannabis indica
gacgcatattctatatataactagataaaaatgcatgtcctagatcaagaacatacaagtttcgtaaccaacatggaactctattgctacaatgtcatgtcgtttgggctgaagaacgctggggcaacatatcaacgattgatgagcgaatgtttgcaaaccagattgggcaaaacatggaggtttacgttgataatatgttagtaaagtctataaaaagtgagaatcataccacagacctcgccgaatgcttcaaaatattgaagaagtataacatgaagctaaactcgaaaaaaatgttcctttggagtttccccaggaacatttttgggattcatagtcaatgcaaggggtatcgaagcaaacccttaaaaaatcaaggcattaatagacatgccatcaccaacaaagcctaaggaggtacaagccttgataggaaggtttgctgcactcgacagattcatttcgaagcaaactgataagtgtttgccattcttcagtgtattgcgaggcaacagaaatttgattggacagaagagtgtgaagaggc

SEQ ID NO: 337114 - DNA, 596 bp, Cannabis indica
tagtgttagatctcgaggataagtatttgtaaatgcaacttctagttatacatcaaaagatgacaacttagactagtgtttacaatatgaaacaatgaagagattaataaaataagaataactttgactctcgcctaccgcgacatcgttggattcttattttaatcgaaattattcttaaatttttcctctgagctttttcatttagaatttgctttgatagtatatcattggataaatagtttataaatcatctgcttatgatgtcatttttttcttctatgaaattgaatggcgcatatgactatattcctgacattctatcccgaaataatataaatcatcgatctcaaaaaatctcctacttgtatatgtttactttagaaaaattagacttagagttagattagtagtggtggttcaagagagaataatcactcattatatatttgttctatcatcttattcgacataagatgatcccagtgcctctgttgtattgacacaaccgacgaggacaataccatttagattcttagacagaaagccacggtacattatcgtagtgggagggtttcaaggaactcaccctgtta

SEQ ID NO: 337115 - DNA, 1158 bp, Cannabis indica
tccaattcagaattcttagaatcttggatgtaactcttttgcaaaaagtatttaccattgcaggacaacattcataaaaccagactatgaacacccaaggacagcccaacgctctgtaccaaccatcgtaagactaacctcccttttcctcttttttgtttttcattttaataccatgctctattctgtctttgaaagaatcaatagtcaactcaaatgactccctaccccaacaatactcatcccatcgaccgctgtcaatgatatctaaattagacctaaaaacttccttatcaagagtattgctaagaatgaaacattggatgaaatacaacacagtcagtttcaatcctagggattcatcatgtccccacctagtgcccaagaagcatcctctatagacttatgattaatcatttttatgccaaggaaacagacttcacctaactggtttgattcctgggaaaataacagtttattgcaatccccaaaacaatcaagatcagttatcaagtaaaactcttcggcactgaaccatatacaacggccagcaatctttgcccaaaattctttaagattgggctggtaaacctccctcaaaagaaggttgtgaactacgtggggatgaaaaacaaattccgggatatctaagaaatgcccaaactgcgtgtctcagaacatttttaacaaattcccagataaagtattcttaatattaacaataacagagaaattgctagtacatacgcacttggatctataaaaatcactgggactgaatttgttaacccaatcctacattttacaaagaaagtaaatataatgaatgggcatatgaaagttgcaaaactataatacaactacaaaacaactataaacaaactaacaaacaggagaaattttttaaaaaacaataatagaaacatagatataaaaccaaacatagtataaatagcaaaacatatagaaaacagaataaaaacataaaaataaaagaaagtagtagaccaaccgaattaaactccttcaatatcaatatccatgatagttctaatttttacccattaatgatatataaatggacaccaaaccaactagttaaaaactatttcaatacaaacacacatagaaaggtgttaaaactataaaataaaacta

SEQ ID NO: 337116 - DNA, 911 bp, Cannabis indica
gcctttccaggtgaacaagtggcatattgaatcttttcaaaatccgattaatgtaagtcctctgagacaaacgaagaatacctttagttctatcccgaatgatctgtatcccaagtacatacgaagcctcaccaaggtctttcatatcaaaatggtcagataacatttgctttgtctcagacaacaaatctttatcattagaagcaagcaaagtatcatcaacatacagtaccaagaagatgaagttgctcccactgaccttcatatatatacattgatcaactttattctcgatgaacccatttgcagtgacaactgcatcaaacttgagataccactgtcttgatgcttgtttaagtccataaatagacttattgagcttgcaaaccatatgctccttgccaggctcctcaaaaccaacaggttgagtcatgtagatatcttcatacaaatctccatttagaaaggcagtttttacatccatttgttcaagttccaaatcaaaatgagcaaccatagccatgatgattcgcaaagaatctttggtagagacaggtgagaatgtttctttgaaatcaataccttctctctggctatatcctttagcaacaagtctagccttatactttactggctgcccacttgaatcatatttgatcttgtaaacccatttgcacccaatgggtctacaacctttcggtaggacaactaaattccatactttgtttcacgacatggaacttgactcatctgtcattgcattcaaccataacttagattgaggactcctcatggcttcttgataagtaactggttcagaagcgtctcccacatcataatcatgttcttgcaaatagacaaggtagtcatcatgaatagcaggttttgcgagctctctctgatcttctcaa

SEQ ID NO: 337117 - DNA, 1550 bp, Cannabis indica
tactaggagctcaagatgtatgggatattgttgagaaaggtcataaggagcaagacgatgtgttcctctttcccaagctcaacgagatgcgttaagggattcaagaaagagggataagaaagctctctacctcatctatcaagcggtggatgaagatgcattcgagaaggtctcaaatgcaacaacggccaaagaagcgtgggagaagcttcaagcttgcaacaaaggagcggagcaagtgaaaaagatttgtcttcaagctcttagaggtgattttgaaactttatttatggaagatactgaatcaatttctaattatttcactagagtatattaattgtcaatcaattaagaagaaatggagaagaaattagtgaagtaaaggttatagaaattttttttcgtattgtagcccaacctttgagtcattgctacaatcattgaagagaatacagattaagaatccatgactattgagcaactcctgggttctttacaagcatacgaggagaaacaaaaaagataaaacaagcgaaaggagaagatggagcaattactaaagctcacatggaagaagaaaattctaacaacataaagaaaaaaggaagaggacgtgaccaaggaagcgaacgtcgacgtggttgagcacaacgaagagaaggaagggggagctatagtaacaataatttcaacaatggagaacgaagtcaaaattcacaagcaccaggagggcgcggaagagacaactcgttgtcaaggagtgacaaatctcacatcaagtgctagaattgcaacaagtacggtcactatatatgcctccgaatgtagatcaaggagggtcgaagaaagagccaattttgtcgaagacaaacgtggaaaagaaggaactttgttgcttgcctgcaaagacaaagatgaagctcaagaaaataaatggtatcttgacaccgacgctagcaatcacatgtgcaaagaaagaagaatgtttgtggagctcaatcaaatggtaaaagggaatactctttggagatgaatcaaaaatacctgtggaaggcaagggtaagattctcttacgcttgaaaaatggaggccatcaattcatcttaaatgtttactttgtgcccaacatgaaaaataatattttgagtttgggtcaattactagagaaaggttatgatattcatttataagaaaataaccttttcttaagagatgataaaagtaatttgatcgccaaagttcccatgacaaagaatagaatttttctcttgaacaatcaacatgatgttctgaagtgtttaaagcctgctacaatgagtcatcatggctttggacactcaattttggcgggcttaaactcttagagaagatggagatggttagaggctttccattcatcaaccaaccagatcaactttgtgaaggatgtttgcttggaaagcaatctcgaagaatttttccagagtcactgtcaagagccacaaagccgcttgagctcgtacacactgatctctgtggcccaattaaaccaaactcatttggtaagagta

SEQ ID NO: 337118 - DNA, 670 bp, Cannabis indica
tcatctatccttggcaaaggatacttgttcttcactgttaacttattcaactcccggtagtcaatacacattcgtaaagttccatccttctttttcacgaacaaaactagtgcaccccaaggtaaagtacttggtcttgtaaattttaaatcaatcatcccctataattgcacttttagctcttttagctctgtaggtgccatcctatagggagctcttgatacaggctctcctcctagtattagatcattctcaaaatcaatttcacgtttcggtggtaaccctggtaactcctctggaaaaacatccaaaaattctcgagccactgggacatgttctggtcccgctagttgttccctggtagtatccactacatttgctaagaaaccaatgcacccctcacacaacaaatctcttgccttaagtgttgaaattatgggaatccgggatccctgcatcttccccacaaatacaaaggggtcccgccctcaggctgaaaaaagttgccatctttcttttgcaatcaatagtggcgttgtatttagcaagctaatccatcccaaaataacatcaaagtcctccagattcaattatattagatcaactgataactctcttccatccacaaatactggaagggatctcacccacctgctggagataaccaact

SEQ ID NO: 337119 - DNA, 620 bp, Cannabis indica
aggtcagtgccttgactaacatcaagcagctgcccacagagaccttaaaaaactatataaagaggttccgagaggaagcctcgaagacaaagaaagttgatgacggacaacagctttcccttctccaggcaggcatccgtacagggactccattctggaacgaactacaaccatcaggagctgcaagccttcaggacttccaaaaaagagtccaaaagtacatcaaccttgaagaggcccaaatactgacctatggaggatactatcccaccgggatagcagggtatatgcccagagcaccgcccttgggtactgtcccgaccgcggctccaccaatgagcggcatacagttctcggctacttccggatatagtcaggccaggccttggccctcgcatcgtcccattttggaaatccctcagggataaatggacaagctccctcgcactctgctccaaccgccagcctggcaggtccttccaagggctcgaggagtaagcgatcttccaaaggtagcacccggacggaggagaaacgccaaaagaggggatacactccacagtacacccaatacacggagctgacggactcccaagagcgtgtgtactttgctactaggc

SEQ ID NO: 337120 - DNA, 568 bp, Cannabis indica
tcccacagaagattgacaaatgatcaagaagttaaccacacacctccgtcccctagtcgctcgagttattgggcagatcgagctgatcatgggtattgtcctgcccctttacatattgttgaaagtgtccttgtgctatgagaccttctatctcatccttcaaatgacgacactcttctgtggtatgtccaatatcaccatgatattcacactgttttgtgggtccctttcacgtcttgaatgtctcataggttttggctcactaaaatgacttcctattcatgtgcgaggtagatatttttctgattttcattgagctcggtagattcggcataaaggggtaaatatttgttgtgtttcttttgtttcttatccttgggtagccttttggaatcgtctttcctctttgatcctgaggctttcgattcgacttcttcaacagaatcatacgccaattgccttttggattccttgacttgatgccttctgaacttattctccaactcgtccattcgcaaatggagtaaatccctttgttttggactaagtcgttgacgaagattaggtt

SEQ ID NO: 337121 - DNA, 1173 bp, Cannabis indica
gatcctgccaacctctaagaagccttgtcttccctagatgctgacctgtggcaagaggtcgttgatgatgaaatggactccttattacgaacaaaacctggcattatacaaacctacctccttgttgcaaaactatagggtgtaagtggattctgaaaaagaaattgaaacttgatggatgtgtagacaaatacgaagctcgtttgtagcaaagggtttgagacaaagagagaatgtagatttctttgacaccttttcacctgtcagtagaataatatccattagagttttaatttcactagctgctacacataatttagttgtgcaccaaatggatgttaacacatcattccttaatggtgaattagaagaagaaatatacatggatcaacctgaagggttcgtgatcccaggccaggaacataaggtttgcaagtttgataaatctctgtaagggcttaagcatgcacctaatcaatggcatgaaaaatttgacaatttagttctctcacatggctttaaagtgaatgaaagtgacaaatgcatttactataaatctgagaatgacatttgcactattatatgtctatatgtgaatgatctgcttatatttggttcaaatatccatgttgtgaatgctttgaaatcattattatgtgctaactttgatatgaagaatctcggagaaactgatgtaatccttggtattaagataactatgtctagaaagagaatttccttggatcaatcttattacattgagaagattctcaagaaatataattactctgattgtaaacctgcttgcacaccatatgctcggccaagtgtaaagctatttaagaacactggtgacagtgtgaaataatatgaatatgcaagcatcattggcagtcttcgatatgccattgattgtatgagacctgatattgtctatgttgtgggattattgtgcaggtttaccagtaggcctagtacagagcattgtcatgctattgagagggcaatgagataccttaagagaaccatgaaccttggattacattatcaaaggtttccaactgtccttgaaggatacaatgatgtagactggaacagtttgttagatgactccaaagcaagtggctatatttttagcatagctggtgacgctgtttcttggaagtcaaagaa

SEQ ID NO: 337122 - DNA, 744 bp, Cannabis indica
tcggtacgactagagtatgactagtgtaccgagtataggctgatacagtatcacatcagtacgactagagtatgactagcgtaccgagtatgggttgatattatggtcaaaagtaacgtcgtacgaacgttctagactcagcaccgtgtggtacacggggattagggttatggtcacgagtatgggcgtctgatcataatccgagatatatgtatgttatatgatttatgcttttcttactgagtctgtcgactcacaatgctatgtttatgtgtaggtaagggcaaggctaaagttgagaaaccgtgaggatgagtagatgaagattgtagatgtcgaggcggttaggcctggagcgtacgatcctcgggacattagggcttttgttgttagtcgctgggcgacaaatattttgtaaatgaatagcaaacttttgtaaagtattttgtaaacaggaccccaaaatattttgtatgtaatactacaagtttttaattaaataagtagattttaattaatcacgattttcattaacctcgttgattagcaacgagttgcacagtatgtttaaaatcacgttaacacaaatagctagttagggtgttacactgacagaggcatcaagttaatgctagcccccaaatcacacagtgcatttatcccttctatttccccaatagtagaagaaatggtgaaacttccaggatctctgagtttaggaggaagttgttggaaatattttac

SEQ ID NO: 337123 - DNA, 542 bp, Cannabis indica
ccacgttccagtagttctttattcgcgagccattgagtcgagccaatttgtaaactccaattccaactactggtttgattaatattgaccctcccaatcgggttgaacactcctgcagatgcatccctcgtgtttgcaaatacccgccttagcaccgagtctccaacattgaatagtcttttcttgactttttgttgaaatatcttgtaactcggtgttgatgcgctgcattagtgacttacaactcaatttgtttttcatcaagtagatccaaggataactttagaagttcctggttttcttcttgattataaaactctctcctgtgattcaatatgttcacttcaacaagtagcattgcttctgagccaaattctagcgagaagggagtgtgtcccgttgtcatcttctcggtagtcctatgagcccagagtacttgaggtagctcgtcgacccacctgcctttagcggcatccaacttcttcttgatagtatcctttaaggttttattgacagcttccacttgtccattcgcctgaggc

SEQ ID NO: 337124 - DNA, 533 bp, Cannabis indica
ttaaatttaagtatttatttaaatcgagaaaattaaatatttataccgtaaattactgattttgacaatgataaaaatataataataaaataataaaataacattattacttatcaaggccaaagtccaaatatcaagtccacttgtatgagctcctgtgctaatgtcctaggcgtgaactatcagctgaacactcaattaatgcgacaatataataaagtttcaaataatcctctacaattttttaataaaagttatgagcacctttttttttctaagtttagattagttaaaataactaccatatagtataggtgtaatatactaagccctacaaataccctatatatataggaggtatttactgtacctcctttagttttgaccctatagtatagggtagtaaaataaaccaatcacaaattaaatagatgaaagtcttctttatttatagtggactgttgtacattataatttaatttatttattattttatataactaaaattactttatttaggtggcgtttggtaa

SEQ ID NO: 337125 - DNA, 763 bp, Cannabis indica
tttgttattataaaaattatattgttttaatttagtttaggtaaaattaaaaattattattagtcaaaatgattgtataaatttaggtaaataaatgttttggtataagtttgttatagggataacttgaaaacaacacaaaaataataaaaaaattacaaaattacagttgtacagaattttaaacatttttattgttttaagatattatttacataaaatgaagtctttttgatgcatttttatgttgtatttttgttattttgttattgattttttgttatttgtatattattttttatgtttttttttttcatgttttcttgttacttttatgcggttttcatgtgtttttattgaataccgtaaaaatatataaaaaaaaaaacctttaccaaactccacctatatttattattattgtattcagtgatgcaactcgtttatttatttatttatttttgaactaacttagatttttttttatttgtgtttaccttacataaaaattataattattttagagtacgtttggtaatacttttctaatcagtttctttttaataaaatattctataaaacagttttcacttttcaattttttaattgataatcaaaattttaaaaactttaagaacaaaacaaaatcactttcaaattttttaaactatttttttactttaatcatatttgactcgacccacctgaacctgtgactcaactcagctccgtctctagtaccggactcggaccacgaccacaa

SEQ ID NO: 337126 - DNA, 702 bp, Cannabis indica
gctttcgcctttcctttacctacacatggaagcaaaactgtgaatcgacagactcaggaagaaaagcatataacatatcaaataatttctgacttgtatttaggcgcccatacacctatttacaaggctcaatagatgagtaagaacgttccatactagggtatagccactataccacatacactacgtacctcactgtacgagtgttggtagggtttgtttcataccctgagtaccactgagtgatataccacacacactcagtacttttccgtacttgtgctggtatcactgtaatgtactctcaaataacattcactataccaatgcactctataccttaactgtacaagtgttggtagtgcaactaacactttaagcatgcatatacacataacatatacatacactcagatattgatatcacacattatatacagttcttaccttctttctagattcaagtgtgctggccgacctgaacggaaagtctcgtgctagatggatgccctaatcacattatgaaatcgggtaagttacatgatcaaaaccctaatcccaggaaacccgaacccacaaccctaggttctgttataccccctagaggttacacaaaccctcgaaatagggaaacacccaaccactgcactgaaatggacgaaaatcgagaaaacaaagcatttggggacactaccaaaaccg

SEQ ID NO: 337127 - DNA, 530 bp, Cannabis indica
acaaatggaaggaaagtaaacttataataagttaaactttataaaattttcatgtatcgggatcccaaaaatgttttacaaaatattattacaagttcattttcacaagcggacctaggcagcaaaacagagtcacaaaaatacatcgctcgtagacccccaacctgcttggtctagtgtggcccgaacatgtacatgcgccgtccagctcccatactcatggctgatcaaaaatagctttaccctttcctgcacagtagagcacccgtgagccaagcccagcaagacaatataaaatattgataaacacatttatcactctatataaaaattaatgtcattctcatatgcctgtgtgacacagacttgcatgttacgctcacatgcctatttatgtctatgtaacatagacctacgtgttgcgctcacacgtctaaatacaataaggccttagaacggttcctctcggttctagttaccgagtccaacctggttatgccttgaacacataatcctaaatctcaatatat

SEQ ID NO: 337128 - DNA, 1248 bp, Cannabis indica
aaacattatggactgtgaaaacgtatgaaccgacgacaaagaaaaatcgcagagtttctaaacttagggtttcctacatatcttctacagcaaagttgaagatgcattcaaaaagtaaacaaaaaggaagtcgagaacttactcaagaatgagatgtctggattcaggtaacgtcaaaccacacgagcagtttcgatagacctagtgcagagcattggaatgctatagagagggtcatgagatacctcaaaagaacattgactctgggattacattatcaaaagtttccaactgtacttgaggggtacagtgatgctgactggaacactttatcaaatgactccaaggcaaccagtggccgtatttttagcatagctggtggagctgttttatggaagtctaagaaatagactattttggctcaatctacaatggagtctgaaatgattgcactagctattgatagtgaagaagcaggttggctgagaagcctgcgagctgagattcctttataggaaaaatctattccacttgtgttgatccattgcgatagtaccgcggctattgaaaaagttcaaaagtgttattacaacggtaagagacgacaaatatgtcgtaagcagagcactattagagagtttctctcaataggagctgttaaagtgtatcatgtacgcactgatgataacatggctgatcctttgacgaaaggttaagctagagggaaagtccttaaaacatcgaaaggaatgggactgtttcccttagattgatgaatcactcatagtggcaacccaacctatagactagagatcccaagaaacaggtttaatgggtaataacaagttatgaagtgaaaaaagtgagatcatgctataattatacgaaaagagaagcatgaaatcctgaagcgatttaaggctgagttaatagaagctcataatgagatttataatccaagtagagtggagtaccgagctacgggagtactcttgatagactcacctatgtgaatgtgggagtggggccgcttccgataaaatttcggacaaaatttctagagcgttcactatattgggatagacgtgcatggtcattaacgcacgggcttttgattacacccttgaaaaggttgcgtggtacaatgttagagatatagttcaagactacaggtcactataataaaatctaaatcgtattcactacgcagaggttcaaatcaaaagatacctttgtttatgctcaatc

SEQ ID NO: 337129 - DNA, 871 bp, Cannabis indica
ttggaagtcctgggaagaagacggcgacacttgggttgccgtttgaagggctgcttaaggctccggcagagcttttggggagaggaaagcatgggagcttgtacaaagtgagagtggaaaatggggttttgttggcggtgaagaggatcaaggattgggatatttctttggaggagtttgatcggagaatgaggaggttggaccaggtgaagcaccggaatgtgttgccgccggttgcgttttatggctccgaacaagagaagctcttggtttatgactttcagcctaatggcagtcttttccaacgtctacatggtaaccgctttatttaatatctttattttttattttttatttttgacaataagcatgaatattcattaatcaaattacatcagttaaacctctcggtcattacaaaatcccgagtaaaaaaaaaatcagaatagagtcaaagagttagtgggtgaaggtccactttgccacattatgggcaataaatttacaatacctactaatattagaaaagatacagaaataaaagaaggagatggcttgatacaaaatgagacatagttctcaaaagcccaaagggacaacttcccacactgattacttgtctcgagtcactctctttaatgacatacttataccctaaatctaatgacatacttatttgttatttttagccattatttttttcttaaataaaaaactcaaatcattatacatttatactaatatcagttggagagataatatcagtttgggtgttttttttctcttccatacgtgaattgattcaggggtgtactatagaattttcacaaattatatatataaaaactaaaattaattataagcgatatgt

SEQ ID NO: 337130 - DNA, 1017 bp, Cannabis indica
agcctcacgatggtaattcaacacagaaaaaacaaaagctacagaaaaataatatacggacacagggtttttttacgtggttttgcaattaaaattctgcatagtccacgagtcaatcttatttagatttctgagtattttttaaggcctctttcataagagttttgtcgacccccttttgagatggtttgccactatttataatttcattgtggcagttaattacaaagctgaccaaagtatgtttacagccattatccctaaaattgtgagatctgattacatatcacgaaatgtaaatgcggtgtataattttgaaaatcgtacaactatgatttacctgcttttatagggtcaaaaatatcgtgtaataaacacgtctttaattgctgaatctggagatgtctcgacggaaacttgattatagtgatcccaatggcgagctaggactattcttctttccgaggtcgacaatgtatgtcgatcgcgggtataaagaaatattctgacttaccaggattatgagcctcgcttctgttagttggatgaagctattggaagtcttctcatagcgagatggtcatctcgcatacttattctttgagccgatttgacttttacccttagtttgcttattgcaagctaaggtatgtgtcattcttctccggtgcctcgctattcacctttaacgacatatggtttctcgctaatacactaagtgtcagtttgtacattgattcctcgcctaagaccttacagttagcggggttacaaatatactctgatacttacgtaattaatgagttattccataaaaagttatttcaccgattcacatttcctttatcttgactcatgtcctccagccaaatttcggctaagctttcctttctttccaaagcacttaataccttttataggagatattcgaatgaataccttatctccgacctagaaatcaatatctcgtcgctttggatcagcataacttttctgtctactctgagcagcgagcat

SEQ ID NO: 337131 - DNA, 635 bp, Cannabis indica
ccaaaacgtgaaattgattttgagattgatctaataccaggagcagagcttgtatgaagacctccctacacgatggcacctgcagagttgaaagagttaaaagtgcaattataggggatgagggatttaaaatttacaagaccaactacttcacctcggggtgcaccagttttgttcgtgaaaaagaaggttggaactttacgaatgtgtactaactaccaggagttgaataagttaatagtgaaaaacaagtatcctttgctaaggatagatgacttatttgatcagctttagggaaagaccgtcttctctatgattgatcttcgatctggttatcacaaattgaggactcgagaagaggacattcctaaaatagctttccgaatcccgtaatgtccttcagattaacaaacaccctgacatcatttatggacttgatgaaccgagtgttcaaagacttcctggatgattttgctattctctttattgatgatattctaatttattcagacacagaagagtctcacgaaagacatctttggatggtgttacaacgtctcagggagcataagctgtatgccaagttcaataaatatgaattctggttgcctcaggtgagtttcttggggcatgtg

SEQ ID NO: 337132 - DNA, 516 bp, Cannabis indica
gcagcctcatccgcgcgcggaggaggctgcattgcagccctcgtgtgcatgtagcaagcatgcgtgacccctgcccaaacccagcgtgcacgtgtctacagacaccatttagcccagcacgcgcgcgtatcaccttgtccgaaggactcgtgtgtgtgcgattgaggcatgtgcacccaaatttttaacctttcataactttctcaatttttatcggaatcgaattccataaaaactaaagtttcttaatttttcacaaggaatccaaataaaatattttcagaactgaaataaaattattttcgtggaaaaatttcgtaattcacatttaatcatcaaataacacataaaccaacatgaagacatccaaatcaacacacaaataatattcatcgtttgaaattcatattacatgaaagtaaatcattctcatggctctgaggccagttgttgggaatattttactaggatctagatttactaacaagtatgttgaattaacatcctaaatatgaa

SEQ ID NO: 337133 - DNA, 587 bp, Cannabis indica
aacaattaaatatttaacaaatacgttacatatatataataataataagaagaaaaaattagcagccgtgtgatgctctgctcctcttcccatggtgaagaagaggaaaggtacatcgaagccttgtgctgccaacgtcaatgtcgcgagagcgagccctgagctgccctcaatccaagatgaagctacagaggttttcctagacccgtgtgatgaactggaaccggagaaggaagtagttgcagaagcggtaaagtcgactcctaaatcgaaaacttgggcggacgatgcggaggcgatggactttcaggcatcaacacaatttacttggactaaattcaatctgaatcaggtgaaaaccccttcttcccaacttacttttactgaaccatctaaaattggggatcaggtggttgcaaatttagatttggatgaagctgaattagaagcatcatactggagacgtcgattatatgcatcgttttaggggcaaatcctccttttagagtgtttgaaggatttatcaagagaatttgggggaatttgggagtggaaaggatagtgagaatgcactcagggttcactct

SEQ ID NO: 337134 - DNA, 592 bp, Cannabis indica
gcttgcataaaggctctctaatccaggcattttcaaaacgaaaagaattaaaagaagcagaaggagacacacctttaaaaaccaggaatatgggacaatgatctgaagtagagacttccaagttgtataggatcgactgagggaataaagacaaccatgtgtaagtaactagcgccttgtcgagtctttcttcaacccaattatcaccattccttcccttctcccaagtaaaagggtaacccaccagaggcaattcggttaagttacaatcattcaaagcttctacaaagccatcaataagtcggtctgggtatggcctgcctcctctcttttcatcattagagcttaaattgttcatatctcccatgagacaccaaggaagattgcttgcatctttaatagagcgaaagagattccaggtattgaaccgaagctctcttctaggctctccatatactccagtaagtctccattgaacacagtgttgcagttgaacaatagcgtcaatatgatgaaaggagaacccttgaatagtcacgtcactagaatctttccacaacaaagccaaaccaccactatgcccacgggcctc

SEQ ID NO: 337135 - DNA, 936 bp, Cannabis indica
cgtctcattctcctcagagacttcgaggttcgcgagtcttatgtgcttgtgttcacccaagtagaaggagaaactgaaaaaagttgattccaaaatcatccaaggtatgggtagaagccaaaatggcaatatcctcttaaacccaggcagtttagctatcgctaaagctctctcgtacatggccacagtaggcaagggtctaacaaatagttttgcctgttggaaactagtgtatctagacccaatgtctttcacaaggaaataacaggttttgaagtcacattctttttgtagagatttatgtcctaaaagtaagtaattaagggataatatattagagaatatataaaatacaattacaagataaatgatatattaattatcagagtataattattaaatatctaaaaaatccttattcataatgaaaaggtataatcttgtaaggaggtacaagagaattaagattataagatatgaataaaataagtcggtagtgtattaaagtattgagaatccttaatatagaactgctaagtacggtttactatacactaatgtatgtaattttgatttggatcaaatatgtagatggacatgtagtaaaggtattgtgtataattaaattatgcataactggaccgatatgtaataaacatatctttcattaacttttccgtttatcatatcacaatattaataaatcagcctgaatcctgagtatacatgaactcatgtttgtgttcattgagttctttgattcactcgttaaagtttcttagagaaaatgattgttataacttttatttagggagcgtaataacattagtggttggaaacatgttatacaagagtagaatctaagctttcctcactactacaatgttagcctttagaggcagttttttcaaccccatttataaaaagggaagctaa

SEQ ID NO: 337136 - DNA, 499 bp, Cannabis indica
atatcttatcaggcccagcgactgtgaaaatttagcattatggtcagaaatgtcaccatattgatggaagaattattttgagggtattccagactaggttataatttttagaatgtcggtttaatggattaataaaattaccaaaatgccccaaggtattttttaagttttggaggggtagattagtcttttaataattttttaatttaggtcgtttatacttttagggctgacctttataaaagaaaaaaagaaaagaaactattatatataagttaacagcttatgaaacaaggcaccaaaataaaacactccattctttttttttctttcttcttctccttcgagcaagccaaagccagccaccctagaggaattttcttcagcttcctaccctcatttcagagctggttcttgtcccaagctagcctagaagcaattaaggtaagttctcaaccattttggattaaaaaatttaggttttaagttggttttgaag

SEQ ID NO: 337137 - DNA, 510 bp, Cannabis indica
atgtcacaccttgacccactgtatgtggttgggtgtttggttgctcaagattggtaactactgagacgcttgtatttctaggagtctacagtgtaggatctcccaatagtggataaacctgatcaaccacgcctctgcgagtttgcaccaccattttgtgtgtctaataaaacataaagcaaagagcaaatttggattattactctcaatgaaagcaccaaaatgttgatctcactttttgcgaacaacaatgagtcaattaataagcgataagaaatataattgagataaggtaagaacctgtaaacaataaagaacacaagatttttaagaggttcggcccctttagttcggtaatagcccactctccttagattgtgttaactcaatgacaaagaatacagtgtttcctctcttgaagctctcacaatgaaatctctgagtattttctcttagatctctttgaagtaattctttcaacccttttacagtgaggatggatcactattt

SEQ ID NO: 337138 - DNA, 1200 bp, Cannabis indica
tccggagattttattaaactctaggggtattatttagcttatatgtgaaatatgttatttttgtaatttttgctcggcgacaacggaaaatgcgatggatgactagtttgatcacatgggtaagtttagaaccttatttcttagtggaaaatattttagagaaaataaaatatcgggattaagcggggttatggaatttgaccattttacccctagcttttgaaataccctagttttgggtcaaagggcaattttgtcatttggtaaaatagtgagttaggtggctgcccaaccttgtgacaccttgcaacttcttttctcagccaaggttaagtgaattaacccattactcatttagaaagaaagaaggaattaaaggaaaataagagaaaaggccaagattagagaattcatcttctctccctctctttgttcggccaaaccagaaatcaaggggggtttttgctgctgatctttggagtagtttcagcaaggaattctagaggaattaagctaaggtaattttagaatcatgtttgtttattgttgaagctttaaattttggtttagtatgtgatttttgaaattagtggttgttagggtttaaagattgtagtctgatttctaagattgttttgagttgattttaagcccttgatatcagttttgagctatggggtgggaattaagcaagcttgagttttgaaactcaagtttaggtctttaatggcataatttaatttagtggctttttctgggaattattggttagaaaatgttggttattatgcattgtacaggtattctggaaagtttggtaaagtttggcttggttttgaggtcaaggggggaatttttggggttcccagcacagaaccggaattccagttctgggggacctgtagcaaccggtcggccggttggtgtcccagaaccggacttctggttgggaaccggtctgctggttgggggagtttttggaaccctagtttttcctatttttgagatatttagggtattgccatgttatttatcgataggaaaacttttagtttcaagtttaagtccccgaaaagtgatttagcgaatcactcatttatgttataattcatgtgattagggcatccatctagcacgagaatttccgttcaggtgggccaacacacttgaattcgaaaagaaggtaagaactatatataa

SEQ ID NO: 337139 - DNA, 575 bp, Cannabis indica
gccggcccaaagtattatttttgttatttttttccttttttgtatttttctgtttttttccctattttttttatgggtttatggctttcgggaaactaatttccattgtaatcatcccctataaataatggaaccattgcattgaaaagggataagaaattatacttttgagtagtctattatgctgctcaaattcctataaaagctttcaagagggatcaatttgttcttgcttctctactcacaagtgaaatacaaccaaaaggggagtaagttattaccaaataatgggaataaacctatataaaattcggtgcttctagtttatgcttgataatacatatattcttatttaatactaattgatttcatatcgcttttgagattcaacgtcgttggccaaaagtgaagtcaacaatgtttactaaaataaaacttcaatatttgacacctaacccaacctcatctagacttggaactcggtctcggacctcaagccatgggctcaatcctgggcatgtgaaataaaatgtaaaaaaaaatacgttagacaaaaaacaaataaaaaaaatgaa

SEQ ID NO: 337140 - DNA, 622 bp, Cannabis indica
ggcatgtgaaataaaatgtaaaaaaaaatacgttagacaaaaaacaaataaaaaaaatgaaatagaaaataatattttaatattttcgtaaaactatttttaaaagatttagctaaacaccctctagtgctttaaaaggtgaaaataattttaaattatgaagttaaacacctccaaatctcctaaaggacaaaccactctatgtggcacttaagagataaggaaagtatttcaaaaaaaaaaaaagagagagagagataaggaaagtacagtgatcttaaattcaattgtcggtattctatttagaggtgttcataaaatactcaatccaatttaatttgcacgatctaatataatccaatctacaaagtttggatatccgcacttgtacggattgaattggattggaaaatctacatccgcgcttgtgcaaattggatgctggttgacatatcaaagtaaccaattcaatccaatccacacatatttatatatgtattaagaaatatatgtatgggtgcactcttaatgggtattacccatgaatgggtaaaattaaaaaaagattgagtttttatgcttaatttttctatctaattagaaaaatctctcacttttatat

SEQ ID NO: 337141 - DNA, 693 bp, Cannabis indica
cgttaactcgggatcgcaagtcaaagttggggtttcaaactttgaacggatttttcggtcacctccggcatccgtttgacgaatcgtcttcaccactaaactcagctcatcgaggagaacaacctacactaaaccatttttcccggttcactactttgtacggtgacatttttgtagctccacccctttatggaaacttttcggtgacatcgtgtaccgttttgaaaaacggttggcatgggtgtcatctactcgttgaggtggtcgttttgatatatactactcctattttcggcgacattttcggtacactaatttttaccgccaccgattgttaatgtgcaccgcttaggtgaggcttcagaatcccaaattttaaatatagtcatattatatgtcgttggactcggttttgaatgtagaatgcgatgatgataattattttaccatttaatggtataggtgaaagtaatatgtaagtttggactaaacaattggagctcgggacttaagagattaagattgtcttttgtaaaaagtttaacgactcggaagaggtagggactcaacttgattattggacttggttttttatatgcgttgtataacattagacatattccaatttttatgattcacaaaattgtttgaaaaattgaaaacttaatcagcatatttttctagactgttctg

SEQ ID NO: 337142 - DNA, 915 bp, Cannabis indica
accaataaggcaagggttattttccttctcttacatagtatctgcaccacactttccacttcctttttcttccaattaatggctccagcttaccctgaatgagaaacatttatatactaactaaatactataaaacacactaaagattataatgctgagaattacctcgtgggccattttggtcaaatctgaaccatactcctggagagttggaatctcgtgatattgctgctcgtttttgttataaagcttctccattgtatttgcactttcaaaagttgaagtttgttgtgtgtttctaaaagtttcatcatgtagttcttgtatatatactgtgataattacacattccaaaatgtctcttggaatacaatgttacgtatttcgaagagttgaaagaatgacactgacacattacatgataacaacagagttcaaggcatttttgccttatttatgtgacttttggtgtttcgttttctatcttggatttcgaaatagagcaaactagcaaagatatctctgattgagtattgttattgtccaacaccatttatagttgacgttcggtaagcgatattttttaaaaactattttcttaagttatatgaagtccgatacttaattacacaaatatcggtataacaccgaggaaggtactagacaccaatagtgcattttagtaagggtaaattgcagcataaatacttaatgtttcagattttatacactgaaatacctaatgtttatttttggaggcaaaaatacctgatgttacaattctctaacaccgttactaccacttccgttaactcacaaatatagacacgtgaagggttcagatgcattatatttatttttattttattttaaaatttaatatttttaatatcagaaactaaatgatacttgttt

SEQ ID NO: 337143 - DNA, 579 bp, Cannabis indica
tgacgccaaactctcagtgcataaataaccgcgccaacttagtatcatgattagaacaccactattcacactccttccattgtccaagtgcacaggcaataaccctcttaaactgtatcaaaatataatctactccatgtttagaggtgtcgcaataattcataattttcttctcaaggactggtaacgttagcactggtgcaataggtaacttttatttcaattcttttcacttaattccattaaggacatagacccctcaaaaactattccacaacatcctgttaattccaaaaaaaaatttctaaccttcattgtaaatttagaatcagcaaaatttgcatttctcatatttagcacaaaacttatgcttctagagacgtaacatcatcatccaaaggaatcacaatacccttaccgaaaacaattatgaagttatcagtacgaaaactgttttaagaatatcctcctttcgagtcttcaactggtaataaccagatcgaagaccaaacctagagaagttgatcctcccctaaaattattcaacgtaacatctgtccttatcaaaggatacttatt

SEQ ID NO: 337144 - DNA, 861 bp, Cannabis indica
aattaaaaaaaatgaaaaaaactgaaattcgcgtacctatggctcggttgctacgccacatatggcgtcagttattggctaggaaccgacgccatagggataagccataggtatccctatggcgtcggttcctagctaataaccgacgccataggggtacatatggcgtcggttcatataaaccctttagcgtcgccctgatcagcgtcggtagcgaatttcgcgaaaaccgacgctgaaagggcttaaaaaccgcctctaaagggggtttttgtagtagtgactacttttgatcattggaagaaagctcaggataaatcaactcttttatcattgttaatagaaaataatgaagaaggggttgagcagtgggtactagatgtaaatcacatcaaaataaacgttaatgtagctctttttcatcaagaaagttcctatggctatgcgttggttgcaagggatagctcagcaaatctcattgaagctaaaacatgttttcaaggtggtcattacactgctgaagttgtggaggctttgggcatcaattagttggattaagagtcagaattggaataatgtacaaattgaaattgatagcttgctttcggttcaggccattcgaagtaaccaaactttttctcaaattttggcttacttatttaggattgccaacttttatgatcctctttacaatctgtgcatttacgtttggttagacgatcagcaaatcgtgtcgctcatgctattggtaggcactcacgatttctttctggttgtagcatttttgagcataatgcttaggctgatttaaaggcccttttgtattcagaatgctaatatttcaatgaagttgagatttca

SEQ ID NO: 337145 - DNA, 750 bp, Cannabis indica
ttggacctagatccagaaccgtaaccggactaggacccggactccaaatcagacctagaaccgaattgggagccggacccggatccccacccaaacctggactcgggacccgaacccgaacctaaacttaaacctgcatggaactagactatggacacagaacctgggttgggacctagaaccgcaccccaatctcgatcccaaacccaaactccgaaatgggacctgggacctgaactagaaccaaaccgaaacccgtgacagtgatctagatcttgactcgggattcgggtaacaacgcttggaacagaccaatagtcagtgtctagatctgggacttagactaggacaagaacccaaacgaagaaccaaacctagacctgggacccaaaattagaacctgaataagaatcgccaaaccaggatcctagaaaaagatctaggatcgtgacctggacccggacccaaacctagaaccgaacagagacgtagcctcagacccaaactgagactggaactcggtcccggacacggtcgtgtacccagaccggaattgagacccagacctggacctaaatctgggacctgatccctaacacagacttggacctagataaggatccagatacgaacctggactcggaccaagacccagaatgggatcgaaatgctggacctagatcttgaccgagatcctgacccagacccaaacttggacccgcactcgggaccccaacttggacctagacc

SEQ ID NO: 337146 - DNA, 786 bp, Cannabis indica
attgaaaaagcactgtagcgtgccttagcattagagtgttacagtggatgtgtaggatttttagaagtggtggtagactatagcaaacccgaagcatttgggcctgaagtaattagagtggtttaagattttctcgacatatttttcgaggagttgccgggattactgccgtaacgagaaattgactttgtaattgatctggaacctagagctaaaccttttccttaagctccatatagaatggctccagcagaactcaacgagcttatgttacaacttcaagggatgcttgatattgggtttacccgacccagtgtatcgccttggggagctccggttctgtttgtgaaaaagaaagatggttccctcataatgtgtattgactatcgggaactaaacaagttgacgatcaagaataagtatccgttacctagaatttacaatttgtttgatcatcttctgggaaagacggtattttcaaagatcgacctacgatccggttatcatcaactcagaatacgggaagaagatataccaaagaccgcgttttgaaccatatatgggcactacaagtttctggaaatgtcattcggattgactaatgctcctgcgacctttatggatctcatgaatagggtattcaaggatttcctcgataactgcatcatagtgtttctcgatgacatccttgtatactctcaatcaaaagaggagcatgagcatcattttcgaatggtattgcagagacttaaggatcacaagctgtatgtgttgggttttatgccc

SEQ ID NO: 337147 - DNA, 555 bp, Cannabis indica
tttttaaataaaataaaaaattttaatcaattttagtttaaatatattacattcaaaatcataatattacaattaaaacaaactattaaatgcactacaaataccaccttaaaacaatcctatatatatgaaagataaaaatgtcataaacaagacaactgtaattggctaacacgataaaatctactttaactatatacataataagggacacaaaaatccaggtgctctacttggttttgactttctaactatgcctaattgatgctttgtttggacaaattaatgcattgttatgaccaaaaaggctgctataaagctaaacgaatttctccctcttcgattggtaggaaagtcactcgtttctgaaaaaattggcaaacatttgtatcagcactactcaagatatgaagaaatcaatgaagagaaaaaaagaaaacgatatatataaagtctagctgttctgtatctattccaaattacaatacaaaaaaacattaaatgaaaagacatatattatttgcgatatttagcattctactatttaattaaatt

SEQ ID NO: 337148 - DNA, 587 bp, Cannabis indica
tatcaccctcaaacatccatcaagggccaagccttggcaaacttcttaatagaaggaataactccggaagaaaatctacctgttcacagagacgcgaacacttggaagttatacgtggatggtgttgttggaattaattttaccaggatcttagatctactcacaagtatgttgatttaacaacctaaatatgaacttctaaaatgataataaataaaacacatataaagttaagaaaccttacagtgggtgcagtggaataatatgtctccttccactcagatctctaactcttgattcctttctgttgcagagtataatcaagatctgagcccgaatgtccttctgttggatgtgatccttcacactcttccaatctgtgattgaggtactgtttgatgtgtgtgggcacttctctctcactaagggattttgaaattctctgtctcttgcactgtatatttcgtgtatgatgaagcatgcaagaggaagagaggtgggcttctatatatagtgaaaaaggagagctgaactttccaaaataaagagtttccttaattacagagtaattgattaactgccttatt

SEQ ID NO: 337149 - DNA, 573 bp, Cannabis indica
aaacaccatcccagatgtagatttcttgtcatcaagacatgcttggaaatctgaatcggtatagcctacgggatttaaagcaccacccttgtagactaacacgaattgccttatacttttcaagtacttcaagatatgcttgacaacactccaatgctcttgtcctggatttgtctgatacctgctcacgattcctactgcataacagatgtcatgtatagtgcataacattgcatacattagactcccaactgcagaagcataaggaacccttcgcatgtcctctatctcttgaggatcagtgggacactgctccttagataggcatataccatatctagaagtcatagtcgcccctttggtattggtcattgagaatctctctaaaaccttatcaatgtaagtagtttgagagagagcaaggaatttgttctttcggtttctgataatctgaataccgagaacatagggagcttcacccaaatctttcatttcgaattgagtgtctagccattccttgatgtcagtcattttcttgatatattgccaatcatcaaaatgtcatcaacataa

SEQ ID NO: 337150 - DNA, 610 bp, Cannabis indica
actagaaccgaactaggactaggaccaggactaggacctaaaccccaacccgaactaagttcaaaagctagacagagaactaaactcgaaccgagactaggactcgaacccgaacctagaccggacccaaaacaacacaataatcggatgctggacccagaatcagggtagggaactaggaaaaagaactaggaccgggacctagtacctagtacctgaccaatacaccaacttgaacccgtacaatatgaccaaaaattggaaccaaaatgggaagttgacaaggactgcaaatacgacttggactttgaatcataactgaaattggacctatatccaacaccgtaaccagaccaggccccgaactccaaatcagacctaggccggaatcgggagacgaacccgaatcccaacccaaacatggactcgggacctgaactcagacccaaacatggaacaagactagggacacagaactagggtcgggacctagaaccgcaccccagtctcgatcccaaaccgaaactcagaaatgggacctgtgacctgaacgagaaccagaccgagacccgtgactgtgatctagatcttgactcgggattcgggtaac

SEQ ID NO: 337151 - DNA, 1082 bp, Cannabis indica
agagcccaccataacattcaatggtgaagatgctattaatatcagtttttcgcacaacgacccgttggtcgtggaagtccagatagctaacaagatggtggcccgaaccatgatagacaatggagcctcttccaacatcttattcaagacaacgtatgaaaaaatggggctccagctcaaagatttaacccctacctccagcccgtgtatggtttcttcggccaaggagtcccacctttagggcgaattttcctacccctcactgttgggcaatgttcgaagagcataactataatggcacaattcttggtattggacattccatcagcatttgatgtcatgttaggccgaccagctttatatgacttaaaggctgttacatcaatattttattcatgccttaagttcccaacaaagaatggggtggggttgttaggttatttttagtattaaatttaggtgaattttagcatatttttttatttagttttaaatcaggtttggagcattttcatgctttttatcttttaattttgcagatttaaaatagatgaagagttggaaaatatcaatagaaaaagatagaatatcgcgtaaaagatatcccagtggaaaaatatcaaattcaaacccagaaaaaagataaaagcacgtggaatatggagcagaggagacacgggccgtgacccgcctatgtgaaaaatcaaagcaaatatctcagtaaggccacacgggccgtggcgcgggccgcgacatggctttagcatgtcacggcccgcctctatttctgcagtaacaatatctcgttctggaggtttcccaaaatttaaatctgaataggaatttaaacatgtgcattttatctatctttttaggccctcaatgcctatataaaaggaagaagagagttgatttcatcaagcaatttcagagagaaataaacagagaatacagatgcgaagtggagagatcaactgcaatattgcagacattcttcagagggttttcaagattatttcttctctattttcatctcttttcttaaagttaatatgtgtgattgtgctctcataaacaagagt

SEQ ID NO: 337152 - DNA, 516 bp, Cannabis indica
atataatcatgatttgattatagcctgaaatatattttatgaagatttataagcgtcacataaatattgcaatataaagttatttatttggagcaactaatatagtgagaatttgaaataagtcgtatatgtcttaagtgatataaattcaaaatcgtgtgcactatatgacaaagatctttgtatcaaataaagacatgtaagtaaattattagttaaaaaatatgtatgattgtctgtgcaatataaattcgtaaattatatgtcgtgatagactcttaaagagtttttgattatattataaatgactaaagaacaaacttatatttatttttgtatattgacagatattaaatacttgtagtttgttcattagtagagaagtcttggagtacttcatatgcatcaagaattatacacagggatggacctacttgcattcatgtgggggctatagcccccactaataaaaatataaggctttaaaatttttacacttcaaaactagtttttttt

SEQ ID NO: 337153 - DNA, 762 bp, Cannabis indica
attaagaaaaaactttaacaattgttgaaaaatcacatttaaaaacataataaatagaggctaaggaatgaatgataaattcatgcctataatttggtcaattaataactgctaattaaataaaagctataattatcaaaataatgatgaatattttcactaattttaaaaaattaatggtgaatattatgattgattttcaaaaattaagttcacaaattttatgagattttcggcattaattcacttgtttacaccccctttaaaaggatgtatctcttttcgttctagacacactaataaaagagtatcacacactcaaaagctcttttctcttcttctttgtatttcttgtagtctttttggagtgaaggtcttgactgaatttgtcgaagttaaaaatgtggtgttttcgcctattcaataaccgttgtatcattgaaagtggttgctcacaagaaaatcgtgtttcacgtatctcgacttttcatcaggttttttatcttattatttgttcttatatttctatattcaatgatataaatattattttatttagtactttctccgcactactttatatatatatatatatgtactcttaatgagtattattaagaaaaattgagtttttgtgcttaattttgctatctaaatataaagtaccacacattatgaggttgtttggcttcataacttaaaaactgttttcaatttttaaaaacagaaaataactttgaagaactaataggggtcgtttgg

SEQ ID NO: 337154 - DNA, 805 bp, Cannabis indica
atacaatatgaatataataaatcgccagttgaattaaaatatacagaatcttttatatggaattgctaagtacagtttattacacattatacttctagtatgtgtgattttaatttggctcacatatgtagatagaaatatagtaaaaatattgtgtataatttgattattcatggctgggctaatatgtaacaatatatttcattaatatgtcgtttgtcatgaaagagttatattatatcataatgatgatcattagtagattagcatgaatcttaagtatatgtaaactcatcgttaaagtttttctaattcttataatttctattttaagagcttaataataaacatgttatacaatattatataaatttgtaataaatagattatattggtgggtagaaattaagagggacgtgtaaagtgtgatcactatattgaggaagttgcatcaactatgaatttagtggcatgcatgaattaaaatatatttattgtttgtcttcattcacaagacttggcaagtctactgttttgtcctttctttatttgtcacatgttttatgtcttaactttacattacattattggggcaattgtagaaggtaaatttgatctttcatacttcaaaataacatatggtgttattttgacccaaaaaattacacattgtgtaaatatgcctattttgtcatgggaaccccaaaatgccctccctatctaacagcctccccttctctctctttccctctcgtttgatctctctctctactcgcactctctctctttcactttctctctctct

SEQ ID NO: 337155 - DNA, 780 bp, Cannabis indica
gttcgggtccagggttcgggttcaagtctggatttgagttcaggattggggtcggagttcagggactggggtcaggttttgggttcgggtttggattctggggttggggtcccgatcctagttggggtccaagttcgggtttgggtctgcaatttggggttggggcctgggtctaggtttgggtcgggtcgaggttgaggtttgagttcttgttccaaggtttaggttggggtcagagttcaaaatatgattaagaaaaaaaattgctttaaaaaaaggtaaatatcgacatatgtacccaaagatttgagtttgtaagctgcataaattcagtgattttttttagcgacataagtactcaatgtttgtaaaactataatttttctctagttttatgagtattgattttgttttaaatttattataagaagattttaaaagcaactgatactacatatttttatccaaaaccttaaaaatttagaaattttgggcttcatatgtctgctgtatgggtcaataaaaaaatctgtactaatgaaattggaggaaaaatcaaagttttataaacatcaggtacttatgtcaactaaaaaaaaattattgggtttatgccgcttacaaacttaaaatttttggtactcatgccactacttatcctaagaaaatttgaaagtgacttttccttgttttcaaaattttaaaaattttgattcttaattaaaaaattaaaaagagaaaacagttatatagaacataattttggaaaatatttttact

SEQ ID NO: 337156 - DNA, 801 bp, Cannabis indica
tccttttccctttcagctacagcagtagcaagctgacccatttgtgtttcaagctttaacagggattgagaatttgtgtgtaaagcttgttgggtggtttgcataaactgttgtagtgtatcctctaaagatggttttctttgttgttgaggatatggcatattaggttgggcttgactctgattgggcgtgttgtactggtgcccttgattcattggaggctggttctgtctccatgaaaaatttggatgatttctccaatttggattgtaggattgagaaaatgggctatcagatgatttcccataagtttgaagagcgtttacttcttcagaaaatgcctcttggtatataggcagtgatggataggactgggcactatgacttgtactatagcataaggaacaaacttcattcctatgtataggagtattcatggactaacttaatgacatagcttcaactctcctagttagatttgctaacaaagtttttatatctacatcatctttgacattgtagagtccacgtctcttaggcgtgttggaagctttcgatctaggatctttgcaattccactgttgagaatttacaaaaggattctaaagagactcccaagcctcttcccctttaaattacgaaacatttccagtgtgaattgattgtaccatttgtcagtttaagggagataatccatcataaaagtattttaccaaactctgtttttcaaaaccatggtatggacactttagtaataaatctttaaatctttcccaacattcataaaattcttcgtgatct

SEQ ID NO: 337157 - DNA, 448 bp, Cannabis indica
agggcaccggtcgcggagaagaccttccgggacgagatcattgccacgggagagaagaagtaccaggagtatctctaccgaaggcccaggagaaggcgtactctaaggcccaggcagcttccgggaaggcacttcgcgttgggagcccggtggagagaaggagtcaggcgattgccgggaagccccttcacattggggattcaacagatagaagggctgccaggccacagccttcggctaaggagccgaacactggggctcctggtgccagctcttccggcgccagcggtaagtctcctttggtagttcattatgctccttctgttggcgagtataggcccgtagggttcgacgagcgcctttatagatttaggatgccctcgacccggtggggggatcatttgaaggaattttatttttcaaacttaggagatttcctaggtcgatc

SEQ ID NO: 337158 - DNA, 750 bp, Cannabis indica
accggttctacaaccgaaattccagttttgggaattcctgaacaccatccagaattccggttgctgaactggaattccatttcatagcaggaaacacacaaaatttcgtttctcactcaaatcaaacccaaactctttcaaaccttccagacctgctctatatatcccaaataacaaaacccaagcaatagaaccaagctttaaacacagaaacacatttcaccattggaggttcaagattgagttcaaaaactcaaaacttgactaacccaccaaacagccactaaatcatgcatatctcaacctatttcaacataatttaacaccagaaaataaatttacatagcaacaacaatcacagcaacaagtttcttcatttttctttgaaaactatagttttgagttaaaattccatatttgaaataaaaccaactaatcatcaacatgatcttgcttgaatcaacatattaaagcataaataagctacacaaatcactaacaagctcacacaacagccacagccaccatttcttaaacatgcaatcaatttcttacttgattttcaagaaactaaagaggggaagggtaagagctatacctagaccttgaattgcactcaaaatctgcttgaaaaaccaaagaatcaccaagtttcttgctgctcaaagagggccgaaatagagaggcagttgagagaaaaagagttttgctttttcttgattttttttccaatttgtaaaagtgataaaa

SEQ ID NO: 337159 - DNA, 1890 bp, Cannabis indica
aaaaagcctaaacacatataaataataacacaggaactcacctttgaaagatccaaaacctttacacactggacgaagaagagaggaggaggccccggggttgggtcaccgcccgattaagcagaagacgaagaagagaggggaggtcgtcggttgggtcactgcctaattaagaagaggagaaagaggatggtcagttttgaagaggacaaaatgggtgaaagagaatggtcagtttcgaagaggatgaactgggttgaagagaatggccaatttggccagagcaatttcgaaggaggagacaaaggttagggatgtgagcagtatgttatataatttttgggttttagggattttattaaatttgcgtcggtttctatctctcacaattatatttcacgtcatttttaaaactttgcaagcacaatagtcgactattaccaactgacgcaaaatgaaaaacaagtttttcaatttttactttatttcgtcggtttcttttttatcatcatttaatcaaacgacgcaaatattatgttattagtgacgtttttaagcatacgggtctaattatttggacactattcacttcgatcaacactatgaatagtagcattgaccgatgtgaatagtgtaatttgtagtagtgcctggtcctagacccagacccgaacacaaacacgaacatagacacgaactgagacccaagatctgaatcagaacgagaccgggatcgaagattgggatccagatcttgacccacgacccacagcttggacctaattcgtagtcggtgtttggattttcgaatcgtaccaagaccccaacctggaaccatttatagaccaggatccaaaaccaaactcggacccgggacccgaaatcagaacaagaaccgaaatcaggaccttggaacaggaattggacctaaacccaaaacaagatctagacgcagaaccaaacatggagccaaacctagactagggatcgatacccggacccaaacccgaaaccggacacagacttgcgccaggacctgcgacccgaaacatggaacccaggacttgtgacccaggacctggaccaaaacctagacctataccgaaacccagacccagacccaaaccaagactcggacctagacccagacccggaccgaaaccccaacccagaccatgacccggactcaaactcagacctagagccggactcgtaccagaaataagacttgaacccaggactcagactcaaacctgggaatcggacccagagcgagatcaagactgggacccagaccgagactgggaccgagccctaaacctggattgggacgagaaccagaattgggactgggacccgggacctgggacccaagactcagacgtgggacttgagaaccgaaccgtgacctagatgggggacttggggcccaaaccggaacctacacctagacctaaaccaaggatctcgacctagatgggggccttggacccaaaactaggccccaaaactgggaccgagacccgaaacttgaccccagactcatgacacagaacctgcccttggacccagaacctaggacctaactatcgggacccaaccccaaacccgaacccaaacccaaacccaaacttaggactcggcccaggacccgggaccaaaactggaacaagatagggatccaagatcgagatcctaatctggacctgaggcttcgaccatacctgtagtcagtgtttgaatccaagacccgaacccagacccgtaccaaaaccgtgatccagacctaattctggacacagaatctaaccaacactgggacaggaactctgacctgggactgtaacaggacccaaactcaaaccaaaatccatactaggacttggacct

SEQ ID NO: 337160 - DNA, 616 bp, Cannabis indica
tgtagattgtttagtcttgagtagggaagcacttcctgcaacaaattagaccctaacacgatgacaataccacaacatcctcagggagaaaatcaaagattgtctttttgaattgaaagccttctatatcaacaagtatgtatgtgatagttttgatatctttgttgagctatgggaacttgtcttggaagatgaatctggagagttcaatataaagtaattttcctcttggttttaattgtactacatagcaagttatattgcaatgtaattaatattattgagaatggtgcatagcagtttttgtggtagggcaatagttgattgtatggtgcatagttgtttttgttgttaaagttgttcaattatggtcttttacttgtttagtatagtgacacatgttgtacatttaattaatgataaaatcgaattttatgtttgaggaaatgagaaagataaggtgcttaaataatgatgtattcttcgaagtgttatacctattacctacaaagacattgtttcaattgaaatgtgtatctaaatcttggaacaactttatacctgatcgttcttttatccaatctcaattcaaaaggacaaaactctctatctcaga

SEQ ID NO: 337161 - DNA, 679 bp, Cannabis indica
aaaaaaaaaaaatattccacctatctatctccaaaacaagtaaataaatcacaataagtcaataaaagacaaaacaaaaaatgtgaataaactactaatcatttatttatcaaacgccacatttagattcggtatataattggatttaattcaatccaattttttttaatttgatacaatataattagttttaaaaattcaattacacgtgttataataaaaaaatttgcttagaaatacgagtatagtttcgtaaataattgacacataaacttaattcttgataaaaaaaagtgacgtgtcaataaatagcttcagcagaactaatctcgcttgatgtgatcttgttagaaaatacgatcgagataggatctaatcgcatactatgccccgaatagttaaaagaataagggggactgagacatgatcgtgcatatactgattatgacatgttctcagccactcatgttattaagctctcaaaacagaagttttaagaatcatcttctctgaaaaactttaacgagtgaatcaaataactcaatgagcacaaacacgagttcatgtatactcaggctgatctattaatgattatcgttgtgatataaataagttttttatggtaaacgacatgttaatgaaagatgtttattacatatcgatctagtcatgcataatc

SEQ ID NO: 337162 - DNA, 451 bp, Cannabis indica
gcatgcactcaatcacgaaggctcgaattcgatagtgaagtaagctataggatttcaaaattagaagaagaagtctcataaacctagttgtcaaagagaaagaaaactaggtttaaagcttttgaagcattagttggataatgagaccatatctttccttttatactaatttcacatagggttagggttgatttatttggaataaaaaaatgataaaaatagagcaaaaatacccttaagtggccggccatgaagtgggccctacactagttagatttttgccatttttcttaactatttatctatttttcataaatactactttttacacttgcaaccctataaatgacaaaactatttatttaataattaaaataattatcaaataaaattgtcatttataatattttaattagactccataaagtctcttaattaacaaataaaccct

SEQ ID NO: 337163 - DNA, 706 bp, Cannabis indica
agggtgtgagacattatagaaggatcgataccgacgatatcctcatgcgaccaggcaaaaatgcctatgtttgttcttagaaattttattaatgctaattttatttcgagcaacaaacctttgcctatttttggtttcttggtcaggatatttaggccgatttctacctcttccaattcttctattggccccacatttgtgtttggttccccaagttggggatccatgtcttcgtccccgccttgggtgactccatattgggcaatactttttcccttgcgtgaactctagctggagctattttcctttttaaccttagtaagggcaaggttatagcattcccatgctattctttgattccctctaaggtaccctaccccattctttgttgggaacttgacgcacaaatgaaaaactgatgtgatagcttttaagtcatatagggttggtcggcctaacatgacattgaaagctgatgggacatcaattatcaagaatcatgccatcacagttatgctcctcggagcttgtccaacagtgaggggtagatagatttaccctaaaggtgcaacacttttgctagagaaaccatatacgagctgggtgcaagggattagatctttaagttggagccccttcttcccatatgttgtctttgttgggttttatgccctaaataaaactctttacaatctgattagttatc

SEQ ID NO: 337164 - DNA, 673 bp, Cannabis indica
atcgctgatacgctgccccagcgttctttaggccaaacgacatgactttataaaaatagagtcccatgtttgttacgaagcttgtatgttcttgatctgagacataaatttctatcttgttatatccagaatatgcatccataaatgacataagctcgtgcccagcagttgcatccactaactggtcgatccttggaagtggaaaacaatcttttggacatgccttattcaaatcagagaaatcaatacaagttctccaagttccactaagctttgggatgagaacaggattggctatccaccagggatagaacacctcgcgtataaagtcgttgactaacaacttgtccacttcctgttttaatgctccttgcctctcggaatccaagggtctccttttctgtctttttgttgggtagcttggatcaaaatttaaataatggcaggtaatattagggtcgatcgctatcaaatctccatggctccacgcgaactgatcctggtatgcctttaaaaaaattatttagctgctatttgagctccttgtccaagctcttcccaatgtttacacactttgtgggatttcctgggtcgagaataacctcttccaatttctcaattagtttccataggtttctctcatctttaactcaggggtcaagatcttcttctt

SEQ ID NO: 337165 - DNA, 616 bp, Cannabis indica
tttcaattcaaacagacaatcttagattttctccctacagatgttgtggtattgtcatcgtttcagggtctcatttgttgctggaggttcttccttactcaagacctaacaatctacatttgcaatccattaaacaaggaaatgaccaaatggagttgggattcacttggaatcgactgcattatatctttagcttttgatacatctcagaatcacatgcacatttctacagaattcaagtgagtgacagttgaggcatttgagattggagaagaagaagaagaaaagtgtttgtaaataagacaaacaatttttaacgtggttgaggaattaactagccttagtccacgagtcgatgttattcaataaacttttacttgtaaatgccttaggaaaatacacggaatgtctgttctcaagtttgcctgagcaaagtattccagagaattcaatcttaatccatgagattaatggggtatttatcgggttgttcacaaagtatctgatcaaatctaatttgcttgatcaaatccaatctaatccgcaaaatatagatatccttatttgcggggattagattggattgaaaattataaaatccgcacttgtgcgaatt

SEQ ID NO: 337166 - DNA, 1047 bp, Cannabis indica
agatcctattacgaggagtttactactgctacacttgatttgtatatcaaggtgttgagattatttgaaatgcacattgttatcgagcaaaattcgcaacaccaaatgtacgtaataatattaataacaagaacaaattgcttgaagaatagttgcgagtattccacctataatagcgaatactcgagttgggaatgtgaatgcttaatagaaaactggaaacaatagtaagatagaggattatagtggttcagtcagatcacggtctgcttagtccactgtagcaagagtttggtaggtctcatttcacggtggatcactcctttatatacaaagcaagtgtccaattagttataaaaagattgcattcattgtcaatccgtttacacattgaattacaataactaaactaaataacgtaaacatcaataaatgaatagcagtttctattcactaaatacaacaatgtatgtgtcttctaacatgcgagttgactgttcatattctaatgttaagctcgcgggcgtaacacttaattaagtttaggatgtctgcattcttatatactcgcctctttggacatcgtatgacgagctgatagaacctagacacgtgaatctatatcggtttatcaaggctattgggtcatcgggaccaactcgcattatagagagtcgatctctatgcttatgcaggaatatagagatgatactcggacatatcctgatacatgcgagttagatccattctctcatcccgaatagtacgagttatagttatgcaattcagactttggtcatactcacagtatctcgctgactctatcttgggcgaggtctaaacttcgagaagtctctcatggacgtctcagctttcattagaaatctgagtacacgtgtcctttaaataggagtctggtctcgagtttctaggtgagagaaatctcactataacacatgcccctagtttcgcgatgtgacaggtgcggtcacaagggaaactatacgcgagagacaagtgaaaggttgtcacgaggaggtgaccttt

SEQ ID NO: 337167 - DNA, 572 bp, Cannabis indica
tataacatatatagatatgatatatattaacatttagtgtgtcttatatgtgaaatgtgtaataaattaggaagaacaattttagacttaaataaagcttgagaaactgtaaaagaaaattaaagttttatttttacttttatttagtgaattatttgagtatgagaattttgtgtaaagtatacttcattggaccacatctaatggatttggaccaaactgatccaatctaattatttataggatattgaattttatcatccgatccaatctaatcgaattgattcatccaatccgacccgaaccaatagatgtattggattggatcggttccaaccattggatgcattgaatagttttctatttgatttgattggatccatccaatctattttgtctaccatttaagatgatttcattaaataaaaaaatatatatatataaaaaatataatttaaaatttaataatctaacatacataataaatattattttagtccaacttaattctcatgatctcataataaaaaaattaaaaaataaaatttattcaaaacgcattgataatttta

SEQ ID NO: 337168 - DNA, 604 bp, Cannabis indica
ttcttaaacaaaaatcactaaaacttaaaataaaactaatatttacgtggctcgccacataactctcatctagtataatcaaaagtattaaaattaacattatttagtgagaaaagaaatttaagaaaaaatattaagagtaatttcggtaagtcctctgtcttcttcagtactaatgtgcctaatgctactcgagaacgattgtgtgggatccttcgaatgagacttgctgatgaacatagtacttatcttggcctcccttgtgcaatgggacgaaataaggatgccatcttggggtttttgaaagataaaatgcagaagcgcattcaaagctgggagggtcgtttcttgtctatcgctgggcgtgaggttctaataaaactgtagcgcaagctttgccaagttttgctatgtctgtgtttttattgcctctgaaaacttgttcacatctggaaagcattatggctaagtattggtggagttcgagttgtaggaagggtgtgagctggtttagttggaggaaactatgcaaagataagaaatctggtgggatgggttttcggagtttgcatgagtataatctctcgttgttgggtaagcaagg

SEQ ID NO: 337169 - DNA, 1076 bp, Cannabis indica
tcaataaatgtcatctaattattagaggcaccacctcctcgccaagaggtccttaggatcaaagaggtgccacacacggatggaccagatctggatccaaggatcctcgatcatgccgcagcggcccaagccgcggaagacactattgaggtacctatagaccccatagataatagtaaagttttgaaaattggttctaaattgacttttcagcagcgagaacaactaacgacttttctcaaacaaaatcttgatgtttttgcttggaaacattcagatatggtcggaatatctccgcaggtcatgtgtcatcgcttgaacattgaccccgaagtgcgaggtgtccgacagaagcgccgcaaaatggaccccgcgaggtaccaagcgctaaaagaagaagtcgaccgcctcctagcctgcggctttatacgggagtcgttctaccccaattggttagcaaatcccgtacttgtgcccaagcctaacggctcatggcgcacatgcgttgactttacagatttaaataaagcctgtcccaaagacagcttcccacttcctagcattgaccaacttgttgatgccactgcaggtcacgaacttcttagctttatggacgcatactcgggatataatcaaatcccgatgtatgaaccagaccaggagcatacctcgttcattactgatcgaggcctatattgttataaagtaatgccttttggtttgataaacgcaggtgcgacatatcaaagacttgtaaatatgatgttcgcagatcttattgggaacaccatggaagtatatgttgacgatatgctagtaaaatctcaacatgcaaaagaccatgtcacccatttacaggcaatgtttgatatactgcgacgatataaaatgcgactaaaccccctaaagtgcgtctttggagttggttccgggaaattccttggattcatggtaaattaacgaggaatagaggcaaaccccgcgaagatcagggcgttggtggagatgccatcaccaactaagccaaaagaagtccaaagcctcacaggtaaagtcgccgctctaaatcgctttat

SEQ ID NO: 337170 - DNA, 802 bp, Cannabis indica
ctacatgacataaaaatgcatctctgaattcaataaataacagtataataaattatttaaatagctataaataattttcataattaatcataattaaccgctaattttcaaattaaactaagcgggctttacactaatagtaacttatagcgaccaattaataccggcggataattactggcggaatctgccagtattaattaatgccggcggtctcctctattattaccgccgggtggctccgccagtaataccaaaatttgttgtagtgaaatcgtaagacactaccaataaaaagtaatggacaagtgtaattaagtatcgattctcatataacttaaaaaaaataatttttagggaataacaataacaaatcgtaagacactaccaataaaaaataataatgctcatgtttaatgcttagataggtttattcgtgggaactaaacaaatccttgtagtgaacctaaacaatacacgtgggaaaaattggaaaaccaaagtgctaatgctataatctaggggtgttcacaaagtatctgatccaatccaatctgcacgatccaatccaatccaatccgcaaaatgtggatatccgcacttgtgcggattggattggattgaaaaatctaaaatccgcacttgtgcggattggatgttgtttgacctcaaaaagtaaccgatccaatccaatccgcacttaattatatatatttttaacaaattataatatatattaattaaaaaaagatataaacttctaatttcttaattgttttagtaatatattgagttggtgcat

SEQ ID NO: 337171 - DNA, 1323 bp, Cannabis indica
gagtgcaaaaatctgaaagatgagatcgaaaacttgatttgattgggtcacttgtatgagtggattaagaactggctaccccatctcaacccggttctggcagggggtccgttgccccaagggacaccagagggtgcgcccggagcgttggcaccaactgcaccctcaggaggaccaatccctcaggagacccctggcttgccaccaagaccatgatctctggtgggccccatatcgggaccagaaaagaattaaagcgctatgctggggccattaaacatgaccaggtatgagaagtcactcagcttccagctcaaaggccccggctcatggatcagccaattactttcacggaagaagacgcaaggttggtgcggttccctcaccatgatcccttggtcatgaagactcacattgccaataagatcgtggctagattattgatcgataatgggagttctgtgaatttgctatttaaagaagccttcacaacaataggcctcacggaccgggatctatcaccaagcagttcccagctcacgggattcaacggaaccatgcttatcccgatgggaaaagtgaggttgccagtcaccttgtgctcggacacaccccaaagtactttcaagtactgcacatttgtggtggtagactgcccaactgcatacaacgcaatcctcggccgaccgaccctagtggattttggcgcaattacgtctatctggcacttatgcctaaaattccccacccaggaggctagagtggggaccgtgaggggcaatcaaggtgaggccaggcaatgttataatgtcgcggcccacttaccagtgttgatggttcgtgaaggtatcgagccagaattggcagaggaagatgagttggatccccgtgtgggatccgaaaaaattgtagagcctatggatgactcgaggaagtgccagtgtgcgacctcgaccccaccaagatcctccggctgggaacgagcctagaaccggaggaaaaagataaaatagttaaagcactaagggcagccacagatgtttttgcgtggtgccaaggagatatgaccgacataagtccacatgtaattacccatgtcttgaacgttaatccaaacatgccgccagttcaacagaagcagcacccccttgatccagtaaaggcagaagctctggaaaaagaagtggacaagttactagctaatggcttgatccgagatgtgtattatccagagtggctagccaatccggtactagtacccaagttgaacgggacgtggcgggagtgcatagactttactgatctaaacaaagcctacccaaa

SEQ ID NO: 337172 - DNA, 745 bp, Cannabis indica
ccgatcttcttctccgatcgtgttctttctctgaacattgattccgcacaatggctacagatgaaaatcaaaccagtattccttctggtgttacagatcttggaaatccctcaaatcaaggtctgcaaatcacttccagcaagaatccattggaggatccagcaagccctttctttcttcaccatggtgacaacccagggaacgctttggtgtctcaaccacttactggacaggacaactacgtctcatggagcagggcaatgcagctcgcaatttcagtcaaaaacaaaatcggatttctcgacggttcaattcctaaaccttctatttctgatcaaagtctttataatgcttggtatcgtaataataacattgtgatatcttggatcttgaattcggtttccaaagaaatctcatcaagtattctttatgatgaatgtgcatcgggtatttggaatgatctaaagactcgttttcatcagaaaaatggtcctcatatatacaatttgagaaaagatctcatgaatcttaaacaagaaaatcagaccataagcatttactttactaggcttaaaacaatatgggaagaactaacaaattacaggccttcatgcacttgcaatggatgcacttgtggaggagtcaagagacttcaagatcattatcacatggagtacatcatgtcgttcttgatgggactctcggattcattctctcaagttaggggcagcatacttctcatgga

SEQ ID NO: 337173 - DNA, 741 bp, Cannabis indica
tacaaattatgttcttgacaacaaaatagagaacttttttgcacgttatggaaactagaggttcggcctctgtccacattatgaagaaattaactgccactaccgcgtactttgctcctccttactttgtaggtaatgccccaatcaggtcaatttcccgtattgcaaatgggtatggcgaggtcatcattcttaattttattggtggtacgcgaggtatatgtgaaaatccttggcatttatcacatctcttgacaattcatgtgtgtctttgtttatcgttggccaataatatccttaacggataaatttctttgataaactttgccaacctacatgatctccacaaaagccttcgtgaatttccttaattatctcgtttgcttttgtcggcaatacacatcgtaagaaagacattgaataacctctcctatataattttccctccactattgtatagcgaggtactgaatacaagagtttgcgtgcctcgtttttgtttgtaggaagttcttcgctgagtagatacctgagtatgggtgtcatccatgtagtcgaggcatctattatctcaacttcttccttttcacatatacttgggtcgcttaaaatttccaccggtaccagatttaaattatcaagctcattttgtgaggccaactttgctagtgcatcgacatttgagttgtgttctcttggaatttgttcaatcttcaaataatcaaacttctccaagttctt

SEQ ID NO: 337174 - DNA, 843 bp, Cannabis indica
ggagggatttttctgagttttttatcactaaggctctcaatgaaagcaccaaaccgttaacacagattttcattaaccaaaattaaatagcctttcagttttaaatattctacaaaaattaataagcaataaaagagaatattgctccagatatttttacgtagtcttgtagttaaaatctacatactccacgagtcattatttggggtcctttttgaatatagagtacaactttagaatttgaataataataattcactctcaattttgtcgtcctttttcccatagaatttgtccctattgataggagtataggttggcatttattctttttgggatagatttaaatctaactgttcatgaaacgtggacaatccccatgtttcatttaaatcacatgtgagataatactaaataactacttggtcgttctttagttttatcctttagatggttattgcagacgtggaaggttatatcttctctgatttgacttatcttccatatccatctgttggaattttatgccttaaataaaactcattttaatataatctgatttgttatcaatagaagattagaactcatttatgtttacatgtagtttttgttggattaccatgatctagatttactaacaagtatgtttttaacatcctaaatatgaatctctaaaacgatgaaaataaacacataataggtatgagaaaccttacattggttgcagcggaattaaatgactccttccgctcaaatctctaacccttgtatcctttctgtcacagagtatcaccaagatctgagcctgaaactccttgtgttgtttggattcttcacagtctt

SEQ ID NO: 337175 - DNA, 550 bp, Cannabis indica
aattaaattaatttcatcattttacccttctcgggtcataattactaaaacgcccctagctcacaaacgtggtcttgccatgtaataaattatattaattcacatatactgaactatataataatataattcctcgattattcataattatctaattagggttttgctaatccattacataattccagggtattacagatttcttcttatgggcggtggttttcatttgcctcttgggaggaaccacttcagtagctgtagggacgccagggttggttgcctttttcttcccctttcggtccatgatatcttcataacccatgtctacaaaataagaaaaagcgttacaattattataaaggccgatgaggaagggaggaatataattttccacctaacggatttaccaaagtcactagaaggcgagctatcactagatgaaggggtagagggaccataatatccactaaaatccgtaatgcatgtaatcttgaatatattaaaaggctcgattggttctaaatcccagcttgcatctatgcgacctgcc

SEQ ID NO: 337176 - DNA, 771 bp, Cannabis indica
tttttttttatttttaactgtgtatattgatctcattattattatttaaatttaatggttgcaattactttattacaccatctttctttacttgtgtagattggaatcttacaattgaaacatatgttttttgcattaacataatgacacatggtaagatgtcatacacaaaatgtctaaaacttaaaaatgtgtttttttaaaggaaaactattacatatgaagttaatgttcataatttaattttacaagatcgtgacagagaaccttcaaagaggattccatataaagattttccaatcgttaaaaagaaagaaatatgtaaaaaaacaaagagagagatatgctaaacaaaaagtattgaagatcaattcgattagtgtaagtagtaatcccaatcatattgatcttcacacatatattgtcgagaatgcggcaacgtcaagtcaacaacatccaaattttctttctgactatgcaagtattgttgaagatgatattcttcaacaatcatcaaaaagacaacaaaataatactactcacaccaccataaatgtagatgaatcttcttgtggagataatatttctatcaatgtcaattgtgaaactaattcattgtaaattcatcatcttcgggcaatgtcaatttcaatcaggtttgcatttgacccatattttcttttaaaactttgctccttccttcacgcgatgaaactccatatgattattttggatgttgtttttgattaatattaatatatataatcagaa

SEQ ID NO: 337177 - DNA, 688 bp, Cannabis indica
aaagtttaaaacctaaccacacctttttcctaagctaatagattagtgataataagtttgtaaaagcacacacgtggcgtccctaaaagtcagggcgttacaaccgagcagggaaaaaaaatcgtttcacccctcaatgcattttatccttaaaacacttcacttcttataaatgatattttagtgagctaatataatcactgaaataagagctcttccacttatctctattgagccaacctcgaaggaaatcatcgtttcccttatatgtctagatagaatctatggattccatatctatgttcagcgctcccactcaattacactatcatgttcccaaaatgtacgtatcaccctgaccaaaaagaagtcttaactaacaaatcaaagaacatgaataacactcctgagattgaacctaagcatgtcaggattaagatcttttgatctaagatcaactagtgatattgacttagaaagatataactgtaagattataatatctttaccaagatcagtatcggtccaagtcaaatgtatactccatacatccgaaactagcatactttgccaatgttctgaaaagaacataacacttatccaaggtgtaagtatactttatcgatgattatcacatcagtgtaaatccagtgcactgatgaattagggacattgtcttttgaagcat

SEQ ID NO: 337178 - DNA, 905 bp, Cannabis indica
agcgtaattctattccaaaaataataataaataagaaaaacaactataaaatgtgacccgaaacttaggctaacaatagcctaacaaatttccccaaactaaatccttactcgccctcgagtaaaactaaaactcaattgaacaatgcaatagataactaaaccttccaatgattgaactcccactaccacctgcacaacttgaagcaaattaaaaccagaatttcaactcaataactctaagaactaacttggatgcacaattcaaaagtaagcaattcatatagacacaaaacacctcttttgacaatcatatcacaaccattctacactctccgacattccgctaacccatgttcaataagcttgaatgacatacctttctctactaatattgacaattcttgcttggaatcaaaaggtctttttcagttataatagcatggcttaggtaaacggggagatgagaagtcatttaggctacattataccataagcacaattatgtcgaacaagcaccctcaattatccattttttcatcccaaagaaaatagtaagagattacactttttttttttcctatgtgcctacctcattgttcacatttgtttctcaagaagaaattatcacatttatttttcttttgtttttttcttcttcttctttatttacaatagaggcacaacacataacaactattatttttcaatctcttactttcaaaattattccccacttacaacaattcattcccccaaacttgcttaacagcttatggcataataaggtacgttgaggatgaaagtagttaaagataacgaattcagcttaattaagtggtgaaattttgaaataggctaaggctcaactttgggtatactaaggataaaacttttaggtaggct

SEQ ID NO: 337179 - DNA, 697 bp, Cannabis indica
tggatcacttttatatacaaaacaagcttttggttacacagaacttaattgattattaaaccgttttacattgaatattaacattaaattatgaaaaacgtaaataaaataaataaagaacagtttaaatccgttttactaaatacaacaacatatgcgactttcatagtgcaagttatctgttaatttgctcgcacaagctcctaggcttagggtgcgagatctttttaatacgagactaacgagtctcgtacttaggtatttgtgtcctaatcgagtcatatatgtggaaatcttgtcagtgttgatgatctaggttgtgcgagtccttatcggatcatcgagcatgttaagtcttttggactaactcgctatatatgtaaagaaacggtctttactaagtcgcaggagaagtcttcatgcatagacatcacatatatctgggtatatgcaaaaccagaacatttcctttttggtcttatgtcactcgaggcgtaataatgcgactagacttgagggtcacatcatctcgctgagtttggttcaggctagatttatcctcgagcgatctccttctgacagcagctcagcaatcctcaaggaaagtgagtccatgtgtcgtccttatgggagcttggtctcgagtttctaggtgaaaaattcacactataacataaactcactacaagaaatgtca

SEQ ID NO: 337180 - DNA, 664 bp, Cannabis indica
atatatagtgacgctcattatgggtagctaatagttttagagtttgacttggagggactctaaaaggctatagtgacacttattaagaaactctaaaaggctttagtgacacgctgtgatgagtcactaaatattacttttccagtcagctacattagtgacacgcagtgaagtgtcactataaagttttagagtcattcaagtgtgtcactgaaactcatttttgttgtagtgatagtccacaagtcaatcttattatgatttctgagcctcttttccaagagtttttttcgtcccttttttgagattatttgcctctatttataatttcatagtggcagttaattacaaagcagaccataatatgtttacagcaattattcctaaaatcgtgggatctgattacatattacaaaatgtaaatgcggtgtattattttgaaaatcgtatagttgtaatttttctgcttttactgggtgaagaatatcacgtattaaacacgtctttaatttttaaatctggagatgtcttgacacaaacttgattatactgatcccaatagcgagctgggaccattcttctttctgaggttgataatgtatgtcttacgtgttggaatttattttaccaggatcttagatctactcacaagtatgttgtgtaa

SEQ ID NO: 337181 - DNA, 831 bp, Cannabis indica
gaaaactcgaagagcgtaagggggtaatggccagacgagctttcgcaagttctatggtcatacaacacgactccttgatccacgactggtgagactcctttctcgctttcctatggatgcgaggccatggtaccagtcgagattggggcaggttccttacgaagagacatttttgacatttcacaaaacgaagaaaaacattcactctacctcgaccttctggaagaaaatcgcgatcaggcacacttgaaaaatgcgacttaccagcgacgaaccgcaagatatttcaattccaaggtcaagataagagtcctgcgaataggagacttggtccttcgaagaataatgccaaataccaagaacccagcacatggggtctttgggcataattgggagggaccatatctcatcgtagaaaagattggtgacgctacgtaccgactcgctgaactcgatggtaccgcgattcaaagggcttggaatggcgagagcctaaaattctattatcaatagtactcatcttgtatttgtacttagtcattttttgtaaaaaaatcctaagtatagggggtatataccatgaggtactattgattatacaaaggaatttttttcaagtttttcaaagtttgaaatttttcaggtttctgaaattttctacttattggaccaagttgtaattaaagtcgcaatcaaaaaattatagataataaccgcgagtacccgtgtactgcgaaaaaactgtaaaaagatatccccgcgaggatataaagtcgttcaaaaattaaacataaaggtaaatttgtctaagtacaaggcgcgagtaccctt

SEQ ID NO: 337182 - DNA, 628 bp, Cannabis indica
gtttagttcaatgctctttatataagagagatcatacaagagataatagctttatatcttttaaaatgaggatatatcacctattttttacacattaaattaataagaaaataatatgttaattagccctcaagaataggtaaataactgaagttaatctcctattttcgtgggttgtggaagctcaatttgtaactgaaagtgttgtccaggctgaaaaaaaagttcatgccacaagagaggttggccggccttccctttgctggaggttggccggccttccctttgctggaggctggccggctaggggtggtccggctagatcccccttggttggctagttcgttgtctctttgtcctgcttaagtatctaaactcctcgtcaagtggtacgttgtgcatggtgacttggccttcttgctaacaaggtgtactccatgtaacatcaatcttgttatgtggacataccactgggggattattttaccaggatttagatttactaccatgtatgttgtttaacatcctaaatatgaacttctaaaacaatggaatttaaacacatataaagttcaagaaaccttacattggttgcagcgaaattaaatgactcttttcactcagatct

SEQ ID NO: 337183 - DNA, 547 bp, Cannabis indica
attaaaaaaaaaaatataaattagtttttatgactaaatattagtcactgaataattaatttacgtaattcattatttatcattgccaactaaactatttagtcacaaaacattacaccttccatgactaaattttagttgttaaagtttacttttttggttgttgaaagtccatattggtatttatgtgaccaatttatcaatcttattgtgactaacttcaatatattttgtaactaaattttagtcatagaaaataacattattcgtgactaaatatattagtcactaaatctcttctacgaccgactttcagcgactaaatggtgactaaaaataattagtcgcaaaaaattttgagtgactaattaatgagttttaatgaccaaaaaactagtcggcgaaaatggatttttttgtagtgtattatggctccttctgttcagatatctaactctttttcttttctgtcgtagagtaataacaggatctgaacctggaactccttcaggtgttagaattcttcacaatcttccacactatgatt

SEQ ID NO: 337184 - DNA, 816 bp, Cannabis indica
atttttgagaaaatcgtaaaaatgtaaaaaaatattctttgaacgtaaaaatataaatattttataaaaaatggtgccttatgtaattattcctttttgatattgtgctttagtacacaattataaaatggctatttaaaaaactatattttttttttacataaatatgacattaaacttaatgcccctaaatatgacatttcttaactaaataaactaaatatatggatatacaaatagaaaagaataattattaattttttttcttgaactttcagtaatactgattccgccccttaaaatatacgacttgttaaaaatttttcttgaatttttatatttccagaaatttagtctttctgttaggttccgtccattattccgtttaaatgctgagatgtctttgtaaatttgtaacttttctctataaactttgacaactatcaaatcgtaccctccttataaaaaatgaaaaaacattttttcaataaatcttaacaaattaatttagatgttaaaaaaagtcattttgaatgattaagaaaattaaaaaagaaattaaaattttaaaccttatttagcgatttaaaaaattatttattttttattacaaaatctatttaaatataaaaaaatatattaaaatctaatatttataaaaactaaattttaccagaacaagttttagtaattttttttctctaaaattctagatatgtttaaataaacataacattttttagtttaatttctactttttttttaatttttttatatttttattgaatttttaatgattttatttattttttattt

SEQ ID NO: 337185 - DNA, 892 bp, Cannabis indica
aggatctcacaatattaactaaaggagacctcgctatattaagaaaggcacacctcgcatatttgatgaagtcacagtatcaataggaaaaggcgcaaacacatacaccaatcaacggaagtcaacagtcaagcattcatgacaaacgttacacatatttcataactgttgtaattaatttgattaataagcctattattattattattatcattttgtaacggtctcattatggccattatttgtaaccgatgcctactacctataagtagtggcttccccctccattcaaagggggctgatctgaataaagaaacaaagccagagtactcttttcaacagtggattaggcaggccgagcccgaagcattgctgaaccactatatttttctgtgtccactatttacagtactcgcatatattatacactatattctttgagtactcgctattctaagtgagtactcacatatctattttttggtatccaagcagcccttgaatacttgcataaaattagtgttgtcaaaattcctccgacaacaacaagatcaaacaaagatgaagaataaagcattatttgaggattagtgtgtaactttccccaccaacaataaataacatcttaaaaaagtagcaataatacaggtgggttagtaaaattaatttttgtcactctcctactgctgcacttccaaggtttaattttcatgcttgattgatctacatactatattatgtatatatacatacatatttatatttatatataaatattaggtggttaaaaacgtgcctcattccgttaaaattaatggactaatcatatttcttatttttattaattgtatttaaataaaaaaaaatatctaattaaattagcagattaaat

SEQ ID NO: 337186 - DNA, 840 bp, Cannabis indica
cttatcatttacctcttccttagaaagcctttaataaaaactcccattagctttaggattaggatagtggactcaactataaataaatgagttgagaaccaatttttcacacttctcttctcactcccacatgcctatagagaactttgggatttcatcttcatcaagcctccaagccttcctcacttcaaggtagaaaaaaattgatttttctccttctcctcctttgttggtcttcttccaaggactcttaaacttccaaaaacccttgaaacaatttttccaaaacactctccttgtgccttgaaaaattcctccaaattactttgaccttttctaacataaatttgacttttcttgagttgtgagaaattgagttgttgagcttgagatgactaggatgaagagaggcaaaagattgcctaataaatatgatccccatattactcagttcattagagctaagctaactttgcctaagtctaagaacttggacaaggcccatggtggaaaagtaatggcaattgagcttctcaaagcttccattgagagtgttgattcgcgagattgagcgtttaagcttaggccgcttgtatctagtacaattactgtgcttcaagctcaaacaattcgagatgattattgtatccctaaaactattgtttggaagcctcgacatggtgctcccaagggttctcagaatacttgttatagtgcctagtgagattccacatgaattggggtgcttacttgcccttgcatccatgttcatatccattgttttcccttaccaaataaacccaaatggctatatgagtcttggcaccttcttcatattct

SEQ ID NO: 337187 - DNA, 1023 bp, Cannabis indica
acaaaacaaaattcagccattagtgattgagtgcatgcccacacataataagtgagtcctcaatcatagtatgtaagtgtaatgaccgctttagtaatttggattagtaaaggcaattagcactaatttctgttattttatgattatttatgaaattaattatttgtggaccccaatatttagaaataaatattagagttataatttctcaattccggagattttattaaactctaggggtattatttgacttatatgtgaaatatgttatttttgtaatttttgctcggcgacaacggaaaatgcgatggatggctagtttgatcacatgggtaagtttagaaccttatttcttagtgggaaatattttagagaaaataaaatatcgggattgagcggggttatggaatttgaccattttacccctagcttttgaaaaccttagttttgggttaaagggcatttagtcttttggtttaattgagtgttaggtggctgcctatgttagtgacacctagcaatttctaagggcagcaaggattaattagatttcctttttcctttgaagaaaatcaaaaattaaaggaaaaacaaaaaaaataggatttctctttctctttctccttttctgccaaacccaaagcaagaggaaccaacttttctgctatgaatttttggaattcagctaggaattcaagagttcttgaggttgaggtaatccctagctctttgttctttgtgtttttaagctttgaaattggtttcatgtgttgattttgtgaaataggggttgctaggggtgttggtgcttagggttctgattttatgctagtttagagttaaatttaagttctggttgttagttttggtgtatggtgatgaatttgagcaagcttgagttttgaaactcaagtttaggtctttaatggcaagttgagattcttttggatttttctgggaatttctggttggattataatgtgtatgcattgtacaggtatactggaaagtttggtagagttt

SEQ ID NO: 337188 - DNA, 616 bp, Cannabis indica
ccactcaaccatccaactgattcacacttgcatcacgcccttctggctcccacggtgtactaagttgcaaaaacgcagccctctggccttcatgcaaactgtagcacccttctcgaccttcgcaggccaacatgactactaagtctgactggcacggccctctggcctccacacaaactctagcgccatctcaatgcttgcgctcggtcttctcagccctgctggcttccttgatgcctttattccacgactccgcgtctctatcgatgtctttgtgtgacttacgccctctggtgatttaacaagccaacacattccactcaactgcctcggcgcttccatatggatcaaataaaactcgcatgcgaacacctccaagtacaaccatcctctgacgattgcggcctctgcctgccttggtctccatgtgcgtcccatcttgacacacacatgtagcaactgaagcattccatgtctatcccaattagacccatctcagttatcaactctcgacctctgtcgtgactaacaaggatttgacggtccctgcactacttccacactcctgccaacaagcttccttttcaacaaaagcgcctcctgcggcttacaatgt

SEQ ID NO: 337189 - DNA, 621 bp, Cannabis indica
gatgttattgttttcattttcaatatgacttgtttctgttttcagtgtgaggtgttcgtattttttatgttaaaatctaaatgtttccttttttttttatgtcatttgttttcatattcaatgtgagttgtttccattttatatgatttttatttcaattttttttatatatatatgaggttaaattttagttattttcatttcacagacacttacataatacttgttgtttctatttttaatttgatttgtatccattttaaatgtgagttgtttctatttttatttgtttcaatttttcatgtatatatgaggttaaattctaattgtttccatttcacacgcacacttaaattatactagttgtttttatttttaatttgccttgtttccattttcaatgtgagttgtttctatttctatttttatgatacttgattccatttttctcatgtatatgagcttaaattttagttgtttctatttctctcacacacacatacagggttgtcgatgacatgtcgataggttgtcgataggatgtcgatagattgagtgtctgtttgaattttgctgtaatttgtatgtcgataggatatcgcttgtatgtcgataggatgt

SEQ ID NO: 337190 - DNA, 640 bp, Cannabis indica
agaaggacattcgggctcaaatgttgataatactctgcgacagaaaggatacaagggttagagatctgagtggaaggagacatatttagggtgttaaacaacatacttgtgagtagatctaagatcgtggtaaaataaattccaatacacatctcatcaccttatcaacccaagctgtgtcatatcccagccgcaccatcatcacccgaaggaagtgccattcaactctatcatacgcctttgccatgtctaactttaaagccatttttgtaccattccgaaatctatttttcctcatacaatgaagtccctcatacccaataatagcattatcatgtatcaacctctcttgtacgaaagcgctttgggtgtcagaaatgacaacactcatagtggatctcaaacggcaagcaagacacttcgaaacaatcttgtagataacatttcacaagctgatcggccgaaactcttccacacgaactggtttctcaactttgggaattagagcaataattgtttcatttaaacaatccaaatcagcatcttcattaagcatcttcaaacacaccgtgacaacttcaacttgtagtttaccccaaaatttttgataaaatagtgctggtaatccatctactccagg

SEQ ID NO: 337191 - DNA, 1700 bp, Cannabis indica
ggtttaggatttaattatatggattaaaaaagataaaataatagacaaatattcactaagtggtcagccacacatgtgggtctcactagttttaattttgcaattttatatcaaccatttatcttttctttcagtaataccatatttttcaatttcaatcctataaatgtcaaaactgtttatttaataattaaaattaattatcaaataaaattatcatttaccttatttattaattagcccttacaaagtcgcttaattaacaaataaacctgaaaacatattttttcacaattaagctcttgcttagtgaaaattcatagataagacatagtctaattttaaaattataattgattaattaaaactaattacctgagtttacaagcagtgttatctcaactagtgtggggaccatgggcctatataatcaatcatctaataagtagatctagaatttactaagtaaattttcttacttattaattttttcttgtgccactatagattcagaatttcacttttaattatatagaacactctatatgtaccaagatatgatccaaatagtcaaagatcctctatagatgatcaacatcgatcaaataggaaaaaaatttactgttctacccttcaatgtattttatccttaaaatacttagctacctataaatggtatttcagtaaactaatatagttattgaaatgaggcatcaattatttatctatattaagtcaagctcgaaggaaattatcgtttcacttctaaatacttatagaagttaaggattccaatctatgattagcgctcgcactcaattgcactatcatgttcccaagatgtaagtattctgcctatcaagctttaatgaacaaacctcagtacatagataatacatttaagcagaatctaaccatgttaggattaagatctattgacctaagatcaactaactgatattgacttagatagatataacagaaagtttatgatcttatccaagttcaatatcggtccagctcgatgtatactccatacatccgatcctagcatactttgtcatgtcctgaaaatgacataacacttatctaaggtgtaagtaagctctatcgctgattatcatattagtatatatccagtgtactgacaaatcatgggacattaactttgaaacatataatcataattatattccactgtgatgacattactataatcatgaattattgtatgttttagatttataagagtttatacattaaacatataatcatgatataaatcatgtgaactatgcaatataaaataatttatgatattttgttaattagcaaatttgattatattgaaatgagttttatttagggcacaaaacccaacaataataatagtctaatttgatcagttatgtaatattaatggacactttctttctatataaaggggggatctacaaatcaaataaactacgtattaagtttcatacactatttgtactgtcctttggtctctctgtatattagtttattccctttagttatagtcggttagttataacggtttctaattgcctagttgaccgttgattgatgtgtggtctaagcttccctgaagctatatatattctgtaatggttcctttctctaatttaatgaaatcaaactttcctgttttcttcatttctcaatatggtatcaga

SEQ ID NO: 337192 - DNA, 518 bp, Cannabis indica
aagtgtagtatagatagtaataatagagatgatttaaaatagagttaatgagatatgaggtttcgttgcttttactttagaaggtgaatttggtgtgtagccactttaggagaatgaaaggagctgattttgttgtgttgggtaattgggttggttgttaggcttggtccctccatccaaggaattaatgttattagccaatgaaatccataatatttttggctttggtgtttttggtattgttgatttcttaattcaggtaaatggtactcactctttatcatctttcattcctagacaaatttatatgttgcaagtagagaaatagatacaattgattaattaattataacttatttgataatagtccttattgttcaccatgagagaatcaattatcctatctaaacgtaggagtactacttacttatattagtttgtctctggttttaaattctaaagtaatctaagataagataacccatgccctatttacttaattaaatgtcaaaacatat

SEQ ID NO: 337193 - DNA, 869 bp, Cannabis indica
aagaacatttcaacagaaataaaacaagattttcttgaaggaaaggatttttgggtttaaaatgagttcatccaaatctcttgatcaaaatttggatgaattcttaaggatgcacattgaacttgcaaattctggggaaaatgaggcactaagtgatgaaaaccaggctataattatcttaaactcactacctgaatcctacagagaagttaaaactgcaataaagtatggaaggacatctataactttagaagaggtgatttcagcactcaaatctaaagatttagagatgaggacagagaaaggtggacattcaaatggtgaagtcaacctgagtaggggcagaccaggtccaagaaaaccttggaacaacagaggtagaagccaagacagaggttcaaacaaccagagagggtttcaaagaggcagatcaaattctaaccctagaaattctgatgaatctaatggttgttacaactgtgttaaacctgaccattttaaaagagattgttatttcttgaaaagaaataacaaacaaaaaccacatggacagggagattctaaatactctaactctaaacctaaatctgatatgcatgatgctaatgttactgatggttatgaaagtggtgaaatactccacttacactgatattaagactcaatacaacttaatacaaaggacagaaaaggaaatacatgcaaaatccctaagttgaccttcggtctctaaaaaccctaacagaaattagttagaatggatttggttaaatccacacctaactaatttctgtaactacctaactaatacattcagaagcaaaaatagaaaccctagatctatatatacctcaagcaacaaccagatc

SEQ ID NO: 337194 - DNA, 618 bp, Cannabis indica
aaatttcacaattttgcttattttgtgcccgacaacattggaacacggtgtttggctattagaatcacatcttaatatttttagtaaagagagacaatagtttagacattacaaatgtcagaaatagtcgggattttagagtttcccaaattacccctaagtgctcttttatgttgttttgtgggaaaagggcaaaatggtcattttgcccatttatgctttgtctttagtgatttttaatttaattttataatctgattatttagtatactttggctgagaattaaattaaacaaaaggaaagaaaaagatttatttactcattattttcaaaataaggaaaaaaatcataaaattgcatttctctttctcttttcgaatcccttagaccagcttgttggaaatattttaccaggatctagatttactacgaagtatgtttcattaacatcctaatatgaattctaaaacaatgaaataaacacctaagagtttaagaaaaccttacaagagaaagaaagagagagaggggcgactaggcttttctgaaagaaacaatgtgcaaagtcatgagtttcctgaagccaacactttctatttatagaatgccctctaggt

SEQ ID NO: 337195 - DNA, 513 bp, Cannabis indica
tctatgaacatttctactatcttaaataatcgtttgcaattttgtgaaaaacctttcaattttatgtgttccatatgtcattttgccaaacaaaagcgacttccatttctatctaacaataattttgcttgttctgcttttgatttaatacatcttgatatatggggtccttttcatgttactagtattgaaggttaccgatattttttaactattgttgatgatttttctcgctatacttgggtatacatgctcacttctaaatctgatgtttctttcattattcctcaattttttttccctcattgccactcaattttcagtcaacattaaggttgttcgttgtgacaatgctaaagagctcaatctaacagccttctacgccaccaagggaatctcaatcaataattcttgcgttggtcgtcctcaataaaattctgtatttgagcgtaaacatcaacacatattaaatgttggtagagcattattatttcaatctcatttatccttacc

SEQ ID NO: 337196 - DNA, 596 bp, Cannabis indica
gtccgtcgagtagatagttgattttaagagtcatccatgtaggaaagttgtctatcatctctacatgttcctttcacatatacttggctcacttagcatctccactggaaccatgttcaattcatccaagtcattctgcgaggccagttttgccaaggcataagcgttagagttttgttctcttggaattcgctcgattttagagtaatcgaatacttccaagttcttctgaaccttctctaaatacttagccattttcaggcccttagcctagtattccccaagaacttggtttacaatcagctgtgagtcactatggcagatgagatttcttactttcaacgcctcgcctatctttaagccaataatcaaggcttcatattcatcctcgttgtttgatgcgtcaaattgaaatctcaaaacataatgaaacttaaagtcttctagtgagattaatattacccctgcacccgaaccttgcttgttggatgcgccatccacatataacttccaagtgtccgcgtctcggtgaacaggcagaatttattcttgaataataccttctattaagaagtctaccaaggcttggcccttga

SEQ ID NO: 337197 - DNA, 783 bp, Cannabis indica
tataaatttaaatatatacagggactcaatataaaaatatatatgtataatatggagcagagaatacatagaaaatttaagtatatcctatttagaagaggacatacttttcattattaacacacgaaagaaaattgaaataccctttggtggtgaacataactcgaaaccttatatgtttgaaaccttttggcagagggagatgacggggttaccggaggcgttaaggagcaaacggtagtcgtggatactgaaaacagagcctttgtgaatattcattctttaggaagggtgaagctcacctggatggtacaaatttgcaataagcttatcaaagagaggttgtctccataacaaatctgatggaaaaggggaaagcagctcgtttcttctgccattgcaactttctaaatccgtagggacatgaatggagcaagaaagaactgcatcgtgaatggaatctgaaagtgccattgcccaagatggaagctctccaaacctcgtagcctggttatgagaggcttcagataaccatccttcattttggaaagcggagagcaaggaagattggcgatgaggagagagaaagtctctggaaatccataaccctctaatttcttcgaatcgttcccaaaaacaaatatttgactcagattggttctctgcttcatcctcctcattattaaccacacttttgttatcattttttaacctacagaaacatcctcattcacactctctcattctcatcatcttcattctcaccctcatcctcatcatcat

SEQ ID NO: 337198 - DNA, 883 bp, Cannabis indica
tagaagaagagccttatcaaatgactcaaccaagttcacttgaggcgttgatgatggagttcatggcaaaaaatgatgccttaattcaaagccaagcttcatccttgaggaaattggagaaccaatttgagctttcggtcaatgagttgtgtgataaattccatgaaactttgggtattggtatggaaaattcaaagggagaagaagaaagtgaaaatgttattttgaggagtggtaatgagttgaagatacttggagaaaattttgaacaattacaagagcccacttcaatctaaagtagtgaagaaaagaatgacgaagcaagcatttcaagtttgtcaacatttgttgctattcataatgttgcagcattttcacagcaaaatcacccaaattttgacaaaatttagcaacaaaatgtttacattcctcaacctagtgagtcattagtcatggaaggctacgtttatgaagatcctttttggccaccacctcctcctccaccattggcatggtaccttggcatccctcatgtgcattcatcgaattcaagtcaagttgagcatttgggctattcaattccatatctcatcaagcttgagggcatccacgataaagacccatttgtgagggcatatgccactctctataggcggaagccgctctatggtgagaacttctcaaaaagtcaaactgacgactttaaatcaagctcttcttgggagacaacccaagctttctaaactttgtctctattttattttaaattcaataaatatgtaatgttaaatggttttgacaattgcattgtagtttttttttgatcttttttttttttttcttttttcttttgtaggtgtaagcataaagtcaaatggaattg

SEQ ID NO: 337199 - DNA, 1100 bp, Cannabis indica
gagctcaaaagcttgctcgactagcggggttgactggaatatcatccagttaaccttcgaggataactttgtgaagtacgggctctatcccaaggacttcattcccaaacaagtgaaggggtggaagaggaaatctgatgctggacgggttgaacgagctcatcaggaggatgagtttattgaactaaagcgcgatgctaagttgaagggaggtgcaagggcaaagcaatatggtaaggagcccttgaatcctgaagatgaggctgaggaagagcaggtgactccgctcaagaggaggaagaaacttttggccccgcctaggcctgttgaacatgcgatttgcataagggagcccatctcgcctgctcggccgtcccctcccgtgttcggaaaagggatagctattatgtctgaaataagattgatgtcaagtgatgatggagtcttgatccttacttgggtgatcactttgcatgccacttcctcttgtttttgagcttcttgactgttatgccttatgtttctgatgtctgctttctctaatcatgttattttttgttctgtacagacatgtctcgacagatgcttgacgctatgaagaagagaatgggtggaagctctagtgcctctcctcctgccaagaagtctaaaggcggtgaggggtcctcttctatggaaaagacgcctgctggggaggtcattgatctttccgaggagctaacggctagaaaaaccctctaccccaaaagctgctaagtccaaggagtctcgcagaagaagctcgaacaggtctgaaccaccgaagggtgggtctaagctggtcagaagtgaaccccaacaggtgcgcgcccctactccaccttttttggagcttccagaggccaaggagggcaaagagatgcttgcccactacatgaaccggctggttcctgaggttagtgagcaattggctggtgctgacaatgactcttctttggagctgctgatgggcggagtcttgaaggaattcaccagggtaagtctttcttgacagtttcctttaattttctttacttaactctaatgctaaagttttttctttgtgcaggccggtctaaagt

SEQ ID NO: 337200 - DNA, 560 bp, Cannabis indica
agaagctctttaccgcccagaagaagatagctgagctgactaaggatctcgaggtttctgaccatcttgaagagaccatcaggaccttatctactaaattgaacagtcttcaagatgagaggacatctcttcgagcagttcttcctcagtggaggaggagaagaagtctacagaggaggacctttcggccgaggtgacgaagctgaaagagaaggttaatgctcttgaggcagccagtcttgagctcttctttgacttttggaaggctaatcctcaggccaactttgactacttgggtgatggtaaggacatgtacctcgagttctgcgcttcttaagtagcctatggtgaacctgaggtggttgctgctacctccggccaaactgctgatgtacctcccattaaaacaatagatcatccagcttctactggcccagaagatccgaaccaagagcctgggactccagctatttaaaaacttctgcttttatctttttattttttatatatcttattcggccataaggccatttctaagacatcatgactggccaagcagt

SEQ ID NO: 337201 - DNA, 812 bp, Cannabis indica
aataggtttagagttattaggtattagtttattctaatagatcttttaatggtgttgtttataccttagccaaatttatcttgacggcagataataatataatttggtggtcaaagaatcttatttgtattcaaaaacctgttgacagcatatgctatatttaaataaatcaccccacctaatacagtgcttgttgcttttgagatatggtgggttagattagatatatattttttttattattatttaagcgtttatatattacaattatgtataatttgggactcgaaccgaggacaacacacacgcaccctcctataacttgagctagcctcaagtgattgggttcgatattttttcaattaatatgtatattacatctccacctacaaaaagggaccaccagagaactatttgttttattatatataatattaccaaaaagggcaaaaaaaaaaaaaactttttgggagctagttgtgacctaactcgagttagctatttgtgaggtagggtttattagcttggtttagttagatatgttatgttaactaggagtagtactggtcatgatgagttaggttataaaccaaacgcaagagctttgtagtttttaattatataagtcaaaagcagagaagaaggagaaagagaatcgtaaggctccatctatacattacaacatccaatgtaaggacatattttcatacctaaaacttctttgattcttcaatttaaggctttgttaaatcatatatattatatatactataaactttgtagtaagataatttaaatataaatatatatat

SEQ ID NO: 337202 - DNA, 469 bp, Cannabis indica
aaattttttaaaattttgcaagatgtcttaaataactataacgtacatgaccatgagaaaaaatttgactaaaaaattatttcgggtgctaaaatagctaagggtgcatcaatgtatctagttttaaaggggtgtattgtagaatttttccattttttttataagaatctgattatttttagggaataagaatatggaataatttttatttttcttttcttgaaaaaaggggtttatttttcttttatttataggaagtaatttttatttggggaattatctcatatactatttgtttttaacctttttttttttaaatttaacgtttgaatatttaaagtttaagttactagcactagttgtcaatagaagtttctatacgattttttgatgtaatagtgatttctatgtagaatttcgtaaaaaatgcaaaaaaaaaaaaattattttgaagtgtaaaagtaaaaaa

SEQ ID NO: 337203 - DNA, 522 bp, Cannabis indica
acaaaaaaaaaaaaagaactaacaaatttgaataattataaaagtcttttctggttgatatttatttataattagtgtcgtgttaatcaaataggttttgataatatattattaaataattagtatttttgtctcatgcactttcaacactacctgattttgccccctaaaatatacaacttgttaaaaattttccctaaaatataacaattacataatttgccccttatgttagcatctgtttcttttatcgttaaaaattaacatttttattccctgaattttgaataatacaaaattttgccatcttttattttaaaaaaataattttgaaaattataatattctattaattctgaaaataattattaaaaattatttaaaaaaacctaataaaaatattaattttacttaaaaaaacttaaattatttctaaaaagatattttcgaactttattttatttataaacacctatcttaaaaaatcaaacaaaaattattgagaatccaataaataattta

SEQ ID NO: 337204 - DNA, 526 bp, Cannabis indica
aatgatttttttttctttttctttttccttcttttcttcttcttcgtcttctcactgcaccttaaccctaattctaacgagccaacaccagctgctgaaacggctccagaatcacagccccaacagcctcaatcacaaagattcgcttccctgacgaggacgacgtagctctcgacgccgagaaagccccatcaccgtatttttgggccaccgttggtactgcaaaatccttcagcggggcgggattctagcgagacaaggtggccatgggaatcaacagaagtaccaccaagccgcttagaggcaccgacgacgacattggcagtgatgggggagctccaagagttgaaggagcagtgattttctctttattaagtgttgctgaagtagtagccattgtcttagagtggtgaaactggtattgttgcttagtgggtattatccggttgagccttggggtaataagtttgaggtagagagaagaagatgagtgttacgaaaattatgtttattacgcaagtgtacg

SEQ ID NO: 337205 - DNA, 746 bp, Cannabis indica
tatgatctaccctttctacccccaccttgctcaatggtcctgaattgtctagctattggtgcactcacagatccactactgtggcatgccaaaatctccaatttgcgatgttttcggctgttaacaacactttcttgaagttcttagagctttcttaacggttcttgggtctccaataacaattaaaattgttgttgaaactgttgctgcagttgtttcccaagttcttggatggattcttgaatggagccttcgattttcgacaccactgtttccaaagcttccatatcctcttcgagtagagtggtagaataacttttctccacagagttctttggatagaatagtcttagactagaaatattctatcagctatttcccaaaataaacaccagtagtgaatatctttattttgaaaaagcagtggcaaagttacaatatcgagcttttgagaggctcgtctttccaaattcccaatctttcgagatgattgttctctccacaagagtactcttttctaattccaagctaatctcaatgaggtttctctctttctatttataagcataggtcttaaaacagacttaggccacctaggattacaattggaccaatataattaaaatactaagacaacttagcctatgtacactaaaagactaagagcatgtttggtattgttttctgttttttgttttcaaaaaattgtttttaaaaatgagaacaaaaaatagtttttgaaattt

SEQ ID NO: 337206 - DNA, 609 bp, Cannabis indica
cctacaacaaactcaatacttgatctaaccatgtcatctactagttaaggtgaaatcttaatcatactagttacctacacgagcccctttttgctcagggcatctgccaccacattagccttcccaggatggtaaaagatttcacactcatagtccttaaccaactacagcagacgtctctgcttcatattcaaatctttctaagtaaggaattacttgagggtcttgtgattagtataaatctcacacttttctctgtagagataatgctgccaaatcttcaaagaaaagactactacggcaagttctagattgtgagttgggtatcactattcatattcctttaactgacaggaggtataagcgatgacccgattgacttgcatcaaaacacaccccagaccctgtttggatgcatcgcagtaaaccaagaacttttctttatcagatggtaggactaatatcggagctgtgatcaatctttgtttcaactcttggaagcttgcttcacacttgtctgaccacaaaagccactgattctttttagtgagttcggttaagggtgctgagatcttagaaaatccctcaacgaaccgacagtaataacca

SEQ ID NO: 337207 - DNA, 1468 bp, Cannabis indica
ttagtcgaaattactaacatgttcttaaattaccatccagttcgtacaaaaggtttggtcaaaaccaaaaccccgaacagataaaaaactatacttgcaaaaaataagtgaccaagagtcaaaagtctgctcagtcactttgggggcacctatacctgtacaaagcatttggtaaagataaaactaaaacacggttgcacgatgattataaacagagaatgaaattcattaaagataacaaaagcatgtaatactgggattaaaagctgcccggtcagcctgttttctgcaaaatgaaaaataattccaagtttaaagaccgcttggccggtcatgatgccttaaaaaaggccttctggccggatagatatataaaaaaagaaagataaaaagagaagtgtttaaacagctggagtcccaggctctttgtacgggttttctgggccagtaagagctggaggatttgttgtctcagcaaggggcacactaacattctggccagaagtagaagtggtcgcctcgggttcaccataagccacctgagaagcgtagtactcgagaaacatgtctttagaatgacccaagtaatcaaaatttgcctcgggattagctttctagaagtcataaaaaatctcgagacccagagtctctaaggcatgtactttctcttccaacctcgtcacctctgctctctgctgctcagcctctgctctctgctgttcagcctcagatttgtaattctcgaccttagctgtaagctcctcgtccttagacttcttctctgcttccaaccgatggaagacagtccgaagaactcccctttcctcttgaagttcgttcacttctgctgacaaggtggcgatggtagcttcaagttggtcggaagcctcgaggtccttagtcaacttggttactttcttttcggtagtaaaaagcttctttttgacttcacccagttccattcggacagctctgagtttcaccctggcagcttcagcatcctttctggccaagtcaacttccgccctcattgtgttggacaaggcaatgttcttggaggcaacagacttagctcgggaataggtgtaggccatcttcagaccagtctacacaaaaaaaaacattagagtttgagccaagtaaaaaaggattaaatgaaactcacaagaaaaactcacccttgtaaattcgttcagaactcctcccatcaatagctccagggaagattcgttgtcagctctggccagctgctcactcacctcaggaaccaaccggttcatgtagtgagtgagcatctccttgccctttttggcttttggaggcaatggtagaggtgggataagagcccgcatctaatcaaatccgctctaggccaactctgatccacccttcgactgttcaggcctgtccgagcttcctcctcgagaatctttggacttagcagctttcggagcagaagggtccacga

SEQ ID NO: 337208 - DNA, 568 bp, Cannabis indica
cgataatttttagaattacttattgagagcttggtcatacataggcccacggtccccgcactaactggaataatattattttgtagtatcaattaattgatgtatttatgaattttactaagaaatgacataattgagaagaaaagagaaaaaagagtaatttatttgttaattaagatacttagtggctctagttaataaatatatttaaattgtattctatttgataattatttataattattaaaatgaaattggtatttaaatagttagaggagataagtggtaaaataggaaaagacacattgtttcatttaaatggaataaagtggtataaatctaactcttaagcccatatgcaattcggtactaagagttgattcagcccaagttttattttaagccactctcatctaaacctaaccctaagtgaagcctttaaatagaaagagaatagtgctttgtttaatgatgattttctaagctagaaatccccaaaaagctcacttcttctctttaattttcgaaaattcaaaggctattttctcttagatttcttcatgaaatt

SEQ ID NO: 337209 - DNA, 679 bp, Cannabis indica
ttttagtgagttcggttaagggtgctgagatcttagaaaatccctcaacgaaccgacagtaataaccaaccaaacccaggaaaattataacttctgttacaattttcagtctcggccaatccctgacgaattcaatcttccctagattgtccttgatcccgtctttactgacaatgtgtcaaagaaaagacacctgagatagccaaaacttgctctttttgaacttggcatacagtttatgttcttgtagtcattgcagaaccatccggagatgttgctcctgttttacttctgactgagagtatacaaggatgtcatcgataaatataataacacagatatcgagaaaatccttgaataccatattcatcaaatccataaaagtcgttgaagcattcattagtccaaaggacataacccaaaattcatagtgcccatacctaatgtagaaagcagtctttggaatgtcctcctctgagattctcaactgatgatagcctgatcggagatcaatcttagagaagaccatcttccccagaagttgatcgaacaagtcatcaatcctaattaaaggatacttattcttgatagttaatttgtgcagttcctggcagtcaatgcacatgcatagggatccatctttctcttggaattattttcccaggatctagatttacta

SEQ ID NO: 337210 - DNA, 901 bp, Cannabis indica
agaattttagacgtttaatatagcattactagatgaattaggggtataataaagtaacccctacaaccagcttaatacaatccgaataaatttacaaaaatcctattatttttttaagctagttggaaatcaacgtcaattaataaattttcattttttttttattagttcggatgataacttgtgtttgcctttagcaaaaaaaaattcttacattatcaattttcattagttcattgaaacttgaaaatcgcaaaaattacaaagcaaaaatgcaataattttggagggggttactttattatacccctaattaatctagtattagtaatgctaaaataagaaaacaatctaataaaattctgtcaacacaaaagaaatagtaatatgtatcataaattttgtccagaatgaaaatttttcattaatcatttacaacaagattgcttcactatatcgctctggaaaggaataaacaccagagcatgtcatacaagttacttgaagaagctttgaaaactgattcaagcatattaatggtgtctatatcgatccttctctcttgacggataagaacctgtaataaccgaaagctttttaggtaatgtacaacctaactcaaagaagaattcatgtaggtatgacacctaagtaaaatacacatacctcttgatgagtgatgtcttgatttatctgaatgccctccacctgaattcagacaccattaaaaatcttagtttaatgtaatttgctaaagacaaatgctgaaaagaaaattaaattgttgaatatttggcacgaagtttaacgaaatttgaaacttgttaggcaaattacctgaagctctatccttggaacgatggcgtcgttccctagccttatctctgtccctttcgggctc

SEQ ID NO: 337211 - DNA, 1214 bp, Cannabis indica
tgaagctgaaacccctttcgattttatattatgtcttctgtgtatttttgttgttagacacctttgaacgggtatagtatttataattatggaggtaagtaagtagtgcatgtaccatgttatattcattgaatacttttatcaaatcttaaactctgcattatgtgcttatctcaactttctttttagtttagtcattgaggatgccattgtttttctttcctggtttttgacaacgtgccaacaagtatgtgttggcattgtgatcaagcccagtttgtaggttgcatgattagcttaaatgatttgatgatcatatatatcaaattgactttaggtacaactagggacaagcttgtcaattgacctatttaaagtacaccacatcatcattatttcttttcttttttgagttgaaattgaatttaattcaagaagctaatagcctaaccttgaattatcaggttaaagattgagcaaaatactttgggtgacctctttacagtgatgaaagtttacatatcattaaaaccttcacaaagaaattcgatatcagccaaaaataactttgtttcgacccaatcttgggcaagctttcactgagtggtggtagtgattgtgaacaatctaaactatgaaaaaaattaataaaatttgaatatcaccagtttcttaaggaattattaatgattctataaattcagttaaacctttttttttcctcataaaaatatgtaactaaactttgttatttttacttattgacaatctctctcatttgagtattgaagttcattaataatgtgttgaataataatagcatatataaaatttattggttactctttttattgtcaattgattttgagatgaactccaaacaccttactatatattcacttatttttataaagggtgttaatctaattcaatctgttttgctcatagtgcataagatcatcactaaatgcaaatttcattttttggacccaatctaattcgtacaatagctcaaaatccaatccaatctgcaaaaatgcggattggattggttattttagattagttactttttaatattaaactatttaatattcatgaaaaaataaatttttttcacataactagtaattaaataaaataaattatagttcttttatgtcttcaacagcaaattaaaataaataaaataacaaataacaaatttaaagaaa

SEQ ID NO: 337212 - DNA, 520 bp, Cannabis indica
cccagtagctgtccaaaatttaactttctcccacacatccgcttctgatttagcatccccttcaaaaattctagcatttctttccagccacacaacccaaagtgttgctaagataactgttttccatagctttgttctgcgtttactgccagttaacttggaagctatcatttgtggtacggaccttggcataacccaagccaattcaaactcctctagcacatgtctccataagcaccgaataaaattacattccagaaacaaatgtccaacgtcttctccgctgcctttgcagcagacacaccagccaggggaaatataaaggaaaggcttccttttttgcaccttgtcatggacattcactttgtctaaagcgacaagccaaccaaatactttaacttttgatggaacacaacttttccataggctcttcgtccaaaccctttattgcacagaaccatatctaaaaaaacccactccaccctatcataggcttttaaaaatcaattttgaataccat

SEQ ID NO: 337213 - DNA, 662 bp, Cannabis indica
agatatatttcacttatcactttaaaattacatatgatctctatctcattctctctacccaaatcttaatatactctttgcttcttcctcactctcaccacacaataaacttacacacttctcttttcacaattagagatagaaattggacagttaatcatgcccccatctccgctacctatttatgcccccatcacgtcccatccccgtctagggtatccattaaggcaaaataaaaaataaaaaatttaaaataattgagaaaacttttaaatttatattaaaccaatattgtcacaaatatttattatgcactcataatccataaaagataaaaagacaaatttgcctcaatttttttttttttaaaaaaaaaagacaacataacccaatagaagataaaaaataaatttgtctcaaagtttgaaaaaaaaaaaagacaaaaaaaaaaagtacataacccaattatattatcataagtctcccaacaaattaaaaagtaaaacaaaagaatgaaaactaaagaatacgagaagaaaaatatctttacacttgtaatccacaataatcactagctagttcactaatttaaatgtatgatatataattttgattagatttataccaaattcaagcagtttataccaaattgaaagaggcta

SEQ ID NO: 337214 - DNA, 1147 bp, Cannabis indica
tcttaatttatggtcggttttatatggttctcgaaagtattaattcatgtttggtgagtgtttactgattatcgatgggttctcgatagattctcgttaggatgtagtgttttttatcatgttttctcttacgttttttttaattattatattgtttatcttttacagatggctccagaacttattattcccacttcagcccacttttcaggtcgtgtgacatatagagggagtggaatatttacttcaattgttcaaaagtttaaaaaacatgaaggattaattgaaaggatgaagggaactccttttggccaattttggaaggctgaaacttttgttttctcttcagttttggtgcaccaattaatgttgcacaaaatgaaggttcaagttgagaaggcggacgaaggatggttttacattggaagaaacgaggcaagatttggcgtggttgagtttgctctcataactgggttgaatttcatgcaagggccatccattgaagagaaaaatgctcacttgggaaacgaccgattgttgaatctttatttcaacaaatctgggaacgtgaagatggaacatcttactgtgcaattcttaaactgtgagattgtcgaggacgtttacaagctagggttgtgcttgttcgtggagggagtcctaatgggtcatgagaggaatacagagattacagtggtatactaagtttgttgaggatattgacttatttttttagattccttgggggtgtgcttcttttagtcggcttatgtattctgtccagaaagacatggtaaaaatgaaggctgagttagataagaaagaagtcactgagtcagcggggtacacaatttatggctacgcaccagcattacaatattgggcctacgaggtaatttaagaagttgggaagaagttcgttgttagtcatgggatacaagtacccagaatgcttagctggggcagtaaggagattgatggaagttatgacattccagagaaaatactagctccaatattttctaaaagggtatgatttttttctatcattattgtattatttatcttttattgatatcattgataagttgtattttttctctatgttatattctgtttattttttttataggtttgggaaatgatt

SEQ ID NO: 337215 - DNA, 746 bp, Cannabis indica
cacactttgtaactaaataaaaaagaaaaattaatcaaatatcaactctaaaaaatttcaaactaatcaaatatatcacgaaaaaatatgtacttaaatatgataatacaaaaaaatatgggcttaaacacaacgcgatacaatgtaaattagcacaacaagtccaaaaacgtgtcatataaacacaaatagattaactcgaaagcacaccacattaaaaagtctaataatttaataataatagcaataataaatatttatttatcaattaaaataataatagtgtttaaattctaataattacaactacttttttatatgatagtgtataactattgttgaaaaaagatgtaaaaataattaaaactataaaacacatattttttagaaattaactcaccaaatttaataaaaatacaaaaatataaaaatatagagcatgaatttgagaaaaaacaggttggtctatttaaaaaaataaatcggcgcaagtaaatatgggaagatgttctcattacaagagggaatagaaagattacaattaaaatactcaaaatataaataaaagtattgcatcaagattacaagaaagctagagaagaataagaataacacacaataagcttgatcaaggttcaaggatttttgtcttaaaagtcattttctccctcatatggacacttaaggatattctagaaatactctaaaggatttatcaaacctcatatgctcagcttagtgtctaa

SEQ ID NO: 337216 - DNA, 1037 bp, Cannabis indica
ttaataaatattttgaacttcgaccccaacctggaccttgggacccaaacctgaacacggaccatgacctccaccccataccagaacttagacctcgcttaaataaaatcaaaaataaaaataaaagttatataacacacttttattttctgcttttaaaattaaaaaacataagtggttatagaacacatttatattttttaaaaacaaaattttcaaacataaattttattttatttttgtaattaaaaattaaaaaaaaaacaaaaatgttactaaacgcgccctaaatttattcatgttattttcaggttgggtatattaatttaagaaaaatttacacaaaatactatttttgataatattttaacatttgtacggttaaataatatttttacatttttataaaatctctctcttcttttttttttttttaattttacgattctttatttatttttattttttgggaatttttcgccataaatatcatatattttcaattttatacacttatgttatcccgatttttgcccacctcacatggccttgcttacgtgggcaaaatcagctccacgtggcagtacaactcaccaacaagaagaccaattagttcctcagccaacaaggatctcgtcactcaaacgggacatcatgtgacagaccagcttcctcataaaagttggtcaaccacccctggtcagcacatggtcggtcagcgtgcttccagcaggtgtctggctagccagggtaaggccgggtaggattttctgtacaattctacacgtggactgcgaattgggccctaatagcccaataaaacagttagaaaatatctatatttgagggtattttagtgttttgtaattaactaatttaatatacaaatatgtaagggtttcggttgtaaattagggtttaggttttcttatataaaggccttaactctaacctaaaaaacctaagcctcattttagcctccaagtgataaagctctaagcctaagtctctaagtctaataactctctctctctctc

SEQ ID NO: 337217 - DNA, 704 bp, Cannabis indica
taaaatagtattttttgtaaaaaaatttactattctttatttgagtacttcccaattattatgtttgtaatagatatgtatatttaatattaagaatattttatggaaatggtcacaataaaaatacaaaaactactgacaataggtttatgttttttcttttcatctctttcaaatgggttttggttgggatttggtatggactaatccatattgactgtgaaatgtgaatgttgacagagttttttaatattcttattttatttttttttaacaatgttcagacgaaattaattgatatttagggcatttttaatgtagtggcaaaaatgtggtgtattattatattttagcacaaaaaataattttgtgataaatttatatcaaattttaggattgtgctttaatacacaattgtaaaactttgatgttaaatttaatacttaattaatattttcactaaaaaaaataaaaaactaataacttcattatcaattttattatattaatgtgtaagacaataaaaaaaaaatagggaaattatcccatacactattttcaacttttttttgggtttctaaagtgattgtaacgttagttgcaataaaggtttctatacgatttttttgttgcaatttaagttgcagctctagttgcaataagggtttttatatagaattaagtaaaaatgacaaaaaaaaaaa

SEQ ID NO: 337218 - DNA, 1522 bp, Cannabis indica
atgcgactagtgcagcgatagtgcgagaagagggaaagtaccagcaacatgtttactatgttagtaagaggttattgggggaagaattgaggtatccccctcttaaaaaacttgccttatgcctaatctacacatctcgcaagctacgaccttactttcaagcccatccgattaaggtgttagctgatcaacccctgagacatattttatcaaaaccagatgcttctagaagattggtaaaatggtcaattgaactgggtcagtttgacataacttatcacccacaaacatccatcaagggccaagccttggctgatttcctgatagaaggaataacttcaaaggaaaatccacttgtttagggagacgcgaatacttggagattatttgtggatggcgcatccaaggagcagggctcgggtgtaggggtaatattaatttctccagaaggcgttaagtttcattatgccttgagcttccaattcaatgcatcaaaacatgaggctgagtatgaagccttgatcacttgtttgaggatagctgaagtgttgaagataaaaaatctcatgtgtcataatgattcacaattgattgtaaatcaagttctcggggaataccaggctaagggcctgaaaatggctaagtatctagagaaagttcagaagaacttggaaaagtttgattatttcaaaatcgagcaaatcccaagagaaaaaactctaatgtcgatgccttagcaaaactagcctcgtagaatgacttggatgaactaaacttggttccggtggaattgttaaaggagccaagtatatgcgaaaaaggaagatgtcaagatgatagatagctcgcccacgtggatgactcctataatcaactatctgctcaacggataacttccaactgacaagaatgaggcacgaaaactcctgtattaagtgcctcgctacaccatagtagatggcaagttgtatagaaggggctattcaatgcctctcctttggtgtgttcttcctgcagaataaaacgagatcctcagagaaattaatgaaggattttgaaaatttttaaagtggtgggtttgcaatatatcaataaagatcatgacaaggacattattggccaacaatcaacaagcacacccatgaatttgtaaaaaagtgtgataagtgtcagagattctcgcatatacctcgcgtaccaccaacggaactgagaatgatgacctcaccttacccatttgctatatgggggattgacttgattggggcacttcccacagggcgaggaggagccaagtacgcagtggtggctgtcaatttctttactaaattgacagaggctaaacctctagtttccataacctacaagaaagtcctagactttgttgttaaaaacattatctacaggtttggaattctaatgaagataatatcagaaaatgggattcagttcgatggtggattattcattgagttctttgaaaggaacaagataattaaaagcttctcgtcagtatccaggc

SEQ ID NO: 337219 - DNA, 1060 bp, Cannabis indica
ttcgtcaaagaggtttagtcaagactttgtaattacttcatataaatgattctctttattcataactaaagttgaatgtttacatcacatcatttatttatcgatagtagggtcatgaatgttctacgttccaatagttctttattagaaagccatcaagttgagccaatttatagactctgactccaactactgcttcgatgaaatatggaccctcccagttcgggttgaacactcctggtgatgcatctctcgtatttgcaaagactcgtcttaacaccaagtctccaacattgaataatcttttcttgacttttctgttgaagtatctggtgactcggtgttggtatgcggcgttggtgatttgcgactcaacttgtttatcctcaagtaaatccaaggaccattttaaaagttcctggtttttcttcttgattagaaaactctcttctgtgagttgatatgttcacttcaacaagcagcattgcttcgagccaaatgctagcgagaaaggagtgtgtcctgtggctgtcttcttggtaattctgtgggcccaaagtacatgaggtagctcgtcaaccctctgcctttggcagcgtctaacttcttcttaatagtatcctttaaggttttattgatggcttctacttgtccatttgcctgaggcctaaatactgatgagaagcttatgataattctattcctctcgcaaaattccgtgaacaagtctccatcaaattgggttccattatcggatactatcttcatgggaattccaaacttatagataatgttcttgacgaaaaagtcaggactttcttgcaggttaaggagacgaggggctcagcctctatccatttagtgaagaagtcgactgctattaccgcatacttagctccacctcacccagtgggtaatgccccaattagatcaaccctcatatagcaaatgggtacggcgaggtcatcattctaagttctgttggtggtacgcgaggtatatgtgaaaacctctgacacttatcacatttcttgaaaaactcatgtgtgtccttattgat

SEQ ID NO: 337220 - DNA, 520 bp, Cannabis indica
ttactttttggcaactacttctgtgttggtcagaaagtaacactagtagttaataaattgttggtacaatgcaaaaaactgtaaagaactttccatagactaaatgagtgtctatcctgcaactttaacatccagtccactagtagagttagagattccatattggcttttacacttctccaaaatcactactcaacccttagagtaatcaccatctcatcagtagagtttttagcactaatgcaagtctagaaacctaatttgttgtagtctaagagtattaaaacaccacccttatcgtctaacatataatttctcttcttgatcttaagatttacttgattttcttccaatgttcctttcctggatggatctgatacctactcattactcctactcaacagcaggtgtctagtttaatgcatagcaaagcatatctgagacgacctttcactgtttatcctaaggaattattttcttggcctttatcttttctggagtagttgaaatttttccttag

SEQ ID NO: 337221 - DNA, 917 bp, Cannabis indica
atacattaatgtttataattttgatattgtattttaattaaaaaaaatcttattaaattataataattcatactaaaatagataataaataatttatcttttaataaaaaatatttaacttgtttatttttataaaaccgtttaattaattttacgaaattgtttattttgaggtttaataaacatattaaaaatgtatggtttcatgtaataagttttcaaaatgtataaatttttaaaataatttttttttgcacattttttgtaattattttatttttgttgtacatttatgaaaaaagcctttttttttaacctgtaatagcaggttacgaatagataaaaattttatttttagaattaattaattataattaactattttttaaataattaaataaatattaaacaagactttttttagcaattaaaatttataaataatttttttatttatataaaaatccctactataattattttaacaattaagtcatttaattataatatttataatttttttgtttacaaaaattaaatttatttttatataaattaaaattctgtctttataataaatttataaataattaatttttttacaattacgagagtaaaaggagggaagttaatttttaaataattaattttttacaattacaattctgtcgtgtttcaaatttttattttatgcccaaccatgatgtttcatttatccattatcaagctcgattaattttatttttaattttaatttatcttgcttcacccactttttaatattgattatttaggaaaatgaagaaaacgagggaaattaatttattagtgctatatgtttatgtatgctttggtggacataatgaaagattttaatcaggttttattatttctagctgttccaaaaaatagaaaag

SEQ ID NO: 337222 - DNA, 1164 bp, Cannabis indica
tgggaagcggccgagcttcactcactttgacttgccctcaccaactggagaacatcgtggaggtggccggtgttaaacccgcgacgtccgggacgtaccaccggccgccccgtgatgcggacgcccaatcacaattacggaggcttcggtgcttggagccagacgcatttgatgactggggctatgcttccccttcaagattatttcattaatttctttgtatttgtcggccttgcgccataccaacttattccacaagcgtaccgcctgctttcaagcttatttattttttactccgcccggggatggggctctcccagtccggcggagattttgtatttttacgaacttgtttctgtccccaaaaaggatggtttttacagcttccgggcccacccttcgaatgagggcgtggtcccttacaaccagcgaaaatacgtcaaggagtaccgccatcgctttttcttctcctccaggttccgagctgtggagcacccggagctccttacagagtgggttaggatccctccgtacgagcagaccgcgcctactcagatctttcttcagcgggctaggaccttcgcgacttatgatagggcggatctcaatgtcgggggattggtcacgacggagaactgccggaaggccaagctgatcctggcacaccaatcggtggaggactccaacctttctaaggtcatctggcgtggagaagaccttccgggatgagattattgaaaccgcggaaaagaagtacgaagattacctctaccggaaggcccaggagaaggcttatactaaggcccaggcgacttccgggaggccccttcgcgttgggagcccggttgagagaaggagccaaacggctgccgggagatcccttcgcattgggagtccggttgagaagaaggctcccaggccaaggcccatcgtccaggtgccgaatacaggggctcccgacgctagcgctttcggctctggtaagtctcctttatacattacgtccctcctgttagcgaatatgcaagccttaggcctgtagggttcgatgaacgtctccttaggtttaggatgccctcgacccgggtgggggatcatgcaaaagattattatttctccaatttaagagattattaggtcggtcccggatgggttcaggacctc

SEQ ID NO: 337223 - DNA, 338 bp, Cannabis indica
tgcccgacaacatggaacgcggtgtatggcttagtagaatcacaatttagtattttagtttagtgggacggtttagttagacattgggaatgtcgggattggtcaggaatttagaatttcccaaaataccctttgtacccctattatgtcattttagtgtgtgagggcaaaaaggtcattttgcacatttgtgttttgtcttttagtggggatttaatattgggttttaaatctgatttttgtgattattagctgatattaattcaagttaatcctttatttacttcatttcatttatttttcaaaaataagaaaaattggaaaaaagctttctctct

SEQ ID NO: 337224 - DNA, 614 bp, Cannabis indica
agaaaactcaacatcccgtgtacatgttagcaagcgcatgataggagcggaaacaaggtaccccatcatcgagaaactagttttctgcctcctgatggcctcaagaaaattaaggccatatttccaagcacatccgatcaaggtactgaccaaccacccgctccggcaagtcctccaaaaaccagaagcatccggaaggctcctcaagtgggcaatggagttaagtcagttcgacttacactacgttccccgaatctccataaaaggccaagccttggcagacttcattaccgaatgcaatgaagccgaggcaaccgcaaatgcgccaacaccatcggtccccacatggagagtgtttgtggacggagcctccaatgaaaatggatccggagtaggggtggaaacgatatccccgactggactgcgactcaaggcagccctacggttcgacttctcagcttcaaacaacgaggtcgaatacgaggccttgatagcagggctgaggctagcgaaagccgtaggggccaaaagagtggaagtctacagtgactcccagctggtcgtaaatcagatatcgggagagtaccaaacacgcggcaagcgaatggccgcgt

SEQ ID NO: 337225 - DNA, 957 bp, Cannabis indica
tttggtagaaaaaccctaggttattttatgcgggttttagacaatgttttggaatagtctcttattgatttacttttgtcgtgacataggacccgagactgcccagcatcgttccactcaggtcggcccgcacacttgagtttcgaattgaggtaagaaaagtggttagcaccgtatgtggctaaatgttagcggttgaatggttatagccttgattattatcaagattcgaattaaatgttcattgagtctcggttgtgatcgagggttggaagcggttattaccattatgagtaattagtcatgaaaccgcagataggttttgtaacgccctaatgctaaggcatgctacaatgctttttcaattacagttttatctttgctaatgaaagatttttttctcgaaaaacatgtcaaattaaaactttttctaataaatattaaactttataatttacataattattttcaaacaccgagatcccgtttctaaacttttatacaaaatataccaaaatacaatatccaggtcgcacaacgactaaaaaataaaatccccagatgtcatgagaccgaacactccaagtcacgctgccacgacatgtacaatcccatccaagccaggctaactcctgttcagcttttgcctttcctttacctacacatggaagcagaactatgagttgacagactcagtaagaaaagcatataacataacatatagttccgacttatatctaggcgcccatacacctaattacaaggctcaacagatgagtaagaacgttccatactagggtacaaccactataccacatacactacttaccttgctgtacaagtgttggtagggtttgtttggtaccctgagtaccactgagtgatataccacaaacaccctgtactttcccatacttgtgctggtatcactgtactgtactcataaacaatattcac

SEQ ID NO: 337226 - DNA, 658 bp, Cannabis indica
atttatacattaaacatataattatgaaattaatcatttgaaccatgcaacataaaattatttttaatattttattaattagtaaatctaattatattgaaatgagttttatttagggcataaaatcccaacaagaatttcattctaataatgatatccctaaacctagaagtttaaaagaatactaaaattcaaaagcctacaaatggataattttagataattctggccaaaatggtgagaaattagaaacctaatggatcagtacatatatcagtcagaagttaaaaaaaaaaacatagtgtcttctaagtctcagatcagtcaagaacaaattaaaaaacccaaaatttacagcaaaaagttcaaaaaataatgcatgtattttaaggaaattgcataaaagaaaagaaaagataacttactcactattcactgattcctgagtgtgctcttcagagattgatttctagtaaaatgttcttcaaaaatttgagagaaaaaaaagaaggatttttctctggttgtacgcaagaataaaaatagctaaaaaagtgaaaaattaatttttatcgtttatataggtgatgaaaagggctgataaataattaaaaaatttaaatttttgggttttacccccaaaaagaaacattagtac

SEQ ID NO: 337227 - DNA, 908 bp, Cannabis indica
gatgcgacaccctgtggatggtgcagcgtggaaagactttgatgccaaacatcctgattttgctagtgaacctcgaaatgttcgtctcggtttagctgccgatggctttaatccatttggcaatatgagccaagcttacagtatgtggcctgtagttttggcgaactataatcttccaccttggttatgtatgaaagataataattttatgttgaccattctaattcctggagataaatcacccggaatggacatagacatatttttaagacccttggtggatgagttgaaggagttgtgggttaacggagtagatacgagagattgtcgaaccaacactgtcttcaagttgcgtgcagctcttttgtggacagtgaatgattttcctgctcgtagttatttgtctggttggagtggtcagggatataaagcttgtcccacttgcaatgaagatacatcttctattcgagtaattggtaagacatcttacgtgggtcatagaagatttttgccaaataaccatcgaatgagaagggatactcaatttgacggacaaattgagagaagacctcctccaagacgttttacttgtgaagaagtattagaacaagtaaacaaactcccaccccatctccctggaaatcatgagctctttggtggtgtgaagcgtaggcgagttgcagaaaatcataattggcggaaaaaaagcatcttctacgagcttgactattggtgttcaaatattcttaaacacaatattgatgtcatgcatgttgagaagaatgtttgtgatagtttattgggcacaatattggacaatgagaaatccaaggacactaccaatgcaagacacgatttaaagaagctaggagtcagagaatcgttgtggatttatgaagatgagaggg

SEQ ID NO: 337228 - DNA, 528 bp, Cannabis indica
agacaagaagaaacatgtaccagcagtctccgcagagacactgaatgaaggaattctagctgagctagcaacgctgcgcaaagactttgctaaggtctcccgaaggcaaaaaggggacgactcagattctgattgcgaggaccgagagccatgcgcccgacacatattggaggcagagctccccaagaattttaagatgtttgagatggcagcgtatatcggagactcggaccccagcgatcatttatcccgtttcaactgggtaatgacggttatgagggttagcaataatgccaaatgtctatgctttccattaacattaagcggttccgatgaggaatggttcaaaaaatttgaaccaggattagtggactgttggaagaaactacaagtaagcttccagaggcagtttgtcgctgcaaggaagattaacctcggagtcagcgccgtgactaacataaagcaactgcccacggaaaccttaaagaacttcataaaaaggtttaaagaggaagcttcaaagaccaa

SEQ ID NO: 337229 - DNA, 655 bp, Cannabis indica
tcagattttaaaatttattaattcctttaatgtttatatattatttaattataaggttaaatattttaatattgggtgtattttaaattaaagatagcattacctttttaatttgaaattttatattaaaattatcttatatgacaaattaaataattaataaatttgaaatcgaccaagatattttttttatagatatcctaaccataatatttttatattcaaaattggttattttgtaaaatatttaattatttataaatcatatgttagaaaagtgatattttggctatattatatcattttactttataaataatattataaatagttaataacctagatattttttgtagaaatttgaaaaatacttaatttgagatattttgacatatagtttggataattattatttgtttattattttattcttaaactaataattgcataaccatatttattttaaaattagtatattttgttctttaattttattaaattataagattagaaaatgatactaaaaatacctatttggttattttcaaatcacttatcttattagatatttactttaatttaataaaataattcaaataaagttatatatattttaaaattagtttgttcctgatgtgataatcagcgatgaagt

SEQ ID NO: 337230 - DNA, 1251 bp, Cannabis indica
tctaaaatctctatgccattgaccgagttaactaagaaaaatcagagatttatgtggtcagacaaatgtgaagcaagttttcaagagatgaaaaaacgtttgataacgactccggcgttagcattgccatcatatcaagaaaaattcgttgtttattgtgatgcatccagaaagggtctgagatgtgttctgatgcaagctgatagagtcatagcttatgcctctcgtcaactgaatgattatgaccagcgctacccaactcatgacctagagcttgctgctgtggtttttgctttaaagatacagcgacactatctttatggtgaaaagtgtgagatttatactgatcataagagtctcaaatactttttcacccagaaagatttgaacatgaggcagaggaggtcgctggaacttgttaaagactatgactgtgaaattctgtatcactctcggaaagccaatgttgtggctgatgctttgagtagaagatgtcccgggcaggtttgcaccacggttttgatagcccctcaactagcttctgaaatggttagtgcagggattgagtttgtagttgggaagttgcacaacttgacactccaatttgatctgttaaaaagaatcagaaaggcacaactagaagatcctgagttagtcaagattcgagatgaggtaatggctggttggcctaaagacttttaagtctcaaataatggaatgttgttatataaagctcgagtgtgtgttcctagtattgatgaacttaagaaagagattctggatgaagctcacaccacaccttattcactgcatccgggaaccaccaaaatttatgaggatttaaaaccatatttctggtggtatggaatgaaaagagttttggtggactacgtgtccaaatgcttaacctgccaccagatcaaggttgaacatcaaaggccaacaggtttattacgacctttagtccttcctgggtggaagtggcaggacattgtaatggattttgtaactggtttgcctagaaccacaggaatgtatgattcggtatgggtcatagtggatagatttacaaaatcatctcactttctgccagtgaaagttacatattcagtggaccagtacgctgaactttatgtaaaggagatagttcgtctccacggagctcgtaaatccattgtctcagatagggatccaaagtttacttcaaagttttgggtgagtcttcagaaggctatgggtaccaagttaaag

SEQ ID NO: 337231 - DNA, 1023 bp, Cannabis indica
aattaaatatgatttaattaatgaaatttaattactataaatacaaggcagatttgagaaatcagaacacttccctgacacttaattttcaaaattatagagagaaaaaggactttgatttttctctcatctgttcttgctcatatgttgagaactcaacaagaacaaatctatgaactttattctaatagtccacagtattccttgtgtgtagtagaacgatttggaagacactggtgtgagtctgattgcatcatcttcattatttggattaagggatacaacatacgagaagtttcaagaatatcttgatagtcttcaagagatatattataaacttgataaatttatattttgatttaatgtacacaaatctgaagatctattgtgatatggtacaatgacaatcaaataatagaatctattccactgcgtacgtgatttagtaccataaaactaataaattttcttaacaaaataaaatcacattaatcaacagtttaaataatcaatttaaaaatactaacacaagtaaatgagcatatttataagataaacatgaacttatcaaattctctcacacttgactcttgcttatcctcgagtaagttgatgttaaaattaaatgagtccttacatattggtctttatgaataaaataatcttggtttcaaaaattgtacctccacgtataattctaagaataataattaataattttgcttcttgaactttcaacgatactaattatgccatttaaaatatacagcttgtttaaaattttccataaacttttatatttacagaagtttagtcattctgtaaagtttcgtcttattattctgtttaaatgctaatgtgtccttgtaaattagcatttttgttccccaaactttgacaactatcaaatcgtattccttcaaaataaaaatgagaaagattcattattttttttagtaaatcttaaaaaattaattttgatcttaaaaaaattattttgaatgattaagaaaattaaaattt

SEQ ID NO: 337232 - DNA, 726 bp, Cannabis indica
aatttcataattaatcataaacagctgctaatttccaaattaactaagcgggctttacagcaagggtacaaataagagagattctacgcatcatacataaaattcgagcaagattatttcccagaaaactcaacattcaacccagatactctaaacatgcagtacaaacaaacagcagacaagtataaagtttcctaaaaacttacatgaagttcaaaggctgggggttggtgtcgatcgtcgatatagtgaagactgacaacgacgaagaaaaaggagcagataatctatggtgtctggaatttcttctctttgaggaagctctgagaaaatgtggcaagatagcgaaagtaaccaaattaaatgagaaggctggcttttataggccagaacgggtgtgaagcagctgtgatgaagcttcatcgtacggtgagattagcaatcaattcgcattccacagatctaacggttgggacgaacgcttagcaaggcggttgggaacgcttgagtattcgactgacacccattaaatgcgccggatcattaaatggataggaaatgaattgttgcctgcaaaaagtaaaagctacaatgataatggtcataaatgcactcccacgcgcccaaagcacgtgctaggaagttaataagacaaccagaggcacctaagcaagcctcgtttacttccccccaaacaatgcttgggagtaaatgttgcccttaatt

SEQ ID NO: 337233 - DNA, 561 bp, Cannabis indica
tagaaatcaaatttccctttagtttttacccaaaataaataatgaaaaaaaaagtgaaggaaagtactttctataaatttgataagatagtttctaaaaatatttatgcaattttctaaatttcaaaaattactctaacctttttttttaaaaaaaaaaaatggcagtaaacgaaaaattttaagctgtaaatctcattttaattgggtataatttgctgagaaatactgttacagatcatgttgatgtataatttgtatacaaagccgagcaagcttagttgtgcgttctaaccgagccttacaaaacccaatcggctaagttactgattcttaccaagccttacaaagcccaacaggcgaagttgcgcgttcttaccaagtataccaaggccagcccaactccaaggttggaaaaggatagggtagggtgttgttaatagggaaatttacatggtatactaacttttgctatttttttacaaaaatactgtcaggcggtattttttacttttttactgtgttttttaataagtttcatactccagtatactgtgttaag

SEQ ID NO: 337234 - DNA, 756 bp, Cannabis indica
tcaatacatcttcaaccctcctttagaaggactgcttgaagtctatcacactcccagtggggtttcaccaccctttggtctttaacatgaaaccatcacttgaattttagtgtaactttagccttttttcacggaagcaaaagtctaccataagaattaacatggttctcatgaggcacgtaagtttttccgttcgtgaaagatcactgggggttcgatacgtcttcatgattgaacgtattttaccaagatctagatttactaacatgtatgtttaattaacacacaaaatatgaattctctaatacaatgagtttagaaaatcttacactgaaggcagatccttctgctcagatctcgaaccctttttcctttatgtcgtagagtaataacaagatctgagcttggatctccttctctcctttggttttgttaaccatcgtcttccgcactatgattaagtacttgaatttctatgtgtggtcatggtattctatcactaaatgtttgaatttgatggaagaacagcaagaggagttcaaaatcactatgaaggagtctatcatctactagttgtctaatagagttagaaaactagctttttggttggattgagttggatgagaatgagagcctcatgttccttttatagcatttcaactagggtgcaggatttaattatatggattaattaaaaaagaataaataatgggcaaaaatcacactaagtggtcgaccacttaatgggcctcacta

SEQ ID NO: 337235 - DNA, 1009 bp, Cannabis indica
tattttcagtctattgttatgtctcgtagagtttgttattttctttgtgttttaaactctgtattagattggttttcccttttaatgcaatgacttgggtgtgctaatagagagtttaaaacaaattaatcacagcaagtcattgcattaaataggatagggtgtaaataattataaattgagaaatgttgttgtgtttaatttttttttaatgaaaatgggataaataggaactagaatatcctaaaatgtaacttatttcttaattttttgtatctaaaaatatatgttaaaatatttttttaaatttttcttatttattatagttataatacttttaaaaaaaaaaattaaaagatttacagtgtcatttgaattttttttcaaataataaattatcatattaagaactctattgttaatacaataactattttaatttttttaaaaattaaaaataatactaaaagtataatgaataatactaatagaaaggtagaattatcatttttatccactaaacaaatgtaccaataatgactattattgactagtgaatatagaaacatggtctatgaaaacataaccaacttcaagtgatcataagtagtgttggcgcactatattttcattattaagatcatgtgtggttgaggttgtagcatgtggttattatgtaataatttgaaaaagaaaatcaaaatgtgaggcacaaaaatccaaatgcttttatcttctaatatgttttgtgtacatgtgaaacatgctacctatatataaagtggagtaataattgagaatgaaaaaaaatctctagaggatatttggtgaggtggagatattatgtgataaaatattgatatgttatattattaaagtgaaaataatactatttttgaaatttgtatagatgttatattgtagtattgatgttattcatttttttttaataaaaaattgaagtgaaaaaattattgtatctaaaaattaggatatatattaaataata

SEQ ID NO: 337236 - DNA, 590 bp, Cannabis indica
cttccagattgttactaatccacaaggtcacgcccatagataaaattcattaaatagatctcaaaactacaaagtaaggacttatgtataaatagactcactcttattgtatgtcgcaagcttgatgtattccaccttctaattgaatcttgttgaaacttcaagtactcgaactcccttcaatctccttgaagagtgattgcttcttcccgaggcaagacttaataaacaatctctcaaaagcttgtagaattttcttctgaaggtagcactgttgttcttcttcttttgcagacttgaatacagactcaagacaatacaaaatgcatataaacagagtaagagatgaacactctcttttctacaaaataaagacactattttcttaagatatgaatataattcaaagtgtatgaaagagatacatgacctagctgctataaggtgtatttataatcaatatacaccttattgacagctcacacacggtctgaacaagacaacaactcattaaataatttcctaaaatagatcttcattcacctcagaaatttttgtttccgtacttacagaatcgtgagcagttgtgc

SEQ ID NO: 337237 - DNA, 1079 bp, Cannabis indica
tgagacacttactgtttgaaatcgggttgtggagcgatgaacgactctgcaactggggatgaggggaacggcgcggtgatctctttgaatacttaaggtcgaaaatcaaattcgatgaaattcacaagaagtatgtcaaagacaaagatagcatgcaaagcttcatataatctgggtggagttttttgaagagaatctcaagaatttttgaaatggcaaagtgatgaaaaggtggttccttttttagttttataccattgggttgatctccgtcagattaaggaaaaaaatgatccaacgggtagaaataagagagaagtggaaaagatggttatttaatgctcatgatgtgcctcaaagccacaaaaccgccaaaatcaaaggcatgtgtttcttcaaaataaattatgacaaatataccctctgtaatcatttaaaaatcactttttattgaaaaaaactttttaagggacaattgttatacccgaatttcgactggtacttcaaaaggtgacacgtgttaatcgcggagaatatgaacgagcaaatatagtggcaattatattaaaaaaatattaaatggaataactcattaactgcagagtcaatatggtacatttataactcgcaatctgcacagtctttagtgagacaaggatgtacgaactattgactcacgtatgaacgagaaatcacttcgagtcagaggacgtaatcgcaaggacatccataatacatagcgaggcatttacctcgcaatatgtaaagaggtgttgacaaggcaaattggccattagaacacttagcgtaaaatatacattatattaactaagtgtaacagcttgaaggacctaaataatggatagagagacatccatctagctataggaacgcatactcctggtaaactccagctcgctgtcagggttattattactattgagaacccccaagacatgattgtccagtttgcaaggccttatggttaaagagcagttcttaagtttgctcagtacactggtgctcatgtcattgctggaagttatgaataaaccaagctattcatgtaccaagcgaga

SEQ ID NO: 337238 - DNA, 555 bp, Cannabis indica
atttataaataactataaaatacataattttataaaaaaaaaataaattaaaaaactctcataaatattaaaatagataagagatatattagaaagattattgtaatgtacttgtatttgtaatgaattaacctttgtaataatcaaatttgtatttttacgtgtgaaaagcgtacatgcttagatatgtatagattagattttctctatatgtttacttaatatagaaatgcatcagtatattcaatgtcctgaatgctcttatcttttattatgtgttaccttttgctagttaaggtgacaagttttgtatatcttttttatatatatatatatatatatatatatatatatattttgaaagaactacttgttcattaattaagaaagtggacggaatcacaaggggaataccctcccttgatacaaagagtcgaatcgctagtaattctagcatttttggttacaccatccgcgaacgcgtttagagtacagttaataatgtaggaatttggcttggtgaaatcccaaatttaccctacaccactcaagaaa

SEQ ID NO: 337239 - DNA, 647 bp, Cannabis indica
tacagaatcgtgagttgtgcgactttccttttatagaaatggaaaaatctaatcagacatattagaaaactaaaacaagatcaaatatatattagatagagaaaatatgagtcatcaaacttaccatttataccttattttctataaatacaaaagctaaacaattttccttccaaatataaatcaattaatacaaaaatataaaagccaaatagacaaaatatagaaaccaaataagcacctcaggcgaaattaaataataaactataaaataattttggcaaattaaagatgccaaaagtgtaaacatctttctacttttttgttaagttgtaatttttcgtttatttttagagattgtaattttgttgtccataacatagctaaatggacgtttgctaacaatgttactggtattgttgatccctcttctataccaaaaactatcatttgtaatgactataaagtttaacttttatttttatcaaaaaaaaaaaattgccaaaagtgaaattaatattttttataaaggttcacttcgtattctcttttgggtttcttttctggggtaagttgaaaaatgcttcttttattaatcaattaaccaaatttacctctaattttttttaattgaaacatatctcttt

SEQ ID NO: 337240 - DNA, 571 bp, Cannabis indica
gggtgctcctgatcaggtgccggtaatcctagtcatacaatctgagatttcacaaataggattaatccctaaatccactttcacataacataaagtttgctttcaaaatattaataataatatagagctcggaacgagctttccaactatataaagaacgtctaaaatggagtcttgagtcaaaagttatggccaaaataaaatcagaaaaaagatggctctctgctagattttatggccgcggcgaccataaatctggccgcggctagccggctactggttcgaaaaacccagaaaaccagaatttagtgtctaaaaatgctcacttttccatatattcgaaccttaatcaaaccatacccaaaattagcttcttacagataaaaatcatcacatcaaagagctaaaacatcatcaacaactcttaaaattcagattacacaatcaattcaaaatcatgcattaaaccaagaaaactcaagctcaagaacttgagcttcaactcaacaatccctatattttccagcaacaaaaacaacaatagataaaattaggtttaagcatgtaaaac

SEQ ID NO: 337241 - DNA, 646 bp, Cannabis indica
gctcaagaacttgagcttcaactcaacaatccctatattttccagcaacaaaaacaacaatagataaaaattaggtttaagcatgtaaaacatccttgaattgcactcaaagctcaaccaaacacaaattcctactcaaatatgcatgaattagcaaaatcacacctatatccaaatcaagcataacaagagcattcaaagcttaaaaactcacaagttcttttcaatttcagcaagaattcaaagcttaaaatagtaagaacactacctcaattccttgtacaaacactagcaccaacaatcaaagcttccaaagcaaaatgccaagcaaatttcttcaatttcaggtttgagagggaacaacccaaaaaaattcatttacttccctaaaaaaatcagcttttaccaagtatagaaaataaaggtcaaatgaccattttgcccctaaggccaattttcacctattcacacatacaagggcattcaagtcaattcatactcaattattttcaaataaaaattcagattatcacccataaataataatgccaaataaatcaatcaaatttacatttcgggcccgaacccggttcggcccgaaatacccggttgtgactataccgcgccaacctgtcagaacacacct

SEQ ID NO: 337242 - DNA, 579 bp, Cannabis indica
tctgatttggttttgcaaagcaacttctaattgtgcagtgtattttcgagccaatctcattgaaacctcaccaaaagttagacattatagaataaaaaaaaacctaaatttattaagttaaatataagtaaaagtttatacacgaacaaaattaaaaaatgcaactactctttatttatttattaaaatggtatagattaatttaactataatatatacaatagttttacttctgcacacatgcaaccccgtgattagagatgaaaatttatatcgcggggatggataatcgcagagacccgcccttaatggggtgggaattgccggcttggtagttaatgaggcgatagtgggaaacaatttcaatacctgaagccagatggggccggtgttagagattttattacaatagaaataaatcaagacattacaactctattgcaagataatacaaagaccaataaataaattaaaaaaatatcacgaaacatatactacactatatatatgtatttatatgtatattgatatatatatatatatataagaaatgtagaataagaagaatatgtatagaaa

SEQ ID NO: 337243 - DNA, 636 bp, Cannabis indica
ccagctggaagtatttttgtaatattgttacttttttggttaaaactgaaaaaatccctttgttaaaactctatcatgagattatgacatgtgatgtgtggcatatgtcatatcattagtggcaagcaatatgtcatcgacatatagaaccagaaatatacacttactcccactaaacttatgatacacacaatcatcaacagcattcatctcaaaaccaaataagagaaccacttgatgaaatttgtggtaccattgacgggaagcttgcttgagtccatagatggatttttttaatttgcaaaccattttctttgggtcaccaaccacaaagttttctggttgctccatataaattgtctcatcaatgtctccattgagaaacgctgttttaacatccatctgatgtaactcaagatcaaagtgagcaacaagtgccattattatcctaaaagagtctttcgatgaaactggagagaaagtctctttataatcaatgccttctttctgagtatagccttttgctacaagacgtgccttaaacctcaccacattaccattttcatccctcttggttttaaattggttttaaatatccatttacaaccaatttgttttacaccttctggtaatggg

SEQ ID NO: 337244 - DNA, 418 bp, Cannabis indica
caaacaaggaaaatggcaactaataaccgaataaaagaggtaagatttcgaaaatgaatgcaaagcaatcttaccataaaaaggaaaaattattttgtcacctaacttgccaaaaaaggactttacaggaagctccataatacacgtcatttcatgattaaaattcttttgttatttgtataattatatatttgttcggtaagtaatatattcgtctttcgtatataggcatcttattattttgttacactacaaaaaaactgctacttttagtgaaaacttttaagtcacaacataaattttttgtggctaaatgtgacttttagttgtgaccaaaaacacatttagtcacaacaaattgtaatttttatgactaaaacttttagtcacggaccttttagtcacaacacaataataa

SEQ ID NO: 337245 - DNA, 422 bp, Cannabis indica
tgcacagtacgttaaaaatcatgctaacatgccttaaatagttagggtgttacgtagagtaagtaaactactaggtataccacaagccacaggtttataggaactggaagttttgttgcgtccattgaatagacttaattttcaaaatttcctttcttgtcattgtaatagaaaacttttggttactccatatgaatggtttcaactatagttctcttggctttacatcttagtttcttattcagactatccattacttgtttaaactaacaatggattttaatcacaagtgtcttccaagtcataacagggtgagttccttgaaaccctcccactaagactaagtactgtgacttactgtctaagaacataaatggtattgtcctcttcggttgtgtcagtacaacagaagaagttggacc

SEQ ID NO: 337246 - DNA, 520 bp, Cannabis indica
gttgttaatccaacatacttgttagtaaatctagatcatggtaaaataattcccaacatggggtacatcctcttggccggccggaccccttgatagcctcccttggtcggctaggtcttgcacaagaccttcttggctggctaggacctgcaccgatcaaaacttgtgtgtttttttttcatgaaactcaaacatgctcttcgcgttctccgtgttctttttgactcaaagagccaagactcacaacgaatgtcaaattcaaatcttttttgtatagaaatcacacattatgtatcctaaggctatcatgcgaatcaaaataccgaaaggacaacaatctaacataggaatcaaaggatgttcaaagcaataaatagagttcatgcattcatggtaaaaccaaccaaatcacaggaaataacgagaatagaaagcgtaccaactacaagacaccgttgaggaacaatgtgggaagcttagatcgttgaaatggcacaaaaatcctaagagaatgtttctt

SEQ ID NO: 337247 - DNA, 457 bp, Cannabis indica
tttacataaaaatattgcataaaacataattcaatataatacaatactgttggaattaaatccaactaagtctttcctaaccataagtcggttacatgaaaagcaacttgcacatctacaacaacctaaatacagttacaataaaagatcctaactgaaataacagaacaacagaagatctatacctgccagatcatcacccaaaaagctacttactctactcctatcccagctgtatatattgccacttccagtttcgttttttgctcagatctgaagacatagagagtgagagaacctgtaattgctctgagttcaaagataagaactcagagttgagaaagagataggagagtgtgaatctaagagagttcttgagagagaaagaagtagaaactagagataaacaaaagctgtaaaagatacgagtctaccagttgatctgtagctggaagct

SEQ ID NO: 337248 - DNA, 634 bp, Cannabis indica
gaggtgcatgttctgattgttttttgttttgagttaatacatttatttcaaatcaatagcctagccctaataacctacgttgttttgatccgataattgagaaatatattgtaatactttaatttgtgggaataatcaatatatatagctttaataagtattagtttaggtttacttaatttgtttgtctaatctgataatctaatggcagagatggcagatgtggttgaagaaattagtgatggtaaatctttgttagcagcagacacagaaaaaaaagaaacagatatatcatacgatgaagaagaagaagatgatggttatgactctcaagatgaagattttattcttgttgaagatgaaaggataaccaaatcaaggtattattattattattatgattaattgcttttctctttttctctttttatgattagtgttatacttattattattagggaaaataaagctaagttaccaccaaacacaaaattttcatacttatccgatgaagatgatgaatatgaacaagattgggccattgttcacaaacaactccttcaaactgatgtatgtactattcttatttctagatctctctttctccaattctacattcattattagatctaat

SEQ ID NO: 337249 - DNA, 656 bp, Cannabis indica
agatcttgcgaactgataggggtggagaatatatggatatgcagttcaaagatcatttaattgaacttggaattgaatcccaatatactgccctaggcactccacaacaaaatggagttgcagaaagaagaaatcacactcttttagaaatggttaggtctatgcttaaatattcaagtctgtcaacatccttctaggattatgctattcagatagctaatgacattttaaatatcgttccatctaaatcaatccccaagacacatgtagaattatagaatggtcgtatacctagtttacgctattacagaatctgggggtgccctgctcatgtcttacataagaaagaaggcaagctagaagcgtgaactgaggtttgcatgtttctaggaaattttaaagagactaggggtgggctattttatagtcacaaggacaataaagtgtttgtttctacaaatgccactttccttgagaatgactatattaaaaactctaagccacaaagcaaagtagtattggaggagatgctttcagaattaactctaacaaatgttccatcatcttctactcaaataaaggatgatcccactccctcgattgaacctatgcaagttgacacaattgaggaaactaccactaatgttcctgttcag

SEQ ID NO: 337250 - DNA, 537 bp, Cannabis indica
aaagcacgatttggtacatgtcacagttcatgggacaaaaatcctaattagcttatatttaatcattagataatttacaacactaatttttcagtcttgtagtagtaatagagtaatagtcatacatgagagttttgtttaattagtaataaaaaaaaagagttttgttaaatttataaaatcaataatatatagttgtatatattggagaatgaatgaacctgtaatggctagaacaatgccaccaagagaaatccaggcgtccttgttgtttctacgaaaataatcgactatgtatttgggatttatggctttgaccactgaaggatcaaatttgacaaaattgtagagaccaatgccagagatgagtgcaaaccataaacaaattatgggagcaaaactatacccaactttgtctgttccaaatctttgcaccatgaaaaggcatatcaaaatgcctactgagatccaaacaatcatatctgtaataattaccacaaacatatataacaatcattattcaaaatttacaactaa

SEQ ID NO: 337251 - DNA, 1378 bp, Cannabis indica
atatagtatataaataagaatttataaaaacaacacacacacacacacacacacacacacacacacacgtggcgtccctgttggacagggcgttacaggtatgcaactcatgactaagagcttgctgtagaggtatttgctttaaagatctagcgacactatctttacggggaaaagtgtgagatttacactgatcacaagagccttaaatatgtctttagccagaaagatttgaatatgagacaaaggtggtggttggagcttgtcaaggactatcattgtgaaattctttatcatcccagaaaagccaatgtagtggcagaagccctaagcaggaagggtcccaaacaagtatctaacatggttatgatttcacctcagctagcagatgacatggtcaaatcaggtatcgagttggttgtgggaaaacttaataatttgacattacaattagatttgttagacaaaattagaactgcccagctagctgatccaaaattagtaaagatctgagaagaggttgtaactggtcaagctaaagacttcacagtgtctaaaaatggaatgttgtatacaacactcgagtttgcattccaaaaaatgcagaacttcaaaatgagattcttgaggaagctcacaccactccttatttattgcattatggcactaccacaatgtataaggacttaaaacccttttattggtggagtgggatgaagaagaatgtggtagaatatgtatctcggtgcttgacttgtcaacagatcagggatgaacaccagagacctacagggttgttgtagtctttgacacttcctgagtggaaatgggaggatgtcaccatggatttcgtggttggattacctagaaccacggggatgttctgtaacgccctaatctatagggacgccacatgtgtaattttataaactagtttaatactaatagattaattagttaataaaaactgcgataatattaaaaatttgactaaattaaaagactaaaactagacattataacgacataaaaagcgtgttccggggatccctattataaaatgttttacctaaaagactatagacaaaagcaattctaaacacaattcaaaatataatagatacaaccaatccaaaacaacttctggcaactcagcacgcaggccgatagggtcaatatgtacattgctggagaaggcagtcacctcacgacaactctaactttcccttgcccttactagtaccacatagcacctgtgagtcacaaggactcagcaagaaaagcaataataatgatcatgtagtttaatattcaaatatccacagttagaatcaaaccattacgcattgttcataagatgaaaatccaaatcactatt

SEQ ID NO: 337252 - DNA, 1073 bp, Cannabis indica
tgtgctcagggttgctactgtcagtcccctcactgatactaccactagcaggaggatttgataccatgacggcatcccttgcagcctgctctttaattacttactgctcggcctcctcgacaattaaggccaagtctaccactctcttatacatagtgttatgtgatgtggtaattttcaagtcccgactgattgtagcattcagtcctcgaacatacttctatttcctagtgaaatctgtgggcaccagatcaccagcaaatttagataacggtcgaattcaagagtatactcggccacagacatctttccctgagtcaacttcacaaaatcttcttgatgtgaagtcctcatagcaacattataaaacttttcttcaaaaagtttcttgaattcttcccacgtcataacactgatacctcgggtctgacccactatgtcccaccaaacgccggcatggtcttgaaacataaaggccgcacaattcaccttctcagttcccgtcacctccatattatcgaggatactggtaactgtgctcatccactggtcggccttaataatatcaatacgccccagaaaagtcgaaggttgcagcttcacaaaccgctcaaacacagagtctcggtgcaacataatatacccttggttacccaacactggcacaggtgctggtggtaacccttgatcaactggggcaccctgttgcctcaaacgttgcaactcttcctcttgacgaagtatgatacttcgcatttcttaaaacatctggtgccagtcagcaggagaattagcattaccagcccccgcattatccctcggatctgcggaggtggaggcagtgcttgtggatcggttcgggtagccccaggctctacttgctcgccctgtggtctagatgattgcggagggtccattcctagtacccctgtagtgaacaaccccagcgacttaagcaccaataccacacttatgcacttattgccttaaaccctaactcatctatttccctcataaaatattcacataaacaaatagcatttaaagcatggcatcacataacacatacatac

SEQ ID NO: 337253 - DNA, 1368 bp, Cannabis indica
tcagggggaaagaacagagcgtgaagaagcaagtgtgacctcgaggcggtcaagaactcacagtcgatcaaccggaagaggagaaagtactcaacgagctaatgatcgagaaagtatgggaaccagtaactctgcgggccactcaaagacaaagtctatgagtaggacgcgatcagcgagtaagacgaggtttgccagcaattactcccaatcggatttgcgagagaacttgaattggaagaaacctgaccttcgacaacagctttgccataagcaagaggatcccatccaattacggataaacgagctggaggacaagttcaagcgatatcaagtgggggaattaggcagacaatatggatacaactctaacaaggaacttgagccgtatcatccagatataatgaatacccctttttgtttgggattcaaaaacttgcacgtctcgtcatatgacggaaccactgattcggtctcgcatttaaataactttaacacaataatgcgagcgagtaatgtgatgaacaatttatgctgtattttgttccccacttcccttgttggagtagtgagtagctggtttaacaagtttactcatcattcaataacctcctgggagtagttgtctagggatttcaagaaacaatttcaggttgctagggatagacgacccgaagtggcctcgctaaccaatataaagcaacagctcggtgagagacttaaggcgtacttaagtcgttttagcacgactgcagctagggttaggaatttggatgatagcacacaacttacagcccttcaggtggggatttttactgatctattgaccgcagggggcgagtggtgggatggcttacaaggtcgtccagttagaagcatcattgagttcaatgaaagggctcaggtatttgttcgcaagaagaagcacgaaaaaaaatgaatttattgaaaacaagctcgggaagcaaacccagcaatgtttcaacaagtactatttccacgagaattgataactcgggggcttctagttcgaagagaaaggacggtaccaagcaaccgtcaaagggtaaaaagaaatagaagaagcattatatgtacgtgccagtgtatgctatttatactgagcttaatgaaactcgagagaatatttacctcgcacatgagcagaaggttgccttcggcaagcccgagcctattaggaattcaaggagcaaaagagatcctaacaagtattgtaaattccataaggatattgggtatacgaccgacaaatgtcgccaattgaaagatgagatagaaagtctcattgcacgaggccatttgaaaaagtaacgtgaaaagcagggtcatggatacaaccagcccagt

SEQ ID NO: 337254 - DNA, 514 bp, Cannabis indica
aattatactgctaattatttttgtttagaaaaaataccatcataatttattttttaagataatcattttaatatatgagaagcatatataaaaaaaataaaacattattttaatttcttttatatttagctaaccaaatagtattttttttatttttggcttaatataaaaaagagtaaatgttttctttaggagatatggaaagtgtaactaaatggctttaaacaaaatgtattataccaaatagtttcaaaagttattaaaaagtattttattattttagatctaaaagttacaatataatattttaaataagtctgttttatagattaactttgatgaattattaaaagataggaaacttactacatagtttataagaaaaatttataaacatattaatataacaattagttgtttattaagcggataagatatatgagttactttttataaaaatatttactttgacttttttttttcataaaaaggcaacattttagttctttgatca

SEQ ID NO: 337255 - DNA, 733 bp, Cannabis indica
tttagagagagaaagaagagaactcaaaaattagagaggagcctctcttttcaatttgctgatacagtagacttatgaagagttatcaggctatgagtctgtcatgttctatttatagactttcatctagggttagatttaaattatatagattaaaaaaaagataaaaatggcttaaaattcacttaaggggtcggccacttagtggaccccactaaattttaattttcccatttatttaataatttatctttttcttacacaaatgtcatattttaattttaaacattttaatgtcaaatatatttatttaataattaaaattaattatcaaataaaattttcatttaacttatttattaattagaccttacaaagtatcttaattaacaaataaactcaaaagcctcttttcttctcaattaagctattctttaatgaaaattcataaataagagatagtcttatttagaattctaattggtaattaaaactaattaactgattctacaagccaatattatctcaacatgtgtggggaccatgtgcctatataatcaagcttccaataaataaatccaaaatttaacaagtaaaattcttaacttattaattccttctgactccacaatagatttagaattgcactcttaattatatagaatgctctatatgtttcaagacatagatacgctattaattttctattgttataatctaaatgatcaaagat

SEQ ID NO: 337256 - DNA, 865 bp, Cannabis indica
aacctcatgatttcaggaaaaaacgttgtaaagattacagtcaactttgtaattaattcccttttatatgattataaatagtggcaagtaagatcaaaaaaaggatgaaaaaatcatacaaaaaaggccctgaaaaactatcagaaatctaataagattgactcgtggactatgcagaatttaactgcaaaaccacgtaaaaaatcctttgtggtaatactttttaattttacaacttttatctttctgtgtgagattatcactattaggctcaaatttggttaacgaaaatctgcattaagagtttggtgctttcattgagagcctttgtgaaaaagctcagaaaaaaccctcttttctttagaagaaaaaccatctccttcatggctgaaaacccagaagatgttaatacaccacatgaggaaactcatcaccgttctgggaaagagcccatgggcaccaaaaggtcttccgatccacagtctagacgggccacccgctccaggaggactcaacctgagggtggccctagcactcggaccacacattctcagaggacccaacttgacgttggtcctagtacacgaacaacacgctcgaggagaacttagcatgagaatggccaaaatctaagaactacagatgaggagcccactcgtggagatactcagcctatgggagaaggcacttatgaaacggaaaaccgccgccttagacgccgcctagaggaggcacagcggcagaacgctgagttagaacgtgatgcagccgcagctagggcgacgcagggaactaacactcaaaatcaatttgaacctggagtgagaagaccacgaggtagacctcatggctcacgaactaggag

SEQ ID NO: 337257 - DNA, 986 bp, Cannabis indica
agatgcttgaagctctgaagaaaagagttaggggaagctcaagcccatctccttcggccaagatctctagaggcagtgagtcaacactatccagagagaaggcactgattgaagctgctatcgatctatccaaggagctaaccgtggtagacccttctgctccaaaacctgctaagtccaacgtttctcgaggaggaagctcggataggcacgagcagtcgaagggcggatctgagcaaatccgggctcctaccccacctccatcactgcatccggagaccaaaagaggcaaggagatgctcaccgactatatgaatcggtcgccccctgaagtgaatgagcagttggtcggagctgacaacgagccttctctagagctgttgatgggaggagtcctgaaggtgtttacgaaggtgagtctttcgtgacagtttcctttaatccttccttacttggctaagattctaacattttttctctgtagagcctagtctaaggatggcttacacttattctcgagctaagtctgctgcctccaagaatgctaccgtgtccaacaccatgaggggggaagtggacttggccaagaaggacgctgatgaagccagggttcaactcagagccgtccaaatggaactaggtgaagtcaacaaaaagcttcttgctgccgagaagaagtggccgagctggccaaagatttggaggcttctgaccaacttgaggctgccatgacctccttgtccaaagaagtgactgacctcctggaagagtctggttcttcgaactgttttccgcaggttggaagcagagaagaagtccaaggaggaggagcttaatgctgaggtagaaaggctcaaagggatggtgaacgccttagagatagccggtctcgagatttttcacgccttttggaaggctaaccctcaggcgaattttgattacctgggcgatgccaaagacatgtatctcgagtactgtgcttccca

SEQ ID NO: 337258 - DNA, 622 bp, Cannabis indica
acatgtatctcgagtactgtgcttcccaagtggcctatggagaatccgaggcaaccacttctacctctggcctaaacgttgacgtgcccccccgtctagaaaacagatcctctagctcctaccggcccagaagacaagtacaaggagccttggactccagccgtctgaacacttatttgcttatctttcttctttttttatctgctcgacaataaggcctttttgtaagacatcgtgactggccaagcgttctttaaacttggaattatttttcatttttcagacaacaggctgaccgggcagcttttaatcccagcttcacgtgctttagttatctataatgaatttcattcactgtttataatcatagtgcaattgtatttgttttatctttaccaaatgctttgtacaggtataggcgcccgcaagtgactgagcagacttatgagtcttggtcacttgttactttttgcaagtatgcttttttgtctgttcggggttttgggttcgaccaaaccttttgtacgcattagatggtaaattaacaacatcctattaatttcgactcaatttgaattttgaaataaatatctttattcatttattgatcaaaaatgtgttt

SEQ ID NO: 337259 - DNA, 680 bp, Cannabis indica
tctctctcatttttctttctttctttctctctgcgtttagctcgacccaacgtaccgaagggttatctccgtccatccacggccaaaatggaagccacgaatggcttctagcgccgtccgatgacagaagaagcaccaggtccagaaagaaggggcaggctggtttgttcttcgtcggtgacccgtcgggctggtatcgactcgatcatcgtagtggtggtcttcgtggagtctcgaagaggcgacaatggttatgatgatgtcgttgattatgatgtctggtctgagcaagagagaaaggacagagggaggtgaaagaaagagagagagagggcgaaagagatgtgttttaggtttaggttagtgttttttttttaattttattttatgtttttttttggtttttatttataatttgttttatattttttatttcttttatttgtcattttttatttttaaattaatttattttaattttaatttttttaaatagatatttacgtggaccaataaaattattctatgtgtacacatgaacagtccaacatggcacttaacacctaaaaatagatggaaaaggctaagtactaacaaaacatggatttaggggatttaccatcaaaattttaaaattgggggttagttgcaataaactaaaaacttatggaggttatgcc

SEQ ID NO: 337260 - DNA, 294 bp, Cannabis indica
gttaattaacaggcaggtagcgatcaaattgaaggttctcctcatcatgtaatctgataattcaatagcaactaaaattttaaattttggacatacttgttggaaacttcaaagaccatatgtagtaaaagggatgatttcaatcgcttggtaagtaactcattttatatagaatgattttttcaatatgttcataatattagtccaaaaatatattgtggtaatttgtattatatatatgggtttattcggatcaaaattcgatagtttgatatttttaaaaattaatattta

SEQ ID NO: 337261 - DNA, 506 bp, Cannabis indica
gtttgcctcctccaaacgtcactagagttgacagttttccaacttgacgaacggtacgtatcttgtagggtcataggcaccctcactcataggcgtagaaccaccagcatttgtgttgggttcctcattcccagtctctgggttctgatcattatcacgttggcttcttctcgaatgttttgatcgtgttgaacacgttgttcgtgaattgggtggcctacgtgagccctttggcacttttccgggacgacgagtagtctcatcatgatgattcgttttccccattatcatccattgtgaagaaattccttctttggttaggagagatttttctaagattttatcacgtaggctctcaatgaaagcaccaaactgttaacacagattttcgttaataattatgagcctattttcgtaatagatttggcacagaaattatagaaatctaagaaaaataatagaagcaaaaataacaccaggtttttacgtggttttgcagttaactc

SEQ ID NO: 337262 - DNA, 1455 bp, Cannabis indica
tatataatttataaaaattaaatttaattattaaagaaatatagttagtttagtttacctcaatgtacataaatagatgtgtattattatatatgggttgtataggtgtattctatttcttatatttatttaaaggctatgtgtaggaattgtccctcaaattaatacgattatcaaatcgtcttttgaaatatttatttactattccctttgaactatgtcacaatgctgaaatataagacttctaataagttttatccaatgtgactaataaaatagtaatgggacttgtgtgtcattgtcacataagtgccacatgtataatttaaataaaaaataatttcttttcttatcaataattgataagaaaatttaagattaatttatttttattcatataatttagggtaaataccattttgaatcctgtattttgcaaaagttactaattggaatctatgttttattaatcacaaaatgtaccatgtatttttgaaaaatgtacaaataggaccctgaattgattttttgtcaaaataaaatttaataataattttatctaaagatgttataacaaatctagttacattttctgtatctgttcgtgttagaaattatcttaaagttagttatattaaaaaataaaactgttaaaaattgagtttaggatcctatttttataccattttggaaaatatagggtccattttgtcatttaacaaaacagagggtctaattgataacttttacaaagtagagggtccaaaatagtatttatcctataatttatagttaataagaaaatattttttaaaattttaaattaaatatgtggcgctgacaataacacatcaactacattgacatgttttagcagaaaaaatttcaaggggtacgatacgatcattgtaatagttcaaggttataaaatttttaaatagcctaattttattaatattttctaaaaagaaataggtaaaaatacaattcgcttgaccttcctatttggcccctcctcgggtttttgtctggttccgccactgcacatgtgataaaatttgatagaataatcaatttacaattacaacattatgaatagttcagaggctatttttaacgggttaaaaaatccaaagagcacaataattcatagttcatagttcgggaactaaaattctaaatagccatataattatatgccattgtcataaaaaaaatacaatgtatttattgattattatgcatgtaattaatattgtataggtatacgtagtgaaatacattgactacaatctactcaaaaatatatgtgggtattacctatatatatgggtgcactcttaatgggtattacccatgaataggtaaagtagaaaattttgaatttttatgcttaatttttctatctaattaaaattaaaaaatctctcatttttatatcatataggctaagat

SEQ ID NO: 337263 - DNA, 870 bp, Cannabis indica
catactagttacctgcccgggacccttcctgctcagggcattagccactacattggccttcccaggatggcagaggacttcacaattgtaatccttaacaaattctaaccaatgcctctgcctcatattcaaatctttctgagtaaagatatatttgaggctcttatggttagtattaatttcacatttctctccgtagagataatgcagccaaatcttcaaagaaaacaccaccgctacaagttttagatcatgagtcgggtatcgttgttcatattccttcaactgacgagaggcataagcgatgacccgatcagcctgcatcagtacacaccccagaccctgtctagatgcatcacaataaactacgaacttttctttattaaaaggtagggctaacactgaaattgtgatcaatctctatttcagctcctgaaatcttgcttcacacttgtccgttcataaaaactactgattcttttttgtaatctcggttaagggtgttgaaatcttagagaatccctctacaattcgacgataataaccagccagatttagaatgtcttcctctaggattctcaagtgatgatagcccgagcggagatcaatctttgaaaagaccgtctttccttgaagctgatcgaaaaggtcatcgattctaggtaagggatacttgttcttgactatcagtttattcaattctcggtagtcaatgcacatacacaatgatccatctttcttcttgacaaatagtacaggagctccccagggtgacacactaggccgtgaaaaccctatgtcaagcaacccttggagctgaattttcagttctttaatttcagctagagccattctgtaaggggccttaga

SEQ ID NO: 337264 - DNA, 921 bp, Cannabis indica
atatttctagaaaaagtattttcacttaaaatataataactctctcaattctcttccatttttaatgacctatatatagttttaaagcttatttgattttccaaaagtttcatgaagaaacgttttactaattcgaagtcatactatgtcaaaaagttagtttgttctgtatcatgcaattcatttcttaaatcttgttcttacaaaactgttttagtaaaattgtaatatctctttgaatataattccaattttaaagattttggtgtcattaaaaacataatttatttatctaaaactttcatgaagatattatcctctagttctgaacttttcaatgccaaaagtttatattttcgctgagtcgtgtaattcattactccatattccttgtcagaaatagtttcggtaagactatgataactctctcagttttaatccatttttagtgatctttatatcattggaaagataatttaattgcctataaattttatgaagacaactttcactgaattagtgtagtagttggtcaaaaatagtgatttttctagtgtactgtaagagtacgaattttaatattaggaccttgacccatgtcttattataggtagtagtgacaagataacaagtcttaagtagcgggacttgaggtaagaaaattagatagttttgtatgtgtttatctgcataaatttagattctttgtgtattagaatatgatttatgatttgttattataaatatgtatatggtagtgagaatgtgtggtatggacacaatatgagtttgtgaattgatatatagactatagttgttatgacttgtatatgttgtatggtgtatgttgtatgttgtatgttgtatgttgtatgttgtatgttgtgtgttgtatgctaacgtctcatttaaagtaaggga

SEQ ID NO: 337265 - DNA, 712 bp, Cannabis indica
catcctacacaagccagagctttaaggaagactcaccaagtgggtaatagaactcagtgaatatgacattacattccaaccaaggacagcgatcaaatctcaggtattagctgactttattgctgacttttccagtgacatgtaggtacatgcagaaaaagagttattgtgcttgaaagagcaatttgactctaagtggaggttatcagtagatggctcaagaaacagcagaggatgtggcttaggcattgttctcacctcaccccaaggagatgtcattcaacgagcaatcaagtgtgacttcaaggcaacgaataataaaacggagtacgaagcactccttgctgggcttgacctcgccaaagagatgaatatcaaagctcttgagatcacatcagattcccaactcatagtcaaccaattcaatggcacataccaggccaaggactcaaagatggtgacgtacctccaagctgttaaagaaagactgttgagctttactaaaagggaaatttacactaatatatacattatataattttattacaatatatgtgcataataatttattttcatctaatcatacattttatctattatgaagaaaattattttcaatttattatacaatatataaatggtaagtatttgattatttgatttattatcactcattattatacttattgaatgatgatatattaataattat

SEQ ID NO: 337266 - DNA, 878 bp, Cannabis indica
tgcgtgacttattcgcatttttagtactatctctactcgcatattgatggggtggtcagcattcgcaaggatgctgaccattctatcaagtgcgactttatagttttaatgcgggtgagatcacttattttgctttcacacattcaccacgctgaaaagatcttctatctttcagatgagcgacctgtcggatagtcaactgctcggctcgggaggccacgcattcgatggtgacgaggaccaggaggaagatagttttctcccagcttcgatttcagaagaggagatcgcacctactgtaggtatagagctgggtccgatgtcttctgcggacatcgagagaatggtgcaggagctcgctgaacctgggaccatcgatattcgagacagcgagtctacggtgtcagcccgcgactaccttattcattcgaggcatgctcctgacgtcgaggtcgaggagacggatgacgattggacggccccagctcgcgaatcaggcgaggatgaagaagaggcagaagggagcgggactgactcggtcgatgacgcccagctgaacgagcctttctcgtgcgaggatttgatttcgagagttaccaaatcagacctcactacctttacgaggctaaacctgctgcgacttgcttctttgcgacctaaaccgactcagagggcgcaccttccttttaccaatcctgcgattattcccacagaggatgtggtaatctcaatacccattctccgatgtggggtatcagtcctttccatccctttatcgcggccatccttaaacgatatgatgtatcacctttccagcttactcctaatagttatcgcactaccctggccttttatgcgatgtatatggagtacgttca

SEQ ID NO: 337267 - DNA, 811 bp, Cannabis indica
aaaagttatgaattttggaaaaagggttgaaagggtgtcgaggggtgcacgacgcacgcaccagtcactcggacaaggtgctcgtgcatgagcgtgccttagacatctcattgtctgaatgcgcccgtgaccttggttctccccccgtgcatatgctgcgcctgccgaagtttgccacatagagaggctgcaaactcccctattccgcacgcgtgccaggaaatttggagcccatctgggctgcacgagcagcctcctcacccaacccgatttttgtgggattttttccccaatttcgatttttccaattttcaaaccccaaaattaaaataaattattatttttaatatatttaaacttgaatatcattttttaaattagtaatatttatttttcaatagattattattaattttgatattttgaggtttaaatttaaaaattgattattttaatttttaaattatggtcagatttaaaaattggttaatttctttaatatttatatattatttaattataagatcagatattttgatatttgatatattttaaattaaaagataactttatttttttattttgaaatattatattaaagttatcttatatgataaattaataaattaataaatttgaaattaacattgatatttttatagatattctaaccataatattttcaaattcaaaaatttgttatttgttaaatattaattttttataaattataagtttaaaaaggatattttactattttatatcatttaacttattaaaaatttataaattatattttaaatatttatat

SEQ ID NO: 337268 - DNA, 1140 bp, Cannabis indica
acccacggcgagcttggccagacggtcaaactttgtagtatacttagtaaccaacatctcctcggtttgcaccaactcagtgaactctttccgctaagcactgtggacgacttcattgtaatatttggagttaaacaactctcgatttcttcccaggttataactgtgacgtcccgagtgagggttatcaactcccaccacacgagggcgtcctcctagaactgaaaagtggcgctggtcacccgatcattaccaaccactccggtaaagttgagaatacgttcaatcactgtgagccactgctcagccttcatcacattagacctcccagaaacactggaggtgcttgcttttagaacctttcgtacaacggttccatacggttgccaacaactggatgttctgcaggcaccgctggaactgcaaagacctgagcagcttactgaggaggcatggcaggaaaagcctgctgcctcaacctctgaatttcttcatcctgctggcggattcgatcttgcatttctgcaaatctctgctcccaatctggaggagcttgcggtggatttacaaggcgaccaccctgagctctgccacggccacgaccgcgaccacgaggattctagggatttttatttcactgaccgtctccggtctcaaccatgttaccctgacatcgcgtatttcgcggggcgtccattttataggacttagcctgcgaacccataagccaggcaggttagacagcgatcataaaacttaataccgcttttatgaacttaaaggcaacacacttgaaataattaaaatctaatatgcttcctagcatggtttaataatcatttaaaatactaaacaagtacgggcttactaaaccgtgaaccgagctttctctgatgaaaattgtacatgtcttagcaacctttggtagacaaacctgaaaactctgataccaaaattgtaacgccctaatgctaaggcacgctacagtgctttttcaattacaacgcaatcttttctaatcaaagaattttcttaaaaaacatgtcaaatttaaacttttatattaaatattaaactttatgcatatcaaaatatttacaagtgccggccggatcccattttcaaacttctaaaacataa

SEQ ID NO: 337269 - DNA, 1322 bp, Cannabis indica
gattgggtcttctgggtctcggtcccagttctgatgcccgtttctcgagtccaggtccctcatcttggtccaggtcctaggtcccggtccgagtctaagagccggtcggggttcaactcctggttcgagtgtgggttcaggttccgatctcggtctgggtcctgatttgggttcgagtcttggtccaggttcttgtttgagtctcgagtttttatctgtgtctggatttcgaggagtaggtccaggtccgggtcctaagtctcaatctgggtccatgttcgggtttgggtcctagtctcagttttgatttcgattcggtgtttgggttcaggtttgggtcctgagtcctggtttgagtctggatccgagtctgggtccaggcccagatgccgctctgggtcttggttcgggtccaggtccgagttcaggtcccaagtgttggtccaggtctaggtctaggtcagggtctcggtccggatctaggtcccaagtttcgatcctggtctaggtctgggtctgggttcgagtctaggttcgtatccaaatccctatctagctttaagtctgggtctaggatcaagtcccaagtctaggtttgggtccagctctcggtcctggtctgggtacacaatagtgtctgggcctgagtttcggtctcagtttggttctggggctatgttcgagttcggttctaggtttgagtccaggtcttggtcactatcctagtcttgttcgagggtcctagtctggcagttcttgtttaggttcctattttgggtcccgagtctgggtcagggtcccggtttgggtccaggtccgggttcgggtcctgttctgagtcccaaatctggatccctgtcacgtgtcccggtctggttctggttcaggtccccggtcccaggtccgagtttgggttcgggactgagactggggtgcggttctaggtcccggccccgtttctgtgtcccgagtctggtttgacgtttggttctgagttccggtccagtgtcgacaccgagtccagatctgggttgggatccaagtctggttcccggttcaggtctaggtctgggttggagtctgggtcctggtccggttatagtttcaggtctacgtccaagtctggtaacggttctaggtccaggtcaatgtcttggtttcggtcccgttcttgggtcccaatctacttctgattttggttccaatttcgagtcacagggtacaagttaaggtccaggtttggatctggtactgggatcgggtccaggtctgggttcgggtcttgatctaggttcgggtccggcgctggttcccaaatccag

SEQ ID NO: 337270 - DNA, 2676 bp, Cannabis indica
caggattttatcaaaaattttggaaattggtaggtgatgatgtggtgcgattggtttaggtttttttcattactggtgagttcccttctgttttgaaagaaactaatattgtccttatcccaaaaaagaagattcctgaacaaatgggagaccttcggcctatatcgctctacaatgttctctacaaagttgtttctaaggtgattgcaaataggcttaaagttgtcttgccgaatgtcatatctacgaatcaaagtgcgtttttgccgggacagttaatttctgataatattatgatttcttatgaggtgatgcattacatgaaacagaagagaaagggtaaagatggttttgtggcggtcaagcttgacatgagcaaagcctatgatcgagttggttgggcttttcttgaagctatgcttattcggatgggatttagtttgagatttgtcgcacccattatgtattgtgtgtctacggtaacatatcatgtcacttatggaggaaagaaattgggaccgattgtactagcttgtgggatacgtcaaggggatcccatatctccatacttgtttttgatttgtgctgaaggtctctcttctcttttaactctgtatgagcaacgtagatggttgactgggtgtaaagtggccaggagtgcgcctcgggtctcacacatgctatttgctgatgatagctatgtgtactgcaaggctaatgtgggtgaagccacacatgtgatgcaccgtcttcaaatttatgagcaagcttcaggacaacagtgaattactcaaagtcttcaattcttttcagtaagaactgttctgttgatactcgtgctagcctatgtgaacttatgggaatggtggaagctggggataatagtttttatcttggcttaccttgcattttgggccgtaataagaaagccatccttggttttttgcaagaaaagatgaaggagaaaatttttacttaggagagtcgtttcttgtcaaaagcgggtaaggaggtcttattaaagtcggttgctcaggcattgccttgttatgccatgagcgtgttcttgctaacaaaggagatttgctctaatcttgaaggaatgatggcaaagttttggtagaaatctcaatcaaattcgggctcaaagggcgtgaattggataagttggaagcggttgagtagacataagactgatggagggatgggcttagggaccttcgagattacaatctttcattccttggtaaacaaatatggcggctaatgactaatgaggattccttggtaagcaagatttataaagcttgttattatccttcgggtagttttcttaatgctactttgggacaaaacccaagttttatttggaaaagcattttggaagcacaagggttagtcaaagctggtgcaaggaaatctattggaaatggaaataatgtgagtattctcttggatccatggcttccagatccttctaatccctttattttatctgatcatcctggtttagtgaatcaaaatgtctctagcttattttcgatgtaatctaagagttgggactatgatattatcaatgacctgtttgatgaaagggataagaaccttgtgttgtctatacaactgagtgcgaatgcaacggatgataagtggtatttgagtgaagaagttaatcgtctatacactgtgaagagtgcataccgaatgctgcaacaagattctggtgtgcatgttgctgtggaagatcagactttattcaaagctatatggaagttggaaattcctccgaaagtgcagcattttctgtggcgtgttctagttggatgcctcccaacaaaggttcaactgagcaccaaaaagattaatgtcgattggtactatccattctgcaactcggcagtggaaactattagccatgtcttgctcgagtgccggtttgcgagaagctgctggtgtgtctctattgtccctactggtgtggacagtgttggcttcaacagatggctttctggtctaaccgtgcatcactctgctgctgttgtcaaagaagcagcttgtgtcagttggaagatatggtctgttcgtaatgagctactatggaataaaaaaagttgttctgctattgatgtggtccgatcggctaggatagtgcttgaccaatattgtactgctcaatctcaaaagacgggggcattattaattgatgatattaataatgtagatgagcggtggaagaaaccaaattcacatatggtcaagattaatgtcgacggggctatttttcaagaacaaaacaagtttggctttggatgtgtggcccgtgacacgaatagaattctccttgaagctatttctgcatctcgatttggggttgttaagcccgaaattgccgagactattgggattaaggaggccttaagttggatagagagaaaacaatggtccagtgtagtaatagaaactgatgctttggtggtggttcaagctattaacagctcaattttaatgccttctcagtttggtttacttgttggtgactgtcgggccttaatctcgtctttaaataatgtttctttaaaatttgttaaatgatctgcaaataggactgctcattgtcttgctaggagtcttatttttcgtcagattgtgtttttaatcagcataatgtttctgctg

SEQ ID NO: 337271 - DNA, 852 bp, Cannabis indica
attcgacaggaaaacatgtgtcacgatgaaaaaaatgtgaatcgatgcaatatctttttatggaataactcattaattacgtaagtattataacccactaactgtaaagtcttacgtcttaggcgagaaatcaatatacaaactgacacttagtatattagcgagaaaccatatgtcgctaaaggtgaatcgcaaggcaccgaaaaaaagtgacacataccttagcttgaaataagcacactaaatgtaaaaatcagatcgacttaaagaacaagtatatgcgagataaccatctcgctgtgagaagacttcctatatctttattcaactaacaggagcgaggctcataaccctagcaagtcagaagatttctttatacccgcgatcgatgtaaaacatacattgtcgacctcgaaaagaagaatagtcccaactcgctattgggatcattataatcaagtttttctgtcgagacatctccaggttcagcaattaaagacgtgtttaatacacgatatttctgacccagtaaaagcgggaaaatcacagctttatgattttcaaaatcataaaccgcgtttacattacaaaatatgtaattaaatctcttgattttagggataaaaactgtaaaattatttcggtcaactttgtaattaattgcccactatgtcattataaatagtggcaagcaatctcaaaaaaggcgaaaaaaactcatatgaaagagtccttaaaaaaatacttagaaatctgtaagattgactcgtggactatgcagaattttaactgcaaaaccaacgtaaaaattcctgtgttcaatttttatttttctatagcttttattttttc

SEQ ID NO: 337272 - DNA, 779 bp, Cannabis indica
tctaccaaactctgtggtataaatacactaaaataaaacttatactttggctcttaaacatacaccatataatagggcttgtcccaagcttcgaaacggtatatacaacgtccaaaacagatacccgagtgaaaagttatgataaaaatattatttctgatctcctatgaatttctaaaaactatgaaacacgaaaatctcaattttttcactcaccgaaatactacgaaaacttatccaaatcactaaaaacttcacagggcacatatataccatgaatactaccattattacataacataaattaaaattgagcccttcaatggaaaacgccattaacgctcgtactaagctttaaaaagttgcaaactcgatttctaacccaaaatcacctcaatttcagcaagaaaacatcgaaactagtcccatgactactgaaaacaatcctctaaggtcagaaccttcataactattctaattcacaaaacccctctacgaaaccaattgttattaaccttaaaacgaaattaaaccttaccttaagcttctcctctctgggaattcgctatcctgctactaccggagcttaaaccgctaagttttttattgaaaatcaataaaaatggatataggggagaaaatactgttgaagggggaggaacgagggttcgttctctgttcgaagatttttattttattctgattaagttatatatatataacttaatatatatataacgtattttacttttttacgttaatattattataataataat

SEQ ID NO: 337273 - DNA, 612 bp, Cannabis indica
actttggttatggtgaatgggcccgaccaacgagacttcaatttgcccggaaataacctcaaccgcgagttaaaaagcaaaactcgctgccctttctcaaacactcgaggttgaattcttttgtcatgccacttcttggtattttctttataaagtttggcattctcatacgaaaacaacctcatttcctcaagctcattcaattgtaactttcgagcttcccccgccgcttggagatccatattcaacttcttcgtggcccaataagctttgtgttccaattcaacgggcaaatgacaagccttaccataaactaaacggtaaggagacatgcccaaaggagtcttgaaagcggttctataggcccaaagagcatcatccaaccgttgagaccaatcttttcgagtaggattcaccactttctccaaaattcctttgatttctcgattggaaatctccgcttggccatttgtttgaggatggtaagctgtagctatcttgtgcttgacactatacttagccaaaagagccgccaacactttgttaacaaaatgagttccctcatcactaatgagagctcttggagtcccaaaacgagtgaagacattcttg

SEQ ID NO: 337274 - DNA, 922 bp, Cannabis indica
tttgggtcccggtctaggttcgggttgtgtcctagtcccagtttgggtttgggttcaagtcttggtccttgtccttgtcctggtcattacctagtccgtttccagttgtagttgtgattccaagttcgagtttgggttagggttcgagtcttggtccgagtttgagtttgggttcggatctcgatctaggtctagatcgggctctgggtgtgggttagggtcctgggtctgggtcaaggttctggtctgagtcccaggtttcgatctcgatctgagtttgggtttagttttcggtgtaagtcttgggttctgatcccagtctgagttcgaggtttggtccgggtgcaggtctaggtttgggtttgattctgggtctgggtctgagtttgagtcccaggcttgggtccaatttcggcttcgggtctaggttcgggttttctccgagtctaggtcttggtttgggtctaggtctggataccagtctggatcttggttcgggtcaaggtccgagttcgtgtcctaggtgcggggccgagtttgtgtcccaggtgcgggtttaggtttgggtttgggtcaagatctcggaccagatcttggtcccaagtttcaatcccggtctgggtttgggtccaagttcaggttcttatccggatccctatttgggtctgagtctatgtttgggatcgaatcccaaatttaggtccaactcctggtatcggtgccgatctagctacacaactgtctccgagcccgagttctaatctcggtttgggtctagggctaggtctgagtttggttctaagtcaaggtctgggtcttcgcacgatccaagtcttgttccagggtcctggtctcacggttcttgtttaggttccagttttgggtctcgagtctaggtttgggtcagggtttgggtcctggt

SEQ ID NO: 337275 - DNA, 524 bp, Cannabis indica
aactctccgccaggtaatagggttccaaaccttgattcataactatcatacggtctacccaacttacttaagattgtggctcccacataagaatgtgtggccccagaatcaaacagcactgagtaatacgagttattaactgaaagctgacctgttacaactgaggggctgcaatctgcatcagcctgcgtgatggcgaacactcgagctggagtgggtctcgccggagccctcggtgcctctgatcggagctggggacaatccctcttgtagtgtccgggcatgccacactgaaagcatccctgacctttgcactcaccctgatggtgccttttgcaactggggcactcaggataagaaaaccgggtctctgcaccaccctgacggctacctctactctggttcccccggaacctcttgttctgactcgagccaccggatgcagtggatgttctcctcttctagtccatggccgaaccactacctcccctgctaaagcctgatgcaggaggggtaggagcccc

SEQ ID NO: 337276 - DNA, 562 bp, Cannabis indica
tatctgctattgtatgttgatgatatattggttgttgggaaggaaaggtctgaaattgacaacttatagcaactattgtgtaaagaattcgaaatgaaggatctgggaacagcaaagaggatactgggcatagacattagcagagaaagacctcacaagatcatactatctcaaagcaactacctcaagaaggttcttgataagttttgaatgttcaactccaaagctgtataaaaaccattagcacaacatttcaagctatgtgctactcaacctccaacaactgattctgaaagaaaacatatgagtaatataccctatgctagatgtgtaggaagcctaatgtactcaatggtttgtacaagaccagatattgcacatgcaatgagtgttacaagcagatatttagcaaatcctggtgtaaaacattggtctgcactcaagtggacaatgagatacattaaaggaaccctgaacacaaggttggtattttatagcagaaatcaaatacatggtgaagtaacttatgttgggttttatgccctaaataaaactctgtttc

SEQ ID NO: 337277 - DNA, 535 bp, Cannabis indica
attataaaataggattattgtttaaagtttttttttaaaaaataaatacttaaataaactattaatttatattaataaaatttttagtttgattttaatagcgaaataaaaatattttaagttatatatgttctgttgtcagtgaagaccataaaacgtgaaagacatttaataaattttaattggttgtgaccaactcaacaatgaacatccacaaaatatgtaattttaatatcaatttaaataaaattaattttacatattttaatttttaattgttataataaataaaattatctataattgttttttttaatagaaattatttataatttaaaatatttaatataaaattaaaaaaagaggaattaatgaaaaattattatgcaatattttaagaaaataaagttgaagtaagccaatgtcttggagaatggaaatacatttcaatccactgttatcatcaatgtcacgtaatttgttttacaaatttattatcttttctctaaaaacttgaaaggacaactataaaaaa

SEQ ID NO: 337278 - DNA, 599 bp, Cannabis indica
gcttctaacaccgaatctgtcctgatcttttgagtcttaacatgccagcacccagtggaaatctcaacacttacagctgcaatacctgcatctcccttgaaccatgaagcatctgaaaaaataacattgcacctctgcctgtttagtgatccatgatatccctctggctcttgaataatgtatgtgcatcatgcttcagagagtccccccttctttgatgtgaccaaattctggagttctgcataactcttttcaattctagccactgcataggaaagattgatctctgcattccgaatgcagaaggcattcctttgaaaccagatctcagagaacatgcacccaatgtagttaatcaattgcttcctttccacacctgtcaccaattcaattataccttccaacatactaatgagattgtctcctgggatgtcatctattctgaagagaatcttcctccaaaccagatggcttttgaaaactacaacttctaaacaaatgaaaagcattttcctcatcagcttcacaaatgttgcaggttttatcatgcaaaaagtgcaaccggttctttgtaggaatagctgttggaaattatttta

SEQ ID NO: 337279 - DNA, 991 bp, Cannabis indica
gcacactgccacagcctatgtggcgttgtgtgcgagcatcgactttccaaaacgcatgtgttcaacactcatcaccaacatcgtgcatttctaggagagatgtgacatcacatcactccatttcaaattggtgtatcatcaaccgaaaataactaattgtctaatatttgtggggtatttgcctagaaaaaagggaattgttaaagatatttatttacttgtaatattttattcatgaaaaatagtggtatatgagatttgttaatgagatacccccaatgtgtggggatcactaacaaaccctctagcctacatatacatcaagtaggaggctgagaaagtgatcttcttcttgatcttctttttggaccccttttctctcttgtttggatctttctcttcgtgacctttcccttaaagttcacttgacagcaaccaagaacaccagattgattccttcatcttgttcattgagtccaccatactcaggcgacgccagacctcaaaacactattgatacacacctttctttacaaattattggtttactgttcccaagaactttacaaccattaatttagatcatattcatgaatatctagtctcctatgagtcttatattcataaatctcgattaagatttcacctagaaatccttgactgtacttttatccacactcttgagaacataactctggtgtttcaaatctaatcaataaaattacaagtagacgtagccccattaccatcgcgacatgggagtgaactactataaatccctggagtccatttaatttattgcagatttattagtcagattaattcaccgtggtcctcttttattttacgatcctcttagatcagttgacgaaaaactgcgtcaattaactcgattagagtgagattgtcgctacaataatctgagaaagagattaatagtccttggcggtgcaaaactattgtaaaaggtttggaaataccttggtgaaaa

SEQ ID NO: 337280 - DNA, 1002 bp, Cannabis indica
cagaacctacttcactacggatgcatattttagatattcaaacgtttgatctgactgtagtacaatatatcgcagaacttactaaattgctagtaagtaactaactatagtatactaaatataatttgtaattaaattgtagctaattttactctaaattataaactatataacaatcggcactcctcacgcatccatgatttatccataacaaaaattagcaaaaaatcctaacaaccaagtttaagagaaacttatatggaataattttatcctaattctactaaaatttcggcaacataatggatataactgaacattctcaaaaaatttaaagttattaataacaataaaaaataatctaaaataagataaaacaagtgatgatgacttagatgatttctaatcatcattacattttccattaatattttaattcaagttttatgagtcaagtacgttctaggataatagaatttaggaatatagttctagaatataattatctttactttagtttaagttttataatacattggtatgtttgaattttatgtggcattttattcatctttaggtattctgaaatattatttcaatataatcacgcctcgaaacttataaaattaataactagtaactatgtataatatactaaattactaattagtaactagtcctaattctattgaaatttcaacagcataacgactataattgaatgttctacaaaaatttaaagccattaataacaacaaaccacaatctaaaataatataaaacaatcacaacaacatttagcaatacaaaaatttaccacccattcgaccgcagtatatgtattcgcagaacctacttcactatggatgaatatgtaagatattcaaatttattctaacatgcatattattccaccccatctgtccggccattacaatatatcgcaaagcctacttcacacggataaatatttaagatattcaaactttactaagcattcat

SEQ ID NO: 337281 - DNA, 1044 bp, Cannabis indica
ccgaacgacattactttgtaacagttaaaacccatatctgttcaaaaacttgtatgttctaggtctagtagatgcattctgatttgattatacctcaaatagacatccataaagctcaggatttcatgtctggctgttgcatccacaagctgatcaattcttggaagtggaaaacagtccttgggacacgccttgttgatgccagtaaaatcgatacatacttgccattttttgttcggcttgggtactagtacggggttagccacccaaaccgggtagaaagcttcaatgatgaacttgttttcgcgcagtctctctacctcttcttttagtacttgcgcccattctttgtgtagtagtcttctcttttgctggacgggatgaaagtttgggccaatgtttagggcgtgagacattacaatgggatcaatgccgaccatatccttatgtgaccaggcaaaaatgtccaggtttcctctcaaaaattttattaaagctaattttacttcaagaaacaaacccttaccaattttgagtttcctggtcgggatatttgggtcgatttccacttcttccagttcttctactggccctacattcgcgtttgttttcccaacttggggatccatatcttctttcccgccttgggtgacttcttattgggcaatgctccttcgcttgcccgaactctggccggaggtattcgttaggaatattttaccaggatctagatttactaacaagtatgttgatcaacatcctaaatatgaatatctataaaacaatgaaattaagcacataagggtttaagaaaaccttacattgattgcagcggaataataatgactcctttcgctcatatctctaacccttgttcctttctgtcgcatagtattatcaagatctgagcctggatctctttctctccttcgggttagtttccaccgtcttactcactatgattgagtatttgacttgctatgtgtgggcatgacagtctttcactaagggatcgaatatgatgaagaataatgaaggagtttt

SEQ ID NO: 337282 - DNA, 980 bp, Cannabis indica
agatcctggtaaaataatatccaacaacttatgtctatgtaacatagacgtacatgttgcgctcacacgtctaaatacaataaggccttagaacgattcatctcggttctagttaccgagtccaacctggttatgccttgaacacataaccctgaatctcaatatactcatatatctaacatggcatagcatttacatgatatatatcactagggtaataaccctaggctattaaactgctcaagttagggtaataaccctaatcccggttaccaattactcacacatatcatttccagtataaccgctaccgcacataactctacatgctaactattgtcttacctaatgtcccacaattatagagattccgaatccccgggtgctcctacccaagtgctggtaatcctagtcataattctgggatttacacaaataggtttaacctttgattcaacatttataaagtatatacatggcatacaaaatatagataatcacatagagctcggaacgagctttccaacattatatagaactcccaaaacggagttcggatcacaaagttatgcattttctaagtttacattcgaatctgccgaaaaacacgagggtgggccgccacactcaaaagctatgtcgcgacacctgggttcaaaatccagaaaaccaacagcaagaacttcgaatttcagcccctaaactcattcaattcaacccaatttacaaccaaaacctaaaaccatcaaatagatcttctactaaataaacgcagagtttagaattcaatttcatgcattaaaatccagctataaaactctcaaaactaagattcaagaagagcgcaaaacttgagcataactcattaaaaatccatttttacaagaacttgaactcaagcctcaaacaactaattctagagctcaaaaacactagtgaaatccttttaaaaatctatccaaacctaacccaacacaaac

SEQ ID NO: 337283 - DNA, 880 bp, Cannabis indica
ttaagctccttgagttctgctggagccatcctatatcaagacctcccaaaaacaatagaggtgcttgctttcagaatctttcatacaacggcttcatacggttgccagcaacaggttgttctgctggcatccttggagctacaacagcctaagcaacttgctgaggaggcacggcaggaggaccctgctccctgaacctctgaatctcttcatcctgctggctgatttgatcttgcatttctgcaaacctctgctcccaatccggaggagcttgtggtggatttaaagggcgaccaccctgagctctgccattgccatggccgctaccacggggattctggggattttgatttccctgaccgcctccggtctcaaccatattaccttgacttcttgtattttgctgggcgtccattttataggacttagcctacgaacccataagccaggcaggttagacaacgatcataaaacttaataccgctctttaggacttaaaggcaacacacttaaaatatataattgaaatctaatatactgcctagcatggttaaataattatttaaaatactaaacaaatataggcttactgaaccgagctttccctaatgaagattgtacgtgtcttggcaagcttcggtaaacaaacctggcggttctaataccaaaattgtaacgccctaatgctaaggcacgctatagtgctttttcaattaaagtgatgtctttgctaatcaaagaattttcttggaaaacgtgtcaaattaaaacttttatattaattaataaacttcataatgtacaaaactatttaaaagtatcgggatcccgtttacaaacttttaaaatgtaatatcccaaaatacatataattcaggtc

SEQ ID NO: 337284 - DNA, 700 bp, Cannabis indica
ctccgtgctgcaatgaaccttgtattcaaagagcagcgacatcatttcattcagtggagggatagggagatggaaacattgaaggctcagcaggcagccatcgatgaccgaacaaggcaggatactgtactgacacggaaagcctattaagttgctaatcaacaatcaactgctacgtccagtatcccactgggcgacacagaagaaattctttctgggcatacaaaaagctgatttatttaatcatctttcatttaatcattaacttactcgaggacgagcaagagtcaagtgtgggaaaatttgatgagtccatattcatcttataaattagatcagtttatgtattaatattcttaaattaattctttaaattattgattagtgtgattttaatttgttaggatattttaaagactattcatgcatttagagtcttctggagggattttagcatattttggtggaaaatagtggaagccgacgagctcagttttacaaggaaaaacttaattacaaatttggacgatcttagaagcataactggacttggagctcaacatgaaacttttagctcaacaaaggatagtgtaacgccccgatttcccgagacgtcacactagctagtccgtttaaaaccatttattataaaaataataaaaaactaatttattgaaaataattaaagcatgagatctca

SEQ ID NO: 337285 - DNA, 1794 bp, Cannabis indica
tagggcacaaaacccaacattatggtctgttgaaaaagctggaggtaaggctagacggtaagctaccaatccaacctttttgagaattttgaaaggccttataaacttagggcgtaacttgacctttttcttgaaacgtttaatccccctcatcagagacactcataggaatacatgatctcctacctaaaattcttgatttctacacttcggatatgcataactctttcgcctattctaagaggcaagcattctggccttgatcttttctatagccttattggtccgttgcactaattcaggacctaaatatttcctttctccaatttcatcccagtgaattggagatctgcatttcctaccatataacatctcatagggagccatccctatagtacttgatagctgttgttgtatgagaattctatcagtaataggtacttgctctaggagccttcaaaatttatcacataggctcgcaacatatcctcaagtatctgaattgccctcttggactgcccatcaatttgaggatgaaaagttttactaaacttcaatttagtacccatagctcactggagactttgccaaaattttgaggtaaactttggatccttatccaatataatggacttcggagccccatgtaacctcactatttctttaacatatagatctgcatattgatccacagtaaaggttgttttcactagtagaaaatgtgcaaacttagtaaatcaatccaccataacccaattgaattgaacatccccgtggttttaggtaacccaaccacaaaatccatggtgacatcttcccatttccattcaggaagagtcagaggttgcaataacccagaaagtctctggtgttcaaccttaatctgctaacaagtcaaacaccgggatacaaattctaccacatccttcttccttccgcaccaccagtagaagggttttaaatcctgatacattttggtattgataggatgcaatgaataaggagtggtatgagcttccttgagaatctcatttctaagttctacattgcttggaacacaaaccctagttttatacaacatcatcccattacctgacactgaaagtctttagcttgactagctaaaacctcttctcggatctttactaattctggatcagttaattgagcagctttaattccgtctaatagatcagaaaaggatttcacaatcatagtccttgaccaattccaaccacttgagtaaaaaaataatttgaggcttttgtgattggtgtaaatctcacacttttctccgtagagataatgccaccgaatcttcaaagtaaaaactaccatggcaagttttaaattgtgagttgggtatcactcttcatactccactgttcatactcctttaactggcgggacacataaatgataaccctattagcttgcatcaaaacacatcccagactatgtctggatgtattacaataaactttatcagatggtaacgctaacaccaaagctataatcaactgctgttttagttcgtaaaagcttgcttcacacttgtctatccatagaaactgctaattcttacaaaatccctcaacaaactgacgatactaactagctaaacccagaaaacttctgacttctataactgtttttggtctcggccaatccctgacagattcaatcttccctggatcaaccttgatcccttccttactgacaatgtgtccaagaaaagacacctcggatagccaaaattcacactttttaaacttggcatacattttatgttct

SEQ ID NO: 337286 - DNA, 594 bp, Cannabis indica
caaaaagaataacaaagaaggaaaacaactataaaaagtgacccaaaacgtaggctaaaaatagcctaacaaattcccccaaactagattcttactcgccctcgagtaagactaagactaacactaaaactcgattaactaagctatcagataattatattactgctggctcatgtgaaatttccttccattaactaaactagattttcaattccaaaaactctaacaattaattaggatgctcatcttatcacacaatgtacagatacaaactaacttcaatattgaaataatgtcataattgtttcactccatcaaatcagtccacaaactaatagccaatatgcttgcatgcttacctctctccactaatgttgacaacattcttttcggaatcaaaatgactttttaaggttagaatttatggcttagatattcggaaaatgaaagacaattttggctaaagatatcataagcacaaaagaacccacaaacttctcataatttaaaatttcccgaagtattcccacaactaacaatgattgagatttttctgtatttttttcaatcaccggacatcactgaaatttttct

SEQ ID NO: 337287 - DNA, 1683 bp, Cannabis indica
tgtcaaaagacaagactaaagaatcatgtcaaaagacaagactaatggaaaatctaaattagtttcaacacataaatacgatcacaacattaaaattaattaaggaatgaactccttataaagcaacagccaagcggcctcgctataaagcaacaaccaagcagcctagcacggttgctgcaagggttagaaatttagatgatagtacacaacttataacccttcaggtggggatctctactgatccatcaaccgctacgggcgagctgtgggatgacttataggattgtagagtgagaaacatcgctgagttcaacgaaagggctcaggtgttcgttcaaaaagaagaagctcgaaaagaaatgaatttgttgaaaacaggctcgggaggccaacccagcaatgtttcaacaagtactgtctcaaccaacgagagttgataactcgggggcctctggctcgaagagaaaggacggtttaaaggaaccgttaaaggataaaaagaaacagaataagcacgataagtgcgtgccagtgtatactatttatactgagcttaatgaaactcgggagaatatttacatcgcacatgagcaaaaggttgccttcagaaaggtcgagcccgtgaggcacacgaggagaaaaagagatcccaacaggtattgcgaattccacaacgacattgggcacacaaccaacgaatgccgtcagttgaaagatgagataaaaagtctcattgctcgaggccacttcaaacatgatgtgaagagatagggaaatggacacaacaaacccaatttgccgaacaacccgaacaaccaggggttacaacctcttcctgtcgaaggagaggatatcatggttatttcaagagggccacatatcgctagggagagcaacaatgcccagaagagatatgttgaagaaacaaaaaatgagcggtcgacatttttcccagaaccttccaagaaggtaaaaactgaggaacctccaatcatattctcgaggaagacagaatgagatatcctcacgttgatccattaatgattactattcagctctccaataaaaggatatagaaggtgttgataaataatggaagcttagtaaacaacctttataaagaaatgttgaagaagatggggctcaaaaaagccaaattgaagccttgcatggtgaatctttgcgccttcaccggtgacagtattgtcagtcagtgcataatcgagctcgcattaatcttgggcgaggtgcacctattcaccacagttatgcaagaatttctagttgtcgacctgccatcggcttacaatatattgttgggtcgcccaacattgattggactaggagcagtcagttcgatcaagcacttaatcctgaagttccaaacattggaaggtgtgggagtagtgcgaggtgatcagatgctagctcgcgattgctatcacatagagctacaacataaaaagccagtcattagttaatggcgatctcgacagaagaaagcaaaaggaaggatgaggatcttgaccttcgggttaaagatgaaagaaacttattaaaagcaattgaaaaattggaagaagttgttctcgacctaggaaatcccgtaaaatgtgtttacattgggaagaacctggactagcagctaaaatagcagctaataagtttcttaagggcgaa

SEQ ID NO: 337288 - DNA, 676 bp, Cannabis indica
aggtcaggtgtttctccaaacatacaggggtaggggtgttcataaaatagccaatccaatccacaaagtgcagatatctgcatttgtgcggattggattggaaaattcaaaatctgcacttgtgcagattgaatttgaatgttgattgacatgtaaaagtaaccgattcaatctaatctatattttttttttattaaaaaaaattatatatacaagtaatttaaaagtctaatacatttaatacaattatatttcaaaactattatatcaagtgtatattctatttttatatatatatatattttttttctaaatacaatttcaaataaaagtaaacattttttatacatacatttcttttcttcctttgaatttatttgttatttttatatattttttttcataaatattaaataatttaatttaaaaagtaaccagtctaaaataaccgtatgaattggattggatctaaaaaaatgaaatccacacttagtgcggatcggatgcactataagcaaaatagtgcagattagattgaatgaacatccccaaacaggagctactccatcattgttcaccaaataatccactatatcaaaagaaccaaaaggaaaaatattaagggtaaccttgtcttttgcaaaagttatcaattggacattttgttttgttaaat

SEQ ID NO: 337289 - DNA, 1525 bp, Cannabis indica
attattcgtgttatatataaattatgttattttttacaaatttttgctcggcgacaacgagaaatgcaatggatggctagtttaaccacatgggtaagtctagaaccttatttcttagtgagatgtttattggagaaaatagagtactgaggttgagcagggttatagaatttgactattttacccctagtcttgaaaatgcctaagttataggttatgggctcattttattaatttgtcaagggggtagtttggtggctgcgctagatgatgacacctagaaatttgcattttcaaccaaagattaatttaattaatctttatttgtaattttggataattagaaaagggaagaaaagaccagaaatagggatttactctctttcccttctctctcttcgaaccagccataaaccaaggagattgattgctgaattttgtgttttcagcaaggattggaggaggattcaatcaaggtaaaccctagatactctctagctataattttctcaaggttgtaatggtttcaagtagtaattttaagttttggtggctgttagggttagagatgcttagggttcagtttttaagttcatttcaagttgatagcgagttctagatttagttttgctatgttgtgatcaaattgagcaggcttgagctttgaaactcaattttacgtctttaatggcatgtgttagtttctgtgtgtttttctgggattttctggttggaatatattgtgtataccctatttaggtactctggaaagtttggaggcaattggacaagttttgagcaaattggagattttttggggaggactggtagaaaccgattaactagttttggaaggttccacgaaaaactagatttctcaattcttgtccatttcagtgccttagttgggtgtttccctttttcctaagatagtgtagtccctagagtgtataacagagtcttgagttgtagacttgggtttcccgaattagtttcggacatgtgatttacccgattttaatatgtaattagggcatccatcaagcatgagactttccattcaggttggccaactcacttgaatctggaaaggaggtaagaattgtatataatgtgtgatatgaatatgcgaatgtatgtatttgttaatatatatgaatgcttattgtgattcacacactaccaacacttgtacggtagtggtacagattggtaaagtgtatgatgtctgaagaatacatcacggtgttaccaacactagtacaggaaggtacaaggtaaatgtggtacaacacttaacggtactcaaggcgaggttcatgccctacgtacactagtacgatggtagtactgagtggatgtggtatattggtacatggtcgtatcttagtagaacattcttactcatccgttaagccttgaaaataggtgtatgggggcctagatacaagtcgatattatatgatatgttatatgtttttcttactgagtatgttgactcacagttctgcttccatgtgtaggt

SEQ ID NO: 337290 - DNA, 1148 bp, Cannabis indica
tgagtgcgaaaattgagattttcgtatttcatagtttttagaaattcctaagagatcagaaatcgtatttttgtcataacttttgactcgggtgtccgttttggacattctatataccgtttcgaagcttgcgacgagctctacaatatggtgtatgttttagagccaaaatataagttttatttagtgtatttataccgcggagtttggtagaaaaccctagattgtcttatgtgaatattaagcagtgttttgggataaacacttattggtttatcgttgttgtgacatagggccgagatcatcggggatagttctccacttgggttggccgaaatatatgaacctggattaaaggtaagaaaagtatattgtactgtatagtacgttgtatgtaatacaattagtattgttatgaattgattaatattgagatatagttaatattgttatataatgaaaagactaattggttgagtaatgataatgtgataatattatgcatgtgatatatgggctcacctgattaggtgatgcgattttcctggcgacgtactgggcgtaagtacgggcgtcagtgatatatgatgagtaccgagtgtaggtacgggctcacctgattaggtgatgcaattttcctggcgacgtactgggcgtaagtacgggcgtcagtgatatatgatgagtaccgagtggaggtacgggctcacctgattaggtgatacgattttcctggcgacgtactgggcgtacgtatgggcatcagtgatatatgatgaccactgagtgtaggtacgggctcacttgattaggtgatgcgattttcctggtgacgtactgggcgtaagtacgtgcgtcagtgacatatgataagtaccgggtgtcggtatgagctcgtctatttagacgatgcgatatattggtgccagattgtggcacgggctcagctaattaggtgatgcaattatatgatatatgcgtgcaggtttttagcacaggctcacctgattaggtgatgcagttatgtgacatatgggtgtcaggctatggcacgggcttgcctaattgggcgatacaatacaagatcatcagattaaaacatcgacttgcctaattaggaaacgtgatgttatgaagattgttgcttt

SEQ ID NO: 337291 - DNA, 847 bp, Cannabis indica
caagcaattgataagatgaaccataacatacacaaatgaatgaaaattacttctgtttctttatttatgtagaataaaatggattacattgaaatggagttttatttagggcataaaacccaacattttattcccttggaatttgtctgagaccataggttttgaattgtgcgagcagatcatgtattttgctcagatatgcgatcatcttttctcctcgagccttgtattctccagatacatgatttaccaccagctgtgcagatttcaacgtgctcggctttcatctctcgggctagttttagtccagcaattagaccttcatgctggcttcattattagatgctttaaatccaaacttgactgcagcgtgcaggtgttgccccccggtgtgacaagggcaattcctgcaccaaatagttgatctttagctgacccatctacatgtagcttcgaggtcagattatcttcattgttacttggctgaagtgtttgtaccggctcggggttgctttcaggtatgctttctttcttgcctgtgcattctaccacaaagtctgctaaggcttggcctttgactactgttcggggttggaaagtaatttcgtattgacccaactccaccgcccacttgagtagccgtccagaggcatctggctttcgcagtatttggcgtaatgattggtcagtgtacacccgaacaggatgagcttgaaaataaggtcttaactttcttgttgctagaataaggcagtaagcaagtttctctatcaatgggtatcggccttcggcctcaatgagtcttttattgatgtaatagactgggtgttgtatgctattctcttct

SEQ ID NO: 337292 - DNA, 624 bp, Cannabis indica
gccgatattccttgacaaacgacagcctagtgatctttggaatcaatacaacattcgacttattaaactttctaactgattggtgaccatttaaaatcgcaaggcacacaaatgaaacccgagttccaacaatatcccaatatttctgaaagaaaatagcatgaaacctatcgggccctggggccttcgtagccccaatagccttacccgcacacaacacatcatcattagtgaagggagcttcaagcgtaacacgtactcttccggagaaatactaacatcaatattgctaatcccactctccacttgttgcaccgtaggagaggtcgaggagaaaatagtgccaaaataatgctcaatctcacccacaatatcctcttccgtagttaactttctgccatcgttcgtcataatttccacaattacattcttcttcttccttcccgtcgctttattatgaaaatactttgtattcctatcacccatagcaagccaatccgccctagacctcagcttccaataacactcctccctggataaaagatcattcaacttaatctcaagccgtttgacctcatccattcgaaccaacggggcagacacactgaggagatcgtccaactg

SEQ ID NO: 337293 - DNA, 927 bp, Cannabis indica
gttgattcttttttgttagatctgttaagggcattgggatcttagaaaatccctcaataaatcgatgatagtaaccagccaaacctaaaaaacttctgacttctgtgactgtctttggtcttggccaatccttgatgaattcaatcctccctgaatcaacccaaaaagttgttggagcgttggttagtccaaaagacataaccaaaaattgatagtgcccataactagtgtagaaagtagtctttggaatgtcctcctctaagattctcaactgatgatagcccgatcagagatcaatcttagagaagactgtttttcctgaagctgattgaacaagtcgtagattctaggtaaagaatacttattcttgatagtcagtttatttagtttttgatagtcaatacacatgcgtagggatccgtctttcttcttaacaaacaacacgggagctccctagggtgacacactaggtcgtgaaaaccctagcatcccctgaagccaaatcttcaattctttatgttctgctagagtcattctatatggtgctttagaaactggttttgctctaggtactaaattaattacgaaatctatttctcgctacggtggtaagcccaaaagttcatcggggaatacatctaaaaaattcctgaaccactttgatgtcttttagccaaattgaatcaagtcgtgtggtatccaataccactgccaaaaaacctagacacccatcttgtaacaaatctccagctttcaataccgagattattggaatttgggatccctaaattgatcccataaatacaaatgattactcgccctcgggttggaagatcaccatctttcgttaatagtcaatactagtagaatacttggacaactccttattctcaattctgatcgacatagacctaacccaccttttgg

SEQ ID NO: 337294 - DNA, 819 bp, Cannabis indica
tctatgggtttgggaagaatgctagtgattcctaacaggtgatctcctttctcccggatgagttccaagatcttcctcattttcatgaaggatttctcatttattagtttctgattgtctcctttctggctgttcatcctgattctcagggggtgtctcatttttcctgggttgactggctagcctgcaaccaatgcaatccaagacaagtagggggatcttaggctatcctccctttcacacattggaagttttaaggttaggaattcttcctgggccttttcctatctcctggttcgtgagccacgaggtctgcctcgtggtcttctcactctaggttcaggttgattttgagcattcgtccctgcgccgccctggccgatgctgcctctcgttctaactcatcgttttgatactgcgcctcttccagacggcgtctcaagcggcggctttccatttcataagttctttctcccacagattgggcacctccacggttgagctcttcatccctcctccaggattctgaccattcccacgctaagttctcctcgagcccgttgtccgcgtactaggacaaacatcaggttgagttctctggggacgtgtggttcgagcacggggaccatcctcaggttgagccctcctggaacgagtggtccttctagactgcgaattagtagatcttctagagcccatgggctcttttccagaacgatggttagtttcgtcatgtggggtgttaatattctctggaattttagccataaagtggaaggtgtttctttaaaagaagggaaggctttttctgagcttttt

SEQ ID NO: 337295 - DNA, 728 bp, Cannabis indica
aaggggcaatgttatacccgaagttcagtgagcacatcagaaggggacacgtgtcgagctgggaagaactcaaacacgcaacgacaagtgtgcctagcatggaacaactcgttggaaatgtaactcgcagggtatgttcataactcatctagctgaatagccttctgcgagacagaaacgtgcgaactgctaacttatatattgacgagaaaccatgtggacacacacattcatggcgaggcctcagcctcgctgcgtgaaagagaaagcgacaacacttaaaatacttagcgtatattatacgatatacaaactgagtgtagatagtatgacgagccaagataacagacaacgaggcgtttgtctcgctaaaagatggtatgcatgcgaggatgatcctctcgactccaaagagtataactatcagagttaagacaatattagtctcgagaagccaaaatgacaagcatctctcgttattaaagtgatcttggcaccctcctcggcaaggcatccatatgagatacggcctaccttgtatcattaattatgcgttcatctcagctcaaaaaaggcgagatattcacaactgtgtaaaaacctatatatggcgaaaaattggaaatcaaatccaacaattttagggataatggccgtaaatgtattttggtcagctctgtaattaactgccactatgaaattataaatagtggcagataagatcaaaa

SEQ ID NO: 337296 - DNA, 656 bp, Cannabis indica
tggaaagaaagatgagttaaacaaatggcaaaattgaaacctgtggggcctacaatgtggccgaccacttaaggttaatctatccattattttatcttcttaaattccatttaaattctaaacctaactctagtatctccctataaatagaataagatggctcttattttctcaattcattatcagactcctttgttagaaaaaatagaaaatagaaaagagcctcttctatttttgaaattccttcttcctcttcctcaaatattcaaagtccatggtaaattgagggtatgcccactcatgtcaaagaacacctagcatagtgaggaagactgtgtctaacaatattgaaggagagatgatcaaggttcaaatcttgataattctctgctaaatataggaatcaaaagcaaaagatttgaatggaatgagtcattatattctacttctatttaccaagatttttagaaaccaaatatttagagcttagaaaagaaataacagattaaataattgttcggattttatgccctaaataaaactcatttcaatgcaatcttatttattattaatagaagattagaagtcatttatgtttacatgtagttttcatgtttatggtttgatgtatacaatttctattaagtccagaacat

SEQ ID NO: 337297 - DNA, 1781 bp, Cannabis indica
cctcgggcattaacgataaagcccaaaaaattacccgagctgattccaaaggagcactttaagggattgagtttcatgttgtttttcttgaggactttgaagcattcgtccaggtcatctatatgcccccaaccttcttggatttgacgaacatgtcatccacgtgtacttccatatttcgtccgatctggtctttgaacattttatttaccaatctttggtatgtagctctagcgtccttgagaccaaatgacatgactttataacagtatagacccatatctattcagaaacttgtatgttcttggtccggtggatgcatcttgatttgattgtaccccgaataggcatccatcaagctaaatatcccgtgtcttgttgttgcatccacaagttgatcgattcttggaagtggaaagcagtcctcaggacacaccttattgaggtcgatgaagtcaatgcatactccaattttttgttcggcttgggcactagtacagggttagcaacccaggctgggtagaaagcttcaattatgaaattgttgttgtgcagcttttctacctcttcttttcaggctagggcccgttctttatctaatagccttctgttttgttgaacgggatggaaattaggatcaatattcaaggcgtgtgaaattatagaaggatcaattctgaccatgtcctcatgtgaccatgcaaaaatgtccaggtttgctcttagaaactttatcaatgctgattttacttcaagcaacaaaccttttccaattttgagtttcatggtcgaaacatttgggtcgattccaatctcttctagttcctcaattggcccaacatgggtattcggttccccaagtcagggatccacatcttcgtcctcacctttggcagttccctatttggcaatgtcttttcccttgtccgaactctgactagaggatacttccgttttagccttggttagggaaaggttgtaatattcccgtcaaacgtgttgatttcttctcaggcacctgaccccattctctgttggaaacttgaggcacaaatgaaatatcgatctaacagcttttaggtcatataaggctagtcagcctaacatgacattaaaagctgatgggacatccaataccaaaaattgtgccattagagttatactcttcaaagtttccccaacagtgaggggtaggcaaattttcactaaaggtgcaacactctggccggagaaacagtatacaggctgaagattttgagttggagccccattttttaatgcggtgttttgaagaagatatttgtggaggctccattatctatcatagttcgggcaactgttttgtttgctatctgtacttccacgaccaaaggatcattgtgcgggaagttaatcttgacaacatcctcttcattgaatgttatagtgggttcccctacctttggtatttttggtttcctttcttcgaatgttaggaccacttattttagctcgtgctgtgaggtttgggcatacctttcttgggctttgcttgcatctctagctatgtgccgcccctaatgatgacttgcaaatgcccatctatcggtggtggcaacaaatcttggttattgtgttcctgggcggcactctgattttgatcggccttaacatattttttcacgtgcgagttattctttcttatcaaaaattcaatttctcgcttcaaattgttgatttcattggtttcatggccataatctccgtgaaaatggcaaaacttggacatgtccctcttactt

SEQ ID NO: 337298 - DNA, 744 bp, Cannabis indica
cgtcttgtagtacgatgggacttcagacccaatcaccccccttaccaatttcaataccataatgcgagccagtaatgtctcgaataatttacgttgtatcttattccccacctcgctgactggagcagcgagtagttggttcgataagtttacccatcattcaataacttcttgggaacagttgtccaaggattataagaaataattttaggcagcaagagacaagggacctgaagcatcctccttaacgaacataaagcatcaaccaggcgagtcactcaaggcttacctaacgcgatttagtactatcgttgctaaagttagaaacttgaacgacagtattcaacttactactcttcaagtatggatcacgactgacctctcaactactgggggcgagctgtgggatgacttgcaaggttgcccgataagaaatattaatgatttcaatgagagagtgcaagtgtttgtgcgcaaagagaaagtaagaaatgagatgaaattgctgaagactggcttaggaaataaacccagcactgccacagcaagcaccgtctcgacaaaagctgacaatccatgtggttctaacaccaagagaaaagatgactctaaggaatcatctaaaaataagaagaattagaaaaaacacaataagtatgtgccaatttacactgtttataccgagcttaatgaaactcgggaaaacatctttctcgcaaatgagcacagggttgcattccgcaa

SEQ ID NO: 337299 - DNA, 1214 bp, Cannabis indica
tagagaattttgtccatcatcacgtaacggtgcgcttgatattgtatccttctagatagtgccttctcttggcgcaattcgcctttcgttatgtattcgatgatggggaccatccagttgggctcttgctcaattgttgctatggtatttttgactttgatgcttggctctgccaggcgttccacaggtaccacccccagtttctcaatttcactgtctgaagctaacttagccagacagtctgcgtgggtgttcttttccctggggattctttcaactctttaattcgtgaactcgtggagcacttcccggactattgcaacatatgcagccatcttttctccacgcgtctaatattctctcgacacctggttttctaccaattgcgaatcgatgtagacttctactcttttagcccctacggtttttgccaatctcagccctgctatcagggctttgtattcggcctcattattggaagctaagaattcgaaccgtagggctgcttggagtcgaagtccgttcggggatatcatcgcgacccctgctccggacccattctcgttggaggcgtcatccacaaataccttccatgccgggactggcgatgtgggtacgttagtgttagcttctgcttcgtgggactccgtgatgaagtctgctagcggctgcccttttgtggaagtgcgtggaatgtagtgtaggtcaaattggcttagttccatcgcccgtttgagaagacttccagatgactctggcttttgtaagacttgtcagagcgggtgattggttaatactttgattgggtgagcctggaactaaggtctcaactttctcgaggccatgaggaggcaaaaaactagtttctcgatcaccgagtattgcgtctccgctcctgtcatgcgcttgctgacatagaacacgggatgctgagttatttcctcttcccgtactaaggccgtgctaaccgcattctcagagacagccaagtacaggaacaagtcctctccgagaatgggtttcgacaggattggtgctttagccatgtgctcttttagttttttgaatgcctcctcgcactcgtcagaccattcgaacttttgacacttcttcaagatgttgaagaagggaatgcatttttctgtggattgggagataaaacggctcagggtagcaacttttccggttaagctctccacatctttgtgtttctt

SEQ ID NO: 337300 - DNA, 546 bp, Cannabis indica
aaaataatttccaacaccaagatatatgggatgactaagtagtattctcctacgaccaagtaaagatcgcttctttacctaatgagttagttcgagtgacaatgcgcatttaataactcgatagggactcgcatctttcatgttgtcgatgcgcataaggtgtccatatatgcgactcaatcagaatgcagacaccttggcatgagactcagtagtcctctttataatgataaaatgcacttaaagcctgcaagcttgtgcgagaatatgaataggcactcgcacccaagaggtcgcacacgttgctatacttattgaaacggatttaaactgttcttcatttattcttttacgttttattcaaatttaatgttgatatttaatgtaaaacagttctataaccgattagttctgtgtaactaaaagaacacttgctttgtgtataaaggaatgattcgacatgaataaacggagacagaatttgttgcaatagtggactaagaagaccgtgatctgactgaatcgctatacatctttgtgttcatt

SEQ ID NO: 337301 - DNA, 623 bp, Cannabis indica
tttcagctcactctttctctttcctttctctcttcttttttctctgatctttgttcatggcaaggtataacactagatctaatatggtatcagagcatccttctccattaatggcaaatgctgctgttaatggtggtggcaacacctcctccggtactcaacctgcaaatcctcctgcgaatccatggaatcgaacacgagaaacagagcaccctcgcagccccatctatttcagtcatactctctcggtgaagctcaacgatcacaacttttttctctagaaacagcaagtgcttgctgcaattcgaggacatcaacttcagagatttattcaagatactcctcccccaccacagttcctttcagatgcagatcaagctgcaaggaactctaatcccgagttcttgagctgggagactcaagatcaattgttagtttcttggctcttatcgtctatgaatgagagtcttctcattcgaatggttggttgtactactgccagtcagatatggagatcattggaaaagcactacacacttcaggtttcatcaaagattcttgaattcaagacgaaattacaaaatctcaagaaaggttcaatgtccttagatgaatacctgtta

SEQ ID NO: 337302 - DNA, 645 bp, Cannabis indica
aaaaccttttccttcatggctgaaaatctagagaatattagtactccacatgaggaaactaaccatcgttctggaaaagagcccatgggctctagaagatctaccaatctgcagtccagaaggaccacccgttccaggagggctcaatctgagggtggccccagtgctcggaccacacgtccccaaagaactcaacctaatgctggtcctagtacgcggacaacccgttcgaggagaactctacatgggaatggtcaggatcccggggcgagggatgaagagctcaaccgtggagatccccaatccgtgggagaaagaacttatgaaacggaaagccaccgcctgagacgccgtctggaagaggaacaacgttgaaacactgagttagaatgtgaggcagcctcagccagggttacacaggggatgaacgctcaaaatcaacctgtacctaaagtgagaagaccacaaggcagacctcgtgggtcacgaactaggagacaagaaaatgcccgggaagaataacctggggaaaatgagacaccccttgagaatcaggatgaacagccagaaaggagacaaccagaaactaatgaacaagaaatccctcatgaaaatgaggaggatcttggaacttaaccgggagaa

SEQ ID NO: 337303 - DNA, 2406 bp, Cannabis indica
atgagttatctgctaccacatcagtaagattagagtactgagtataggctagattcccagttagtcatactttgtcgagaacgttcctaactcagttagggttatggttgggtgtatgggtgcctgattataatccaggttattgttatgttattatttatgcttttcttactaagtttgtcgactcacagatattgttgcatgtgtaggtatgggcaaggccaaggttgagcatgacagcgagcagataaagattgtacatgtcggggcggttaggcttggagcgttcagtctttaggacatcagggcatattttgtatagtcactaggcgaaaaaattttgtatatgtacagtaaaacttttgtaaatacttttataaatgagatcttagtttaatatatgtattttattttagtgtttataattaattaagtaaaattttaattaatcacgatttttaataaactcgttgattagcaatgagcttcacagttaagttaaaaatcacattaacacgcctaaactagtagggtgttacaatttagtatcagagccgccaggttgtctttcaaagatcgtcacgacatgtacaatcatcatcagtgattagcttgtctcacggttcagtaagcctttattgctttagtagtttatgttaatagtacgttttaagaaaagcctaataggaagcatgctactagcctaatagctgaataggcgcatgtttttaatttccaaataagtggtaattagtaagttattcttgatcgcgatctgactagcctagctcttagttatgaggttgttttaatagtatggacgctagacaaaataccaggagtcaaggtaactctgttgaatccagtggcggtctgggagtacaaattcccccaaatgttcatggctgaggcagaggcctagaggcagggcatgcggtcggggtgatgttaacccaccgcaggttgcctaggaatgggaaaataggcttgcagcaatgcaagccaaaattaacgagcaagaggaagagatcagacgcttgaggcagccgggtgctcctgcaatgcttgctccagaaatgcaggtagctcctacccctgctgtgcaggcaggaccagttgctgcagtgaaccactgtatgaaaggttctgcaagcaggcacctctagtatttctaggacgtcccgatgtaatgaaagctgagaagtggctgacggttattacaagaattctaaatttcatgggtgtcaccggcaatgacagagtggcctctgccacattttaatttcaagaagatacccaggtttggagggatatggtgtccctgacttgtgatgttaccactatgacttgggaaaagttttaggagttgttctatgtgaagtactataatgaagcagtcagaagtgcaaaaagaaaggaatttactcagctcaccagaaagaaaatatgagtgttactgaatgcacaactaaatttgatcgattggtaagattggcctcgggaatagtgccaaccgatttcagtaagaaagaaaaattcatggatggattgaattcaaagataagacacgaccttatgatcaccactaatgacaacaccacctatgctgatatggtggggaaggcactgcgagctaagggcgcagtggagtgcgctcaggagtcctaagggactcaggttgttggtggtgcccctactcctcctacctctggttatggtaggggtggtagtggctcgaccattgatcagaaaagaagggcaccaactgcatctggtggcttaagtcagaacaagaggttctgagggaaccagggtcgaggcaaccgtcagggtggtttcgagacccaatacacttacctggaatgccccagttgtaaaaagtatcatctgggagagtgtagagggcaagggtgcttccagtgtgatttgtcagggcacgataaaagagactgtccagagcttaagaaagaagaacaaaagattgtagcaaaacccgctctagcaagggtgtttaccttaactcaggcagatgcagaggctagcccctcagttgtaacatgtcagctctcgatcaacaactcttacttctctatgttatttgattctggggccactcactcttatgtggcagccagaatttttagtaagttagatagaccgcatgatagttattataaaggatttggaaccctacttcctagtggagaattaggcatccccaaaaggtggattaggtgtatgccgattagaattgaggataggaaattgagtgctgacttaatagaaatgggtttagcagattttgatattatacttggaatggatttcttatccaagtactcagccagtattgattgtaaacggaagatggtaatcttccaaccagagggtgaggaaccgtttgtt

SEQ ID NO: 337304 - DNA, 770 bp, Cannabis indica
taccccccaaagcctgccaagtccatggagtctagaccaccaacggttgggtctgaactggtcaggagtgatcctgaccgatgcgggcacctaatccacctttgccagtgcttctagaggctaaaaagggcaaggagatgctggcccattacatgaactggctggttcctaaggtcagtgagcaactggctggtgctgataattactcttctttgaaattgctggtcggcggagtcttgaaggagttcaccagggtaagcttttcttcatactaccccttaatcttccatacttagctgaatatgcaaaagtttttccttcgcccaggctggtctgaagttggcctacatttactcctgagctaagtctgctgcttccaagaacgcggctctatccgacaccctaagggcggaggcagacttggccaggaaggatgctgaagaagccagggcggaagtcggagctgttcggtaggaactcggtgaagccaacaaggagttgtgctgactaaggatctcgaggttgctgactgttttgaggagaccaacgagaccttatctactcaggtgaacaatcttcaggacaagaggatttctctacgagcagttcttcatctgatcaaggaggaaaaggaaggcaaggagggggagcttttggtcgaggtggacaggttgaaggagaaggtcaatgccttggagacaaccagtctcgagctcttctttaatttttggaaggctaatcctcgggccaatttcaactacttgggcgat

SEQ ID NO: 337305 - DNA, 807 bp, Cannabis indica
ttttttcatattagatggtacttataccattaatagactcgcactattttcgtgtcatgtcaaaccgtctaacttgcaaattacaacactagtgtcacttcaactttgtcaaatcactagattatacataatcaataaatatttaagttaaaaaaagactcacaaattcaaaatagttctagtaataagattaaaaaaaatggttctagtaattttttcattttactctataaattgaaagttggatttttgaattcatacattgcaattaaaccgaaaaatgtctttgtcattatcagaagatatacctttttataaagcacaccagtcttttcatttttcttttattaccacatacccattttctttcatttgtgcttagttggattttgtcttctccttcatatcttatagcagacttaattaggattgtgctatcattgcccaaaaaagtgttatagatgagctgattaggttgtaaagcagaattgtaggagagtcaaatcacctttagttgaagacccaacccaacaatgaatatggaaaacttgattattattaatttagtagccacctcagtagcactaaaaactcaaccaaccccaataattttcttgctaatcaccaaaatggcagtgcaagcaacatagagactgtgattagtcgacaagtgtttccaatattttatgaacacggcaacaacagcaatatatatatggatatgattttgtcccgttattgtactttctacggattgtaatccgtgacgtacagcagccgtcagatgagggagttctttgatctgac

SEQ ID NO: 337306 - DNA, 739 bp, Cannabis indica
ttatatatatatatatatatattgtgttgtgtcttcttatttttgctctctttaaaatgagaggagtagtcctcattatatagaccaaaagacccaaaatacttgtagtcatatttgactgttaaagttagttaatgaacaactaaactaactaaccgaatcttgatggggggtttaaggaataataccacaaatttcgccttattccttcaagccccaacaagctaagcatatttgtttaatggaggtggtaatactttcatgtgtagcaacttagcaactaaggtggagtaagtccaagcaatgcttgaacttactaataggtaataccttagtgccaatcttctcgtgataaactggattcttttacaattgaatcgacgattggatgttagaatataccattgcctttccaactaaaagcatcaactctttcaaaattccttgtagccatattgcttctttgaatgcctcagtggttgctatgaattcttcctctgtagttgaaagtgttactacggattggagctgtgatttccaactaatacaatctccattagtttgaaacatataagaggtagtagatctcctagtatccttgcttgatgcacatccacatatcctttcaatgttactttctctaaaaactctcttgtaagtcaatccaatatccgatgtcccactcaaatatcttagcagacatttgagtgccctctaatggtttatcccaagatttgac

SEQ ID NO: 337307 - DNA, 623 bp, Cannabis indica
atgttccatgttccagtagttctttattagcgagccatttagccgagccaatttgtgaactccgatccttactactacttcgattacatatgggccctcccagttcgggtttaacactcctgcagacgcatctctcgtgtttgcaaatactcgccttagcaccaagtccccaacgttgaatagcctttttttgactcttttgttgaagtaccttgtaactcggtgttgatacgctacattagtgacttgcaactcagttcatttttcatcaagcagatccaaagataaatttaggagtttttggttttcttcttgattataaaagtctcgtctatgagtcgatatgttcacttcaataggtagcattgcttccgagctgaatgctagcgagaaaggagtgtgtcccgttgctgttttttcagtagttctgtgagcccacagtacttgaggtagctcatcgacccacctacctttgacagcatctagcttcttttggatagtatccttcgaggttttattagcagcttccacttgtccatttgcctaaggtctggatactggcgagaagctcttaattattttgttcctttcgcagaactcagtgaacaagtcgccatcaaact

SEQ ID NO: 337308 - DNA, 498 bp, Cannabis indica
ttacgatttaagttgctctattgtttgctatctagattgttgtgtgggttgcaatgtggattgcagtttgaattagattacgacttaaattgttccgttaattgtactatttattttgtaaaaatactttaaaatgtataaatgaaaaagtagaaattacacaatatatggaaaaattataagagtataattttatggcataaataaataataccatgagattatgggttttttttatatatatttatatgggattttttatgccagtttttttttttttgtttttgtaaaaaatatggaaatcccatatttttacatatttttaaaacaataataagttccgccagaaaagtcgtcggcatcggaaaagtcaccagaaagttatcggaaaagtcaccatcaccgaaaaagtcactatcgctagaaaaaatcaccagaaaagtcactaaaaaaagtcacacaatacctcaaaatcgattataataacaaaaaaaaaaa

SEQ ID NO: 337309 - DNA, 474 bp, Cannabis indica
acattataaaaatatttttttttatatttatttgggtctagtatatgaatgtccaattcaaaacccactaattattgtattattgaaacttaatttttttttatatttagtttcaagccttatggtatttttgacaagtgtttatcaagttttgttgtatttgtgatagtttaattattagtgatagtccaaaccccagaaatcacaaaaaccacactgcaccgcactattatttgcgatgcagtttctgcggttttctagtttcgtggtgcgggtgtggtttgagaaattggaaaaactgcgttgtgcgggttagcttgaaaaaatggtcaaaaaccgcactacccgaaccgtgaacacccctagaaattatgtcttagttatttatgtgagtgtgtgaggataatttaggtacaatactcataaaaaaaatgagttatatttacaccccataaaattataaatacacctcat

SEQ ID NO: 337310 - DNA, 757 bp, Cannabis indica
caagaaccgatttctggaaagagttgcaggcacgaagactagaatcgttggtagaattcttcgccatggctgagccgcataagagaatcgagaattatcttgctaaactagaaagggggaaggagaagcacgagtcacccataccgcagtcacaatctcgaagtcctagaggaaagaatcccagaggtagaagcccgagaagacgtaaccctcagaggcagcgaagtccaaagcttgccaagtccccttccaagaaggaaacatctccaaagaggaaaggaggacctgctttgtcaactacactgaactagcagtccctcgcaatcatatttatgcgattgaggagaaaaatgaaggtttcagaaagcctcctccaattagaggaaatcacgacaaaagagatccgaagaagttctgaaagtaccataaggacatcggccatagcactctagaatgctggttcctacaggacgagattgaagaattgatcagacgagaaaaattcggtaagtacaagaaaaatggagaaaatcatccctaatcggatgataatgatgacatgaacaatgcaagtggttcacgaactcctcgcaatatcttaacgattattggaggaccccatattggtggagattccaaaaagtcgcaagaacattatgctatggaagcaaaggagaaactgctcgccgacataaacaacctaagtgagcgacctgagaagtttttcaagaaggaatgcgatgacataaccttcatg

SEQ ID NO: 337311 - DNA, 845 bp, Cannabis indica
aaaaaagcagatataactatagctatctatactatatataagccccctcttttctattacagctttattcggaacagcacctgccaggctttatcaaaatttctcgtttatatattcaatctattccagaaaaattgtaaaaattgaagtgaagcgcgagaatttactgaaaattacctatagactcatatacagataagataccggattagataatatttgtgtaataagttatgttatggggtttacatatacccataattgctgttataattcaaattgagaaatatttttttattgacagaaaaaaattagttatgtatccatttgaattttcttatatcattagggaaacacaattttagattcaaattcacgaatcgtttatgaattcacaatcaatagttaacggttcaaatttgtcctgaatttttgcttttatgaccgaaaacccagatgtgatttttcaatataaaatgaaaagaaagtttttagatattcggattcggtattttaagatacaatcaatcgaaggggttgatccaatccaaacaaaaaaagaaaaggaaggatttcttttaggaaagggattaaagaaaacgagattcaaaatacaagtacaaaaaaaagaaattttgtcatctattttgtagcattttggcggcatggccgagtggtaaggcgggggactgcaaatcctttttccccagttcaaatccgggtgccgcctgatcaacaaaagaatcgaaatactttgtttgttttgctgatataacttgtcaaattttttccagcagaagcaagcgcagaaaaaggattcttgagacttgcttgattcgaagtat

SEQ ID NO: 337312 - DNA, 814 bp, Cannabis indica
atggcatggccggccacttttgtagggttttccctctgatattttcattattttaaattccaaataattcaaacctaaccctagtggaatgctataaatagatagtgaatgcttcaggaaaaacacactaaaattttctgacttttcattcagaaaaaactgagcctctctctgcccacacacagcaagtgatacctcaatcatagtgaggaagatcgtgaagaaagacttttagcaagaaggagtttcagcactaaagaatcagagaaagagatccaggtaaataatttccaacaattttttctctctttatctagtaagtttaaatatatatatattacatacatatcgcaagatagtgggaactagattgagtgaatattgtgggttgagaaagaaattttgggtgagggtttgagagaaaaagaaaagtccttgataaattgaggtgattaggtcatgagcctaagaaatgtcatcttttaccaaactcgaacctaagcctcacattacaagcctagtaaagtccttttgatctatgatataaagctaagctacattagtggagagggttgcactagttcaacttatggaagcaaactttttaaactcgaggatcgagggtagttgttatataaatttaaggtggttgtgggaagcatttgcatactttattgattgaattattcttggtaaaggacatagatagcatgcaaaactcgattgaaacacacaagttcaaggcatattcattaccaccaattacacttccattccatctaattctgagagcattttcgtcgctaaaccaagt

SEQ ID NO: 337313 - DNA, 517 bp, Cannabis indica
ttgtccaaaccatgctccttcattcagagcctgcccactggcccatttcacatgatatattatataaagagaacttacaaaaatattagaaaatcagaaaaagtttacaaaaatactggtacacgcagatttttatatttttattgtaccgagtttacaaacatactgtattaaagtttcaaaatgaaaaaaaaaagaaaaacagagaaagaagagaaagaaagatagaataataaaaattcacgttgggccaatctttttccaatgattattttacttatagtcattcgatctgctgtagatttcatattttagatctaattcaattcgcatataaactcaaattaatttatttgatatttattagaaaatatatttttttaactaacaacgaaataaaataaattattgttattttatatttctaacaataaattaaaataaataaaacaaaaaataaaaaatttaaagcaagaagaaaaaaaattatatgtataaagaaatattaaattttgtt

SEQ ID NO: 337314 - DNA, 612 bp, Cannabis indica
tgtaggaatttacttggtgaaattccaagtttaacctacaccactcaagatcacagtcaaaaacgacaaggacagaattgtcctttaaaacaattaatataatcaattcacacgacaaccaagatttggtcgttttcacttgcacgacaaaggaacttgtcgttcttaccaacacgacagatcgtttgattccaaaacgatctgtcgttcttctttgaataaaactcgaggaatcagagctaaccctagctcatttcctctcttcgaaccttcgagagtctcagaactctctctctttctctctgccttctctctggttctcaaaccctagaaccagagatctccctcgatctcttgatcgatctaacccagaaactcacccagaaacaccacacaacacatacacaaagataaaacaacaaatagtagggttagagagaaaatcaaacaccagaaaatatagaggttcgccctagaaattaggggtacatcctctgatgagctcgccttgaagatcgacctcagatcttgcactatgatgaatgaatgttacaacaggtaagaaatccaagtcacagatcgactggtatttctaggttttttctctctttt

SEQ ID NO: 337315 - DNA, 542 bp, Cannabis indica
tttgtgttatttgtttttattcactatgttacataacagattatattttaattataaccggtttgcgttattttgtgttatttatttttattcattatgttataaaaccagctctatttttaaattataaccggtttctgagttatcgtgtgttatttgtttttagtcattttgttgtggaaccgagtctattttaatttatgtcatctgattttttatttaatcaattcaaaaattaattcttgaattatttattttagaaactagtttttaatttagttatttcgagaactgatttttttatttagttaatttaaggaactaattttttattgattttttctatttaattagtttttgtgtgtgagtttttatcttagttgctttacgaaattagtttttttttcctcaaatttttaactagttgataaatataaccgatttttttttgtattatatttttagttattgtatgttattatttgtgttatttattttgttatggagctggttcttttcatatttatgcctcagtatttttt

SEQ ID NO: 337316 - DNA, 1279 bp, Cannabis indica
tcttgggaaatctgagcagacgttttgtggatcttgagcctttttgtttctctcgaggatcgaagtgggatttttcttagggtcttcctcggaaggatatcatatggggcttggcctcctagttttaggcctttgggtgcttggcgaggactcctcttgtgtttcctctagtcctgcgggcacggctttgggatgcacgtggattcaagttgtttccatggccttttgcatggcaaccattatttattgcatccttctattctgttctttttgggcagctagttcggcctcgtgatcagtcgctttttgccttaggaccagtaactcagtgtagctacctcctcataagcatcatacccttaaagattctcttcgtattcctcgtcatttaactcgtctcattcctcagaggccacatttacttgtgtagcagcctcttcaccttctgggtcccgaagatcctcggggggacgaggttggtgtgtgttgttctgagtttccaccatcgtagctttgagtcttgattgtcgtttttcaaacaacgcttcccacatctctcaatgaaagcaccaaaatattgatcgaggttttcgataaccaattaaatgagataatgataagagctttgggatagttaatgcaggtgatttttacgtggtttgggcattaatgagccgtagtccacgagtctctattattaatgacagtatttgttttatagagaatgttcttggggtgtttttctctctcccttttttcgacccgatttctcatttttctcaggggtatttatagagattggtgggaatggttgaaaaggggtaacttgtctttgagtgccagctatggataagtacaagttcccaaaagatacaaaatagggcatgcattacctacatagtagttatcatagaggttaggtgagattagccttcatccttccttgattgatgtgattcttcataatggagccatcaccagcccctttgattatcgtgtaatcgccctaaattaggcttatgatgtctgacatgtcctcttatgggcgtttctagacgttttccccatgctgcatttaatgcgaggtgactgttcgaatgggtccctctcgtcgcggatgtgccttactatatcttaactcccgaagaagaaggtgtgccttttgcacttgtccgggatctaactcttcgaatcatacttattgcctcttctatacaacccttaactgatctcaaggtgaggtgtcttctttgtccacgtgtcatacatagcagcggcc

SEQ ID NO: 337317 - DNA, 525 bp, Cannabis indica
aatgccctgatcttcgcaggattggcttctattcctcgctgataaccatgaaaccaaggaatttcccagagccaactccaaagacgcatttcagtggatttaaacgcatcttatatcgtcgcaatatatcgaacatggcctgtaagtgggcaatatgatccttcgcatgttgtgattttacgagcatatcgtcaacatatacctccatggtttttccaatgagatctgcgaacatcatattcactagcctttgataagtcgcacctgcgtttattaaaccaaaaggcattactttgtaacagtataatcctcgatcagtaatgaacgaggtatgctcctggtctggttcatacatcgggatttgattatatcccgagtatgcatccatgaaactcaaaagttcgtgacctgcagtggcatcgacaagctggtcaatgctaggaagaggaaagctgtctttgggacaggctttgtttagatctgtaaagtcaacgcatgtgcgccatgagccattaggctttggca

SEQ ID NO: 337318 - DNA, 2456 bp, Cannabis indica
gtaatgggttttatttagggcacaaaacccaacacctccagctcaaaaaggaaagacaactctaaggggttatctaaagacaagaagaaacaaaagaagcacgacaagtacgtgccaatttacaccatttataccgtgcttaatgaaactggagaaaatttatctcccagagcacaaggttgcatttagtaacgtgagcccatgacgcacgcgaggcataaaagaaatccaaccaaatactgtaagtaccaaaaagacatcgggcacaagacagatgagtgtcgtcaattgaaggatgagatagagagtctcatcgcacgaggccatttcaagcaatatttgaaaagataaggcaatggacataaccagcccaatttgcctactaatccaagcaaccagggattacaacctcctcttgttgagggagaggatatcctagttatctcgggagggccacatattgtaggagaaagcaataatgcccaaaaaaggtacgttacagaagtgaagaacgagcagcgtgcctttgctttagaaccttccaagaaagtaaggactgaagaacctctgattatattttcggaggaagatgaaaaagatgggaggtacccgcacgtcgacccattggtaatcaccattccagcttgctaagaagaggataatagggtgctggtggacaacagaagtttagtgaacatcctttacagggaaacactgaagaagatagggcttgaaaaagctaaattaagaccttgcatggtaaatctttgcagatttactggcgatagtttcgccagtcaaggaataatttagctcgcaccaaatttgggcgaagcaccttgatccaccacaataatgcaagactttttggtttttgacctgccatcgacttataatatactatcgggtcgtccagcattaatcggactagagacagttagttcaattaaacacttgtccctgaagtttcagacaccagttggtgtgggattagtgcgaggtgatcaaatgctggctcgcaaatgctatagcatacagttgcaacacggaaacgatcaccagctaatggcagtcttgaattaagaaggcgagaagaaggatgaagatcttgattcaagatgaaagaaacttattgaaaccaattgaagagttggaagaggttgttctggaccagggaaatcccacaaagtgtttttacattgggaagaacctagatgaacaattgaaatagcagctaataagctttttaagggcgaaccaggatcagttcgcctggagccatggagatatgatagggattgacactaatattatctgccatcacttaaatgtcgattcaaactacccagcgaagagacagaagaggaggcccttagattccgagaggcaaggggcacacaaacaggaagtggataagttgttggtcaacgactttatacgcgagttgttttatccctcgtgtatagccaattctgacagaacttggagaacttgtattgatttctcttatctgaataaggcgtgcccaaaggatttcttaccactaccaatgattaaccagttggtggacgcaactgctgggcatgagcttatgtcattcatggatgcatactctggatataaccagataaaaatgcgtgtcccagattaagaacatacaagcctcgtaaccaacatgggactatattgctataaggtcatgtcatttgggttgaagaatgctggggcaacatatcaacgactagtgaatgaaatgttcgcaaatcaaattggttggatcatggaagtttacgtcaatgatatgtttgtgaaatcggttgaaagtggaagtcatactacagaccttgtggagtgcttcgaaatattgaggaagtacaatatgaagcttaacccgaaaaagtgttcctttggagtttcctcaagaaagtttctaggattcatagtcaacgcgaggggcaatgaagcaaatcctgagaaaatcaaggttttgatagatattccatcaccaatcaagcctaaggaagtccaggccttaacaggaaggatagctgcacttaacagattcattttgaagtgaactaaagtgtttaccatttttcaatgtactacgaggcaacaagaaatttgaatggacagaggaattcgaggaggcattttagagcattaaaaggcatttggcgatacctccggttttggaaaaaccagtaacttgagagacatcactcctctatttatctatctcgaaagatgcaattagtgcaccaatagtgcgagaagagggaattcaccaacaacctatttattatgtcagtaaaaggttgttgggggcagaatcgaggtatcctcctcttgaaaaacttgccttccacacatttaatataatcagatttacttgcctaattcactaacttgccttattttagtgcaagtgggagtttgttgggtttatgccctaa

SEQ ID NO: 337319 - DNA, 732 bp, Cannabis indica
atagacctaatccaccttttggagatgactaattcttcgccaggcagtagcgttccaaaccctgattcataactatcgtgcgatctacccaatttactaaaaattctggctgtcacataagagtgagtggccccagagtaactcaaagaagtaagaatttttgaccatagttgacctgttaccactgagaggctagcttctgcatcagcctcaattaacgtgaacacccttgctggagttggtttcgctgtaatcttctgttcttcctttttaagttggggacaatccctcttatagtgtcctgacataccgcactgaaagtacccttgccctctacactctaccaaatgatgctttttacaattggggcattctgggtaagtgcatcgggtttcggagctaccctaacgattggcttggccctggtaccctcaaaaccccgtgttctgactagagccaataggtaaagtaggtgcctttcttttttggtcagtggtcgagccactacctcccctactaaagcctgatgtaagaggagttggagccccaccaacaacaagagtccctcgagactccagggtgcactccactgcaccctcagctcgtagtgccttacccaccatacctgttagaattattttactaggatcttgatttactaccaagtatgttgttggaaattattttacaaggatcttaaatctactcacaagtatgttgattaacaccata

SEQ ID NO: 337320 - DNA, 649 bp, Cannabis indica
agttttagatattagtaggctttgaattttgaaaattttatttctcacaaaaatagccttatggttaattttaaaattttagattattttatttattttaattataagatatgatattattttttattaaattttaaatgatcttactttgatattaaaatattatcttttaaaagtaatctggtactaattccaaaatttgctaaccatatcatatcttttttcaaatttgttattttcaaaatattttgttattaattaaaattataagattaggaatatattaagtttaatattttatcttattagatatattctttttattaaaattatattttggcaaaaataacatgaaatttgaaaaattggttaggttaggtttgaatagaaattttaaggtttgaaaaccataaattttggaacttattttattttattagttttattaaaatattctaaccatattaaaatatctttttttttttcaattagtttatctaggcaatatttaaatttataaaattataagacttagaatataataatgaaatatctaaatttaaaattcaagatattttattatattatcttattagaaattttaaataaatttaaattttgaataaacttgatatttgaaaaattggtt

SEQ ID NO: 337321 - DNA, 532 bp, Cannabis indica
  modified_base (517)..(517): a, c, t, g, unknown or other
tggtctgtagggtcagtcatcagtccatgaagcagctaaagtgacgaactcgtgtataagagccattagtccgtgtgtgtaagggcccaatggaagcttgaagcggggacgttacatattttcatagagacttttcaaacttttaacgtctttaattaattttaaccaacatcttaaatgaccaacaccaataaaacaagatttgattagataaatttaattagacaaggtcattataagttaaaatccttgaagaaaaccatgaaaaatgtttggttcttttagatttttacaaaaaaaaaaaataataattcgaataataagaataataacatagaagtcaattacgaggactcagcttaatgattttttttttattcatttgaaaataaaaataatttaatatgattttggtgtaatattattattattatcatttattataaaagtatattattagagcaatttgcggcgaaacccccttatgttttaatttttatacacttaatccccttanctttttttttggtgg

SEQ ID NO: 337322 - DNA, 801 bp, Cannabis indica
atcccagtgactcaaggggcatgcgttttcaagcataaccctgaagttactgggatactcccaccgttccgagactacctatcagccaaggagtacgatcatttgagtatcatcgcatattgcaaatggctgggtgtatctcagtatctcaaggggcatataatcgcatatatgaccattagaatactgagacacacccaccatttggaacagcgattgataccctcgcaattcaacccacgacatataaaaatcctaaaagatctagctatcaatcaaaagaaagtaaatcttgtcaatacgcgagtattcgaattgttcatctgaatacccgcgagtattcgagttgttcatctgaatacccgcgagtattcaagacgtgaaacagtgcctattcaagtatatcgtgtgcggttatgtcaatttacaggtcatattctatgaatttacccaggttttttacctaaaacacatagcctcataaacattcatccttacacaaccctcatacataccccttacaagcatacattcctaaaaagcctcaaaataccaaaacccaaaaaaaaaaaaaaaagggcattttttctccaaacagaaaacgaaaatacaatgactcgaaactaacctttagttttggttcctgcgattgctctcgatcacttctgagattgaggatattttagaaagagtggtagaaatctgggcaaagtacgaaagtgggtttgaaatctctgtaaaggagggaaggaggaagttaagaacaagagggaaaaatggaagatttgattcgtatcaaag

SEQ ID NO: 337323 - DNA, 880 bp, Cannabis indica
tgggagatatggtcctaagaagaatatttctaaataccaaagatagtacgacaggtgtactcgaacctaactgggaaggaccatatcaggtagtcgaagttctcaaatcaggagcatacaaattgggtatgtatgatgaaacaatgcaactcgttctggtaccaaggtattggaatggggaacatttaagaaaatactaccaatagaagtaccagttcggatgaccatattaagtactaaacaactaaacatttactttcaagtgaatggccttctgggcagaccacgcataaaggttcagaccaaattataaagtactcaggtcgggtgaccaccatctaaagtacaatttctaatttctgcaatttgttttatttcatgttaagctaaaagatcagattagatcaaatagctttgatgtaagttactacggtaacaaacacattttggatcaataaatgaataaagatgtttatttcaaaattcaaattgagtcgaattcactagcatgttgttaatttaccatccagtgcgtacaaaaggtttagtcgaacccaaaaccccaaactgacaaaagagcatacttgcaaaatattataagtgaccaagagtcataagtttgctcgtttacttgtggggaacttatacctatacaaagcatttggtaaaaataaaacaaacacggttgcacgatgattataaatagaggatgaaattcattaaagataacaaaacacgtaaaaccgggattaaaggctgcccggtcagcctgttatctaaaaaattaaaaatattccaagtttaaaaaccgtttgggcagtcactttgtcttaaaaaggccttatggccggacagatataaaaaaaaaagaaaaagataa

SEQ ID NO: 337324 - DNA, 701 bp, Cannabis indica
ctacctcttccttcagggctagagctcgctccttgtccaacagccttcgttttgttgaactggtcgatagttgggatcaatatttaggatgtgcgaaattacagaaggatcaattccgaccatatcctcatgtgaccaggcaaaaatgtccacgtttgctctcagaaattttatcagtgctgattttacttcgaccaacaaaccttttcaaattttaagctttctggccagaatatctgggtcgatctcaatctcttctagttcttccacaggtccaacattgctgcttgagtccccaagtcgaggatccacatctttatccccgccttgggaagttccgtacttagaaatgtttttttcccttgtccgagctctggctagaggatacttccttcttatccttggctatggcaacgttataacattcccgagcaaactgctggtttcctcttagacaccctaccccattctttgtcaggaacttaaggcatgaatggaatatcaacgtaacagcctttaagtcatacaaagctggtcggcctaatatgacgttaaaggctgatggaatgtccaatacaaaaaattgggccattatagttatgcttgttggagcttgtccaacagtgaggggtaggcaaatttgaccggccaggccttggaacatacttttttgttcgtccaactgtgcctgcacggctgga

SEQ ID NO: 337325 - DNA, 757 bp, Cannabis indica
gaggattagcattacccaaccccacattatcccccggattctgcggaggtggaggcggtgccggtggattggtttgggcagccccaggctctacttgctcgccctgtggtctagatgattacggagggtccattactagtacccctataatcaacaaccctagcgagttaagcaccaataccacacttacgcacttattgccttaaaccctaactcatctatttaccccatataaatattcattaatcaaataacatttaaagcatggcatcacataacacataaatactctagatgcttgcatactgcctaaaatggaaagcggtaaacagatgatcacacaaatagtaaagtatttactctcaatacttactgcaccatgagtcgagcttgtctctgacgatgaatgtacatgttcggccggtctacaggaagtttaaaaccttggcgctctgataccaaattgtaacaccctaaataattaggcacgctacccaaaatacttatgaaaccctaatcccctaatcgggattactaattaaaatagcgcagaatttaaacttttatattaaacagactgaaaataaaacttgtaatatatttaaactttcaaaatagttgggatcccaaaaatatttacaaacttattacaagtcttttctttctagcagacctaagcggcaaaacagaattcaaaatacatcactcgtagaccccaacccgcttggtctagaatggctcggacatgtacattctt

SEQ ID NO: 337326 - DNA, 666 bp, Cannabis indica
aactaataaattactaaatgagacctcaatttatttattcttattaagccaagcttgaagaaaatcatcatttcacttctaaatacttatagaagctatagatttcatatttatgattagcgctcccactcaattgtactatcatgttcctaagatgtaaagtattcagctgaccgagctttaacgaacaactctaagaacataaataatacaattaaccagaacttaaccatatcaagattaagatctattgaccaaagatcaactaactgatattgacttagatagatataacggtaagtttatgatatcttatccaagttcaatatcggtctagtccgatgcatactccatacatccaatcctagcatactttgccaatgccatggaaagaacataacacttattcaaggtgtaagtctactctatcactaattataatgttagtctaaatccagtgtactgacaaatcacgagacttaaactttgaaacatataatcatgattatattccgctgtgttgacaacactataattatgaataactatatgttctggatttaatataatttatacattaaatatataatcatgaaatcaatcatgtgaaccatgcatcataaaataatttttgatcttttattaattagtacatctaattatatt

SEQ ID NO: 337327 - DNA, 603 bp, Cannabis indica
gatggcatgtctattaatgctttgattattttgagatttgcttcaatacccctcgctttaactatgaatcccaaaaaatttcctgaggagactctaaaggaatattttttcgagtttagcttcatgttatacttctttaatatcttaaagcattccgcgagatctgaggtatgatccctactctttattgattttaccaacatatcatagacctaaacttccatgtttcgccctatttggtttgcgaacattttgtttaccaatcactgatacattgccccagcgttcttcagtctgaacgacttgactttataataatagagtcccatgtttgttacgaagcttgtatgttcttgattcgggagatacattttgatcttgttatatccagaatatgcgtccataaatgacataagctcgtgcctagcagttgcatccactaactggtcgatcttgggaagtggaaaacaatcttttgggcacgccttattcagctcagagaaatcaatacaagctctccaaatctgttaggcttcgggacaagaacaggattggctatccacgagggataaaacacctcgcgtataaattcgttgactaaca

SEQ ID NO: 337328 - DNA, 636 bp, Cannabis indica
agtttagcccgaaacttacctttttttacagcttgttggaggatttgctcgttagttctatgtctgagtctcaacagtttttcaaagtaccagctcatgtcatttttgataggcatagtccagagattgttgtctttgatattatagtaccaaacattgctactataatattttattcttaccatatactaatatatttaaatgtttagtagttttgatttttcaaatatatttaatataatttatggagtatatttttttctaaaattagggagtagtattgtttataggaattattacatggaaaatacaaattgacactttatttacaaaaatacctccataaagtgtggacaatatttatattttttatgtgcttttaattaccaaaatacctcttacattatcacttatacaattagacaatggttgctggatggttcgccgaaggttgcatcacacgaatgttttaatcaaataaaggttgctgggtagtttgccgaaggttgcatcagatgaaagtttcttttagacaaaggtttctgggtggttggccgaagattgtatcagactaggactgagcataaaatccagaaaaccgaaaaaaccgttcaaaccgacctaccgaacaccatt

SEQ ID NO: 337329 - DNA, 535 bp, Cannabis indica
aatgggttcaattcatacttaatagtcttcctccagagtataatggatttgttgtatcttatatgatcaataattttaactcttcccacgtggataagctagaagcagaattgcgagctcatgaacggaatttgattgcaatgccacctcctggttttgcaaactttaattagaggaaaaggattaagcatgaagcttctaacaatggttcttttgcaagtacaattgatagtcatattattctatgttgaacttgtaatgagaagggacatcaggaagaacgatgtcccagacttctaaacaattcgaacgaaggtaatgcttttgtctttgaatcatgtgtcttatagaatgacaaatccttatggattgttgattctggatctactaaccatgtttgttcttcattgcagctgcttgaaacttgggattatcttaacccagaagagttaaagctcaaagttagaaatggcgagttagtattggtccaagccaaaggaagagcccacctcaagtttcaaaagaaatttttagt

SEQ ID NO: 337330 - DNA, 648 bp, Cannabis indica
tctctctctctctatcactctcgttctatcactctctctcgatctcgtctctctttctctcttggttgggttttcaatctagggttttcaaaatccttgggcggcctctccaccctcactgaaccccaacccaaaacccatctgctcctctccagacccatttggtccgacggagaaaaccagtcgagatgaaggttgatccatatccagacgaaggtcgagacgattccaccaccaccgaagaagaaccgtccaccaaactcacgttcccttggtctttcaccaccagagccggcgaagttccacccaagaaccctccctgctgcggcgagttcggtccgagttgttggtgctgcaactcaatctcagtggagaacaagaccgagtcagaatttctaggtattttctattcaaaactttgtatatgggtattgtatcaatttttgggtattttatcaattttgtatatggatatgggtattgtattaatttctaggtattttgtattcaaaattttgttctattaatgtctaggtattgtatcaatttcagtgagggtggagaggccgcccaagggttttgaaaaccctagattgaaaacccaaccaagagagaaagagagacaagatcgagagagagtgatagaac

SEQ ID NO: 337331 - DNA, 741 bp, Cannabis indica
tttacttgctgacaagttaaacacttagcaacgtactcagcaatgtcattcttcatgcctggccaccacaacatagcctttaaatcctgatacatcttcgttgaccctggatgaattaaataaggagtcgtataagactcatccatgagctctcttttgatactctcatccataggcacaaaaacacgatttctgaatcgcaacattcctatttcatccactgaaaaatcactagccttcccagccgaaaccctatctcgggttttttaccaactctggatcttgcatttgtacttctttgatttgctctaaaagagtagattgcagggtaatattacctaacttcccgacaaccaacttaatcttagctcgggtcatctcatttgctaactgctgggagatttgtttcacagtatttatctgactctacccctttctgcttaaagcatcaacaattacgttggctttaccagggtgataaaggatttcacaatcataatccttcaccaactctagccagcgtctctgtctcatattcagatctctctgggtaaagaagtatttcagactcttatgatcagtggatatctcacatttctctccatataggtaatgccgccaaatctttagcgcaaataccactgctctgagttctagatcgtgagtagggtacctctgctcgtacacctttaactgccgagaagcataggctatgtaataccctaactaacataggcgtat

SEQ ID NO: 337332 - DNA, 755 bp, Cannabis indica
gaaggtataatcttgtaagaatgtacaagagaatcaagattatacgatgtgaataaaacaagtcagtggtatattaaagttctgagaatctttaatatggaactgctaagtacgatttactatacactatacttctagggtgtgtgattttgattcgaatcacatatatagatggacatgtagtaaatgtactgtgtataattagattatgcatgactggactaatatataataaacatctttattaacttattgtttaccataaaaagagtttatcatatcacaatgttgatcattagtagaccagcctaaatcttaagtatacatgaactactgtttgtattcattgagttctttgattcactcgttaaagtttctcagagaggatgagtcttgtaacttctattttgggagcttaataacatgagtggctgggaaaatattatacaatagtagaatccaagcttttttaatggatcgaatattagttctcttatagtatcaattgtgaaattgctaatagtttgatccaaaactataataagttatagattaactattcgcattgaattaatggtatgtatggaatcaagagataattagatggataaaacagtatgaccaactctaattatgaactaataattggagggctagctacttatgttgattatatcaatggactacaagtaagaattctgtaaatataattttatattgtcaaagagtacaattctatatttatagtggaataa

SEQ ID NO: 337333 - DNA, 1295 bp, Cannabis indica
aggcataaaatcgcaagtgtgcgagaatatctcaaaaaacggctgggaattacccagtgacccaaggggcatgcattttcgagcatgaccctgaagttactgtgaaacgcccaccgttttgagaaatctaaccaatcacaactggcgagtatatcacgcatatccgactagtgatatatctcatgaaacatctgaggaatctcctatatcttaaggggcatgcctttctcgtataacccttgggctaacgaaaacacctcactatttcgagcaaacctagtagtcaaaatatattgttgtatgggaaatgggaacgctggcgtatgtcgcaaatggctgggtgtatcgtagtttctcaaggaacatgcaatcgcacgcatgagcattggaatacggcgatacacccaccatttgaaagacttaactagtatccccacaacaaaatatatagagaatatagagaaaaccctaagttctaaacaacgggtaaaaatgataaagtccacagaattcctaaaggaagcagatatacgagtattctagatgctcatccaaatacccacgagtattccagaggtaagaaatcaaaaagatgcgaatattcaaaatattcttcctaaattggcagttatggcaattacaggtctgttttctcctggggattacccagttctaacaagggagtaaaactctatgtgtattacctacaactaaacatgcattttcaacctcttttccaaaatccaaaacattcagaaatgcaaggttttttctcaaacccataagcaaaattccaaagaagattcgaaagactaaccttgggattcgatgctcctctctgtaaatagtatcgatcgttttgagaagctttgatgattcaaaggggcagaacaacaatttgtttgaaaaggaggctttttgcctttgaaagcttcgggttaatggagaaaataaaaatgggagggaaagtaagaaaattatttcgtatcagggagcttaaataccaatacccctcattaattgggattgtgacacgtggcaacaggaatgcctaaggtcatcccatccaacggtcagccgtgggcacgcctacacgaaaaccgaagagtttcgtgacgtggcaccataaataagttaaaatgaaataattacagccgtcattttttgaaaccctcgatgggacaatcaaaggtcaccacctcgtgacaacctttcacctgtctctcgcgtatagtttccctcatgaccgcacctgtcaattcgtgaaactaggggcatgtgttatagtgagattt

SEQ ID NO: 337334 - DNA, 763 bp, Cannabis indica
acagggttggattgtatccaactgaagttggatttaaaaatgcttgtttttttgaattggaatataataagttaaaataataattaagttttattcttaatttcaattttactatgctaatttacttttttatatctattcattttgtaagtagtttttatctaatcacttgtttatttcaaatgtctcttgaaactatcaatagataaaaagtgttctttaatgagttagggatattatttgaggatgttataattttattgtataaatttttgggaacggttttatcttatgtgacttgcgataagaatgttgcagctcatagtttggcaaagcatacctttcggttaaacaatgaactatcctagctcgagaaagtgtcgctgccaactgtagattgctgcttcgttaatcatgtgtgattttaatcaccacgtcaattttttttttattacaaaaatataaactttattaatttttagtaaatgatgtaattttattaatagcaatcagctataataataatctacaatctaatcacgatatttccctgttggagatacaaacaggattagaattagataaatgagacaaatagttagccgcctaattcctaaatcatttgaccaaaaaaaaaataaagaattgttgcatcacagttaactttaagaacacttatactcaattttcatatatgcttaaaagacacaataatagaaactattagagcaggttcattcaaccttgtagattgaatattaac

SEQ ID NO: 337335 - DNA, 537 bp, Cannabis indica
gagtctttttgtaattctattttacaagtttaattaaaaagcaaaaattttaattaatcacgttttcaataaacctcgttgattagcaacgagctgcacaacatgtttaaaaatcacgtaatacgcctatgttagttagggtgttacaaagtggttctaagctcacgtggttcaatgggacaacacttatcccaatgggaaaagtgcccagacatgccccaaagcactttcaaatactgcacgtttgtggtggtggactgcccaacagcttacaacgcaatcctcggccgaccggccctagtggatttcggcgtagttacttcaatcaggcaatagtgtctaaagttccctactcaagaagcagggatagggaccgtgagaggaaaccagggagaggccaggcagtgttacaatgttactgcccacctacccatactgatggtccgcgaagttattgagccaggaatggcggaagaagatgaattggatccccgtgtggtatccgaaaaaattgtagaacctatggaggatgtcgag

SEQ ID NO: 337336 - DNA, 1159 bp, Cannabis indica
ggctaaatagtaacgttttttcctccgaactttgacataaaccaaatcatgaccccctgaacttttttgaccgttaaaattcctcttgaacaattgagattgttagatttaaggacttttgtctaattttagtaaaaaaattctaacatgggtgaagtttaggaggcatgatttagtacatatcaaagtttaagagcatgattggtagatatcaaagtctagggagcatgatttagtacataaacaatcactgaaatagtaaaattgaatgaaattagacaaaaatccttaaatttaacaatctcaatagttcgaggggaatttttaacggccaaaaaagtttaggaaacacgatttggtacacatcaaagttcaggagaaaaaaataactaattagcctaataattttagttcaagtactttaaatttcataattctaaaaatcaataaaatatgcaatcattaaaaagttaaattgatatggtacttttttggtaaggttttttttttttttttgtccagctacattctattaaaaaaaaaattaactttagctgagagttggtgaagacaagagtaaaagttattttattgttttatttatttttgctgaaagagtaaaagtaaatattacttacacatgacttgtgatgtcagaattctcatcatccaggagtaaaagttgtctttgcccccgggcactaacacaaggaaaaagttgaccaagcagacaccaaatatcacatatggcgtcaatggagggtcaacgagggtgcatttcttgtagcattttgaagttttgtctacgctacacactgcatatttttttttttataatttaattaatgtttatatgtatttatattattatatttataaaattaagaattattttttaggaaattttacaatgcacatttttaaaaataatgtgatgaatttattcttatttatttcggcacgacttttttagtccatttttttatataatcgtgcatattataattattttaaatatcttgcaaaattttaaaaaattttaacacgccgaaaataatacacttctttaaaagtggcctactgatatacttctacctattttggcattcaagagatttatttagtttttttttatggtcgtgtacattataattattta

SEQ ID NO: 337337 - DNA, 1255 bp, Cannabis indica
acatgccacgttcagcagaagcaacgccccctcgattatgtaaaggaagaagctttagagaaggaggtggacaaattgctgaccagcgacatgatccgggatgtgtattacccagaatggctggccaatccggtactggtaccgaaaccaaacggaacatggaagtatacgtggatgacatgttagtcaagtcgagggaaaacgtaagccatgaggattacctcgaagaatactttgaagtggttcggaggtacggaatgaaacttaacccgaagaagtgcacttttggggtcaaatcagaaaagtttctaggcttcattgttagccagcgaggtatagaggcaaacccagagaaaattcaagctctcctaagtatgccttcccttaagaagcacaaagatgtacagagcttaactggaaaggttgctgccctgagccggtttatctcccgatgcacagacaagtgcattcctttcttcaatgttctgaagaaataccaaaaattttaatggtctgacgagtgcgaggaggcattcaaaaaactaaaggagcacatggctaagcccctgatcctatcaaaaccttttctcgaagaagacttgttcctatacttggctgtctccgagaacacggttagcgcagccttattacgagaagaagagaaaactcagcttcccgtgtactatgttagcaaacgcatgataagggcggagacacgatacctagttatcgagaagctatttttttgcctcctaatagcctcgaagctaagaccctatttccaagctcacccaatcaaagtattaaccaaccatccgcgccgacaggtcttacaaaaactagaggcgtccgggagacttctcgaatgggccatggagttaagccaatttgatctacattacattccacgcacctccataaaaggacaagcgttagcggacttcattactgagtgccacgaggcagaagctaacgctaccatgcccacaacgcaagtcccggcgtggaaagtatttgtagatggtgcctccaacgaaaatggatccggagcgcgggtggcaatgatatctccaaacggacttcgactccaagcagccctacgatttgaattcacagcttttaacaatgaggctgaatacaaagccctgatagcagggctgaaattagcaaaagtcgtgggggccaaaagagtagaagtctacagtgattcacagctggtagtgaaccaggtatcgggggaatatcagactcgcgg

SEQ ID NO: 337338 - DNA, 1118 bp, Cannabis indica
agatggcgtaagcctcttttatgacaattacacgataatcaacaagtctagtgacgactccattatgaagactcacatcaatcaaggaaggataaaagattattttcacctaatccctaagatacctacggcataggtcatgtatgtgctattttatatctgtttaggaatttttatccataaggggctgacacttaaagacaaatgatccttttctagtgattctccaaaaaaaaaaacactataaataccccaaaaatagaacgtaaaaggggtcgatcgattaattaaggaatcgaagggagtaaagaaaagagagagagagagattcaccaagaacattctctgtacaagaactctcataaataataaagactcgtggctacggctcattaatgcccgaaccacgtaaaaatcacctgcattaaagcttccatagctcttctcattctataaattaattggttgccgaaaaccttggtcaacattttggtactttcattgagagctgaaggaagcgtcgttaaaaagaaaacagtcaaaaagtcagagtaacaatggtggaaactcgtaacaatacacatcagccccctcctcctcaggatgctcaaaatgccgaaggcgaggaagtggcctcacgagtaaatgtgggctcttaggagcgagatgaggcgaatgatgagggatacgaagaaaacttcaaagggtatgacacctacgatgaaggtagctatacggagctggtggtcttgaggcaaaaggcggctgatcatgaagtcgaacttgctgctcaaaaagaacagaataaaaggatgcaagaggtaatggttaccatgcaaaaggccatggaaatagcagggatacatatacatcccaaggccatcccagcggaacccgaggaaacaccgaaagaatcctcatcaagtactcagaaacccaagaccagggaaccaagccctatacggtacccttctgagcaaaaccttgagaaaaatccaacttcgatctcagggataaagaagaaggcataagatccgcgaaaattccgctcaaatttcccaaaagggaaaagtccgcagaggggctagctccctcgagcgagtcttggccctcaggat

SEQ ID NO: 337339 - DNA, 910 bp, Cannabis indica
ttgagagcctatgtgaaaaagcttagaaaaaaaccctcccttcttttaaagaaaaaccttctcctttatggctgaaaattcagagaatattaacaccccgcatgaggaaactaaccatcgttctggaaaagagcccatgggctccagaagatctaccaatccgcagtccaaaaggacgacccattctaggagggctcaacatgagggtggccccagtgctcggaccacacgtccctagagaactcaacccaacgttggtcctagtacgcggacaacacgatcgaggagaactcagcgtgggaatggatagaaccctggggcgagggataaagagctcaatcatggaggtgcccaatctgtgggagaaagaacttatgaaacagaaagtcgccgcctgagacgccatctggaagaagcacagcgtcaaaacgctgagttagaatgtggggcagctttggccagggcggcgcagggaacgaatgctcaaaatcaacctgaaccttgagtgagaagaccacgagacagacctcgtggatcacgaaccagaacataggaaaaggcccgggaataacaacccagggaaaatgagacaccccttgagaatcaggatgaacagccagaaaggaggcaatccggaacggatgaacgagaaatccctcatgaaaatgaggaggatcttaggactcaatcaggagaacggagatcacctgctagaaatcaccaacgttcttcccaaacccatagagcgaggattcgtacataccctgatgggggaaatacgacaaaccgctcttaggaagaaagaacagagcgtgaagaagcaagtgtgacttcgaggcgatccataacccatagtcgatcaactcaaagaggaaaaagtactcaacgagctaatgatcgagaaagtatg

SEQ ID NO: 337340 - DNA, 658 bp, Cannabis indica
ttggatctgtcaacaagttaatatagcaatttagatcaaataaataataggtttgttaaaaaaaaagttttgaataaataatataaataaacaagcaatgtccatgtaacatattgtgaaataagatattaatataattaaattattattttaaactaatcaactaaattttaaaaacttagggttgttaaaaccaaccttaaaaatctcatcaaaatttaaaattcaaaaatgaaactaattaaaatatcaaggttcatttaaattattttatcaaattaaattaaatatcaaataagataaatgatttgaaaaaaaaaaatatcttcaatatcatttttaaatcttataatttaaaaatagatatggttaggcaattattattttaagaataaaataataaataaataataatttttctaattatatgtcaaaatgtcttaaattaagcattattcaaatttcgacaaaaatatactagttatttaaatatttaaaatacaatttagaaatttctaataagtaaaatgatataaaatagtaaaatatcatttttcaaacttataatttataaacaattaaatatttaacaaaataacaaatttttgaatttgaaaatattacggttaaaatatctataaaaatatctaggttaatt

SEQ ID NO: 337341 - DNA, 570 bp, Cannabis indica
ataatctaaaatttcaaaattaaccgtaaggctatttttgtgaaaaataaaattttcaaaaatcaaagcctactaacatctaaaactaattttaattaattgaaaaattaataaaaattaattttattccgataattagatttttaattgaaaatttagattctacacaaaattctaccaaaatttgaactttattttaatgaaaaacgatttttgaatcaaaagatatcaccaaaacaagattgcactaggggagtacgcattgcatactccccatgcgcacaatacattgcaaatgggcgacagaagggctgctaacagcgtcatggggaacaaaactcactcaggaggggcttaggacagccttgtcgaattcagacatgggcctgtctaaagccgcgtcaaaccctatccgtgcacgcacagcgtattgctcggtttcaaatactttcatccaaattcaaaaaattataactaactcataaaaaatccaaattgagttctgtaaaagcctaaattcattaattttttgtctacttttcagtaaaaatatttccagaacaaaaaaaa

SEQ ID NO: 337342 - DNA, 726 bp, Cannabis indica
tttcataccaaattacaaaaaaacataactaatacataaaaaaatccaaattgagttctataaaagcctaaattcattaattttttgtttactttccagtaaaaatatttccagaaccaaaaaaaaaatattttaaaacatacattgtgatttccacacaatcatcaaatatgcacataaaccatcatgaaaccatccaaatcaacacaaacatcgttttaaatccatatttcatgaaagtaaatcattaccatggctctgaggtgagttattggattatattttaccagtatctagatttattaccatgtatgttatttaacatcctaaatatgaatctctaaaataatgtaaataaacacatataaagtttcagaaactttatagtgggtgcagcaaaattaaatgactcattccactccgatctctaacccttgtatcctttctgttgcagagtatcaccgagatctgagcccgattcttcttctcttggatttggattcttcacagtcttacacaatatgattgaggaccacttgatgcgtgtgggcacttactctatcaccatagggttcgatttatggagagaggaagagagaagagaggttcgaatagcatagggaagaaggctcaaatttttgactgaaggcaagtgtgttcatcatccttcaatttgaggccatcactatctatttatagggaaccacttaggtttatgtttgaatt

SEQ ID NO: 337343 - DNA, 1150 bp, Cannabis indica
attgtattcacggaggaagacgagaaaaatgtgaggtatccgcatgtcgatccattggtgattaccattcaactcgccaataaaaggatcaagagggtgttaatagacaatgggagcttggtaaatatcctttataaggagactctacggaaaatggcgcttgaaggccaaattgaggcattgtatggtgaatctttgcgaattcaccggagatagcattgctagtcttggcataatcgagctcgcattaaccttaggcgaggcacccctatctgccactgttatgcaagacttcttagttgtcgacctgccatcgacttataacatattgttgggtcgtccagcactgatcaaactaggggcagtcagttcgatcgagcacctatccataaaattccaaacgcaagaaggcgtgggagtggtgtgtggcgaccagatgctagctcgcgattgctatcgcattgagttgcagcataggaaagccggtcatcagttgatggcgatcttggcagaagaaaatgggaagaaagacgaagatcttgaccctccgagttcaagatgagagaaacctattgaaaccgattgaggaatcagaagaggctattctcgacctaagaaatcccacaaggtgtgtatacatcgggaaaaacctggacgatcagctcaaataacaactaataagttttttgaacgtgaaccaggatcaatttgcctggagccatcgagatatgatagggatcgaccctaatattatctgccgtcatttaaatgttgatccaaactatccagcgaagagatagaaaaggagacccttggattctgagaggcaaggggcactaaaacaggaagttgacaagttgttagtcaacgactttatacgcagggtgttttatccctcgtggatagccaatcctattctcgtcccgaagcctaatggaacttggagaacttgtattgatttctctgatcttaataaggcgtgcccaaaagattgttttccacttcccatgatcgaccggttagtggatgcaactgctgggcacgagcttatgtcatttatggacacatattcttgatataaccagataaaaatgtatgtcctggatcaagaacatacaagcttcgtcaccaacatgggactctattgtta

SEQ ID NO: 337344 - DNA, 661 bp, Cannabis indica
tttatttttatttattatgttacaaaaccggttatattttaattataaccggtttgagttattttgtgttatttatatttattcattatgttctataaccggttctatttttgtttatatctgagacatctacttttggtgatttttttttttgcgacggtgactttttcagcaacggcgaatttttcggcactagtgactttctcaacgaaacttattattgttttacaaatattgtatttctatcttttttacaaaaatatggcataaaaaaactcatataaatatatataaaaacacataactccatggtattatttatttatgccataaaaaagtaaactctaaaaattctcatatattgtgtaatttctactaaaatgaaccatgtatgttctaaaatggtgaaaataggacactgagctcaattgttgacaatatttttaatataacttgaagacaattcgtaaaacgaacagatatataaaatgtaaccagttttgtcataacatctctagatcggattattattaagttttattttgaaaaaaatcagttcatggttctatttgtatcattttagaaaatacatgatctattttgtcatttaacaaaataaaaatccgattgataacttttacaaaatataaagtccaaaata

SEQ ID NO: 337345 - DNA, 1053 bp, Cannabis indica
ggtccagatcaggctccgggtgtgggttcacgtcctgggtctttgtctaggttgggtctgagtctgatgttccaatcccgatcttagtcaggattcaattctgggtctaagtccttggttctgatcctggtctaggttcgagtttgggtcctcgtcttggtcttgctttgggtccgattctaggtgtgggtgtttgagttagggtctgagtctgtgttcgagtttgtatccaggtttggaccctgatttgggtctctgttcgattccaggtccaagttcgggtctcgagtgcgagtccatgtttgggtactctcaaacccctagacggagaagaactgggaatatacttagctgtcacagaacatgctgtgagtgtcgtgctaatcggagaagagaacagcgtacaacacccagtctattacattagtaaaagactcattgaggccgagggccgatacccattgatagagaaactcgcttactgccttattctagcaataaggaagttgaggccttattttcaagctcatcatgtttgggtatacactgactagccactacaccaaatactacaaaagccagatgcttctggacggctactcaagtgggcagtagagttgggccagtatgaaataactttccaaccccgaacagcaatcaaaggcaaagccttaggagactttgtggtagaatgcaaacgcaaaaaagtaagcataccaaaaagtaaccccgagctggtacaaacacctcagctaagtaataatgaagataagcggacctggaaactacatgtagatgggtcagctacagatcagctatctggtgcaggaatcgcccttgtcacgcctatggggcaacacctgcacactgcagtcaagttcggattcaaagcatctaacaatgaagccgagtccaaggctctaattgctgggctaaagctattccaggcaaagaaggccgaacacattgacatctgtagtgattcacagctagttgtaaatcatgtatccggagaatacgaggctcaggcacaaaagacgatagcatatctga

SEQ ID NO: 337346 - DNA, 664 bp, Cannabis indica
ggccaagaaggacgctgatgacatcagggtggaacttggagctgttcagatggagctgggtgaagtcaacaagaagcattttactgctcaaaagaaaataaccgatttcactaatgatctcgaggcttctgaccgactttaagagaccatcgagaccttgtctgcagaagtggatagccttcaagatgaaaggacgtctcttcaagctgtcctctgtcaacaggaagaggagaagaagtctatcgaggaggagcttatagttcagattgaggagtacaagtcgaggatggcgacgtaggaagaaaaggtgcatgccttagagacagctgctctcgagattttttatgacttttgaaaggctaaccctcaggcaaattttaattaactgggcgaggccaaagacatgtatctcgagtattgtgcttctcaagtggtttatggttagcccgattcaactgcttcttccgctggctagaacatcgatgtacctcccgtccaaacaacagatcctccaactcctacctgcccagaagatctgaaccgagagcctgggactccagccgtttaactacttctctttttatccatctatttttatatatcttatttagtcataaggccttttttaagcatcatgaccaaccaagcagtctttaaacttgga

SEQ ID NO: 337347 - DNA, 556 bp, Cannabis indica
gggctagagatcttgaacggaggagtcatattattctgatgcaatcaatgtaaggttttcttaaacccttatgtgtttattttcattgttttagcgaattcatatttagtatgttaatcaacatacttgttagtaaatctagatcctggtaaaatattcccaacactatgggcctctgctcagtcgggagggtttttttcttcttgagcggcctctcctgctcagaatattctttagcctccttctactgctcagaatattcttgagcatactgcttggctctagcatcacccttcaacttagcctcacgcttaagttgaatgagctccttctcctactcagctcccttagcctggccagccctggacttcttcttccccttcacaggctggggtataaagtctgccggataaagcttgtacttcacaaacttgtcctccgaggtcaacaaagtgatattccgagcagcatctagcagttggactatcttttgagccatatccctaagtaccaatgtaaggggtggacgacagtatattgggatctgttgaaaccg

SEQ ID NO: 337348 - DNA, 580 bp, Cannabis indica
tgagtttttgaactcaaacttgcataacttttgctacaaccacccaaaacaattcaaaccacttctaaacagtcctaaataaccttaattatcatctcataaccttcctaaacttattcaacatgttatactataaacatccactgaaaactaacaaaaatcctagaaaactaataaatttcaggttaggttttaccttagaagttaggaggagctaagggttgaactccttgatgaattccagctaggaagaggcttgaaaatggtggaaaactctgagttttggccctggttcagaagccacgaagtagagggagaaggagaaggtgacttggtgttttttgacttttcttttacttttgaccttgctttttcttttgggttccttttattttgcttttccttttttgtttgcttcctaagcagccggtcatcctcaaaaggatgagccacagccacctatcccttccaaaaagagtgactaagctctaagggtgaaaaagactaaaatgcctttatttccctgcaaagttatctcgtggccctaggggtaaaatggtccaattctattatttcgtta

SEQ ID NO: 337349 - DNA, 547 bp, Cannabis indica
ttgacagatcaatgaattgttaaatatgttaagcataatatagtacaatgagatttgatataaccatcgctacaaataataaaaaaaggtgtgatataataaaattactagctagttcaagcactccgaacaataacaatacgcatcatgtccttgaactcaaagaaatcaactcggccgtcatgattttggtcaacaaatatgatcatcttctcaactctgtcaatctcattcccttcgtcgaatttaagctttctcttcgtccacccatccaaaatcgcaactctaacagtccgcttatatattcccctacagagagagagatcgagatagggagagagagagagagagcgagagagagagagagagagagagagagaaagagaagaatgacaaactgggcgaaggagcgctggttgccatggagcctcttggctgctgttcgtcggagataatggtcatcagagagaagtggggaagaagaaagactgcagcgagaaggcgggggaagaagaaagactatggcgtacggctctgtaagttaggg

SEQ ID NO: 337350 - DNA, 783 bp, Cannabis indica
tgggtgtaaatttcccaaataaaatgattactttgattgttttatttaagcccatttagtatcgaacttattcaattaataataattatttaattaaggttaaattactctcttttgaaccttgtgtgagagttacaactcatttgccttatttaaatgattgcattaggctaattatattagtttaacctaattaaaattgattagcaacataattaattttcaaaatatatgaaatttatttttcatcatattattttgaaattaatttaagaaaaacacacttaatttaatgaaattaattcaagataaattatacgtatttttaattaaatgaagaagttgtatctaattagatttttcaaaatacttaattatttaaaatttcttaaaaaatatatttaagttaaaaattaattttagaccaactgaaattaaaatattttttgaaaatgataattaagtagatttttctagataattagttattcagatattttttgaaaatagatttatgttaaaaattaatttcagatcaacttaaattagaatatttttcaaattaaattgattagttcaagatacttaatttgttatttaattaaattttgaaattatttttaagttaaaatttagttattttagaacaacttaaattaaatattttcaggtatttattttattatattttagtttaatttcgaaattatacataatatcatatatataaagatttttgaaatttacattaaaagttaaattaaagttgaaaattaatctttt

SEQ ID NO: 337351 - DNA, 712 bp, Cannabis indica
ccaaggcgaattgagtttgtagtcgggaagttggcaaatatttcattgcattctgatttatttgaaagaataacgattggcaaccagaaagatctcgaattgattgaactcagaaagaaagttgagattggtgctacgaaggatttcactgtgactccaagtggactactaagatataatggtagaatttgtgttccagcagatgatcaaatcagaagggaaatccttgatgagctccatactactccgtattccatacatccgaggaccacaaagatgtatcatgacaccaaggcaatctattggtggccgggaatgaagagtgatattgttgaatacgtttcaaagtgtttaacctgtcagcatgtgaatgctgaacatcaaaggccggcaggtttacttcagttcgtgagaatacctgaatggaaatgggaagacataactatggacttcgtagtggggttgcctaggactactgggttatatgattccatatgggtgatagtggatagattcaccaagtcagcgcactttttacctgtgcgagtgacttatactgtggaatagtatgctgaattgtatatgaaggaagtattgagactccatggtgccccaaagtcaattgtttcagatcgtgatcccaaattcacttccaagttctaggagagtttaaaaaaagctatgggaaacaagttgagattcagtaaaactt

SEQ ID NO: 337352 - DNA, 597 bp, Cannabis indica
acatcgaaatgatgaacgttccgctatcagggggtagagtacctcccatggatgtcatcaatggcggagtaggccgaggtaatgtgagacccctcaacctattccctgaaactactggccctcaagctggggaaacatctacaccagcagccacaacggggcactttccacctttcactccagcgacggtgtccaaggtatcgtccagctgaccaccgatcagtataccgcaatccaagaccagctgcgcgccctacaagccgaggtgccctcctcgagcacccactactcgcacagaaaatcctcaggtaactaactctagacgtcgttaattaccgtactcgcagggaatgaaggaccaatccagagggactcgacttgaattaaccaacctcgagggatgaatttgcgagatatcttaaccaggaggcacacactgaggaagaccctgagcgacgcaatcctcgcagcacacctcagtcgcgagacaatgacgtggaatccacctcctcgtcctcgcatggtcgcacacccaacatgtatactaggtccggttctgtggagacactacagggaggacgatatcaggttcacagg

SEQ ID NO: 337353 - DNA, 661 bp, Cannabis indica
tctttatattattgtactgctctctctttaatagcaatggggaaataataaatttgtatgtaagttattttcttcaatatcatatactgcaatatatgtttcagtttttcttttgttgttccactgttgttttttagttgttctcattcttttcatttttgatgtcttctcctatatgttctcttgttgtgccccagtttcccacattctgcatttgttatgttatttttttcctagccagctttcatcctcttttgttttggttttttagatttcaccactttaatggaatgtaagactattactgtccacgattctttcattctggttacctcaaacaaatattcagtggttggtttaacatgtgtaattaaaaacctacaattgttaaacatatgaaacaatagtagaacaacccaaaaataacattagaaaaacaatgatagtcataatattaatagttttgatgtttttgcttcatctcaccggatttaatggttgtttttcggttgttttggtgttgttgtggtggttctgtctgtgagtgtaaaagatggacacctcgttttttattttcagtatttacagtataaaagaaaaaaaaagtcccaaggcagtataaaagatatttttgccgtgtgacagtatttttgtaaagatt

SEQ ID NO: 337354 - DNA, 597 bp, Cannabis indica
tgatgaatcagagactttgtcttttgaagcatataatcacaatcacattccactgtgttgacatcactgtaattgtgaatgactatatgttctggacttacagattttgtatatattaaaccataaacatgaaaactacatgtaaacataaatgacttctaatctttcattgataacaaatcaaattagattgaaatgggttttatttagggcataaaatcccaataggcttaacatcaaatgttccttcaaactgagttcgaaggatcttccaagcttccttaacaaattcacacgatgatataagcttaatataaccttcacatacaccattaaatatagcatgcaacgctttgctattgtaggcagaaagtttatcatcttcaatagaccattcgagtttagattttattttagaataccttcggaatctatctcaactagagaagaccaacctgatagaaccatccttcaagctctttcatcttgagatttgatgaaggctctcattctaactttccaaaaaggataattagaatcattgagcaaaggtgatctacaaatcgaacctccttttgcaaaaatgacattttacac

SEQ ID NO: 337355 - DNA, 658 bp, Cannabis indica
aatggttaaataaaaataaattttctcaaataatgagctttaaatataagaacattcgatctccattgttggttctacatagttcttgttttaatgagatttatccttaatagatgttcattcattagcaatttaacgtcgtagaatttcgaaagataagtattgttgtaagtcttttattcttagtaacgatcaccccaatagtgtcccctaagagtagggcttacaaagtatgaaacaatggtagaagctcatgaaataggaatgaccttaattctcgcctaaacgggacaacgtcagattctcttttcgatcgaataagaagttgctagaatggtatccattttagataagctggctactctattcaatgaatgatatctttgactctcgcctaagcttatactaatatcattttgttgaaaaccttagaaaataattgaatatatattttatttttagtatttttacaaacatgttttcattacttgttattttcttaatatgtgtatgaatttatttgaaccaagtaatttatttttgtttattgatatttatactgtcaaaatattgtttaataatcctcaccctaatcctcatttactctatgcctttgcaaatgaactctaaagtgcaaagatgactcctagttagagta

SEQ ID NO: 337356 - DNA, 517 bp, Cannabis indica
tagattttctttaattaccgtatgatttaattatttatgcctcttttataaaccctatttgattaaagttaagattataagattaattcaaattattgttcatatattgattaatcccattaatcaaaaataattcaatatatgaaccctatttgattaatgccattattaagtcctttccctttaactttccttttgttgatgatgctaatttattcatattaagatagtgttctactaggagatttagcgagtttcgccccttcgctaatagtctctaagagttctaataaatacaaataaaattatcatgatgtatacattatggttatttaatgaataattagtgtgttgaaattgtcaagctgatatttaaaattgtttataattgaattgtttctttgtcaaaatcaatattaagtatatttatatgtttataggtttatttattttctcttagatcaattatgctcatatagcaaaaaaatcatactcatatagacatgttattttcatt

SEQ ID NO: 337357 - DNA, 578 bp, Cannabis indica
tttcataatttgagttgtttattataatttgatgcttgaattgagttggttggggtataaacaggtatactggaagtttttagaaagtttgggattgttttgatttaaagggctcgatttttgggttcccagcatagaaccgatcgaccggttctgggggaccattagaaccggtcgaccggttggtacccaggaaccgagcttccgattgggaaccggtctgctggttggggctttttttcgaaccctagtttttcccgcttttgtgttgctgagggtgttagtattaggggtgttcatcaaaccgcccaaaccgctcaaaccgcccgcaccacaccacaccgcaaagaaaatgcagtttgaaattctttgcggtgcggtcgcggtttgaatttttcctaaaccgcgcggtgcggtgcggtttgcggttttgaattgttaatatgtggttcaaaccgcaccgcaccgcatattatgaaaaaaccaatttttatatttatttaagtctaatatatgaatgttcaacttaaagtctactattctttcaaaaaaaaaaacttaaagtctactaattattg

SEQ ID NO: 337358 - DNA, 761 bp, Cannabis indica
gcataaaacccaacaatttcctcaacattgaaatatgaaatacatcatggacagccgacagtgctggtggtaaggctagccgatacgctacctgctcgaccttctcaagtatctaaaatggcccaatgaacctagggctcaacttacccttcttcctgaagtgcctaatacccttcattggtgaaacccgcaaaaaaacatgttctctgcctgaaatgtgacacgtctatgcttcggatcaacataacttttctgcctgctttaggaagcaagcattcaagccatgatcttgtcaataacttcattggtcctctaaactaattctggacccaagtacttccttttgcctgtttcatcccaatgaatagggcagcgacatttcctaccatatagcatctcatagggagccatcgctattgtactctagtagctattgttgtaggagaactcattcaaaggcaagtacttactccatgaaccctcaaagtccatgacacaggctcgcagtaaacttccagtatctgaattgttctttctgactgaccatcaatctgagggtgaaaggctgtgctaaacttcaacttggtacccatagccttttgaagactcacccaaaactttgatgtaaactttggatccctgtctgaaacaatggatttaggagctccatggagactaactatctcccttacatagagttcagcatactgatccactaaataagtaacttttagttttactagcaaaaagtgagctgattt

SEQ ID NO: 337359 - DNA, 600 bp, Cannabis indica
acagatggtcgatttagtcacttgggttagcttggaaccctttttactagagcagacccagaaaaacgactcgtttagctaattttctcgtatctgccatttttaggcagtttccccgtttagctaattttctcgtgtttcctcgatatttaggcctttgccatactatttatcaataggaaaactttaagtttcaagtttcaagtctaaataaaacctatttcaatataattaaatttactaattaataaaagatcataaattattttatgttgcatgattcacatgatttatttcatgattataagtttaatgtataaattttattaaatcgagaacatatagttattcatgattatagtgttgtcaacatactagaatataatcatgattatatgtttcaaagtttaagtcccataatttgtcaatgcactattttagactgacatgataattagcgagaaagcttacttacaccttggataagtgttatgtcatttctagggcattggaaaattatactaggagcagatgtatggagtatgttggaaatattttactaggatctagatttaataccaagtatgtttcattaacatc

SEQ ID NO: 337360 - DNA, 518 bp, Cannabis indica
aaataaataaataataataagatccaataagaaatctgacagtaatggtagaatccttgatctctgagtcttacctcatcaaaggcttcaaagatatcaatacttggttgatgaattgtgcacacaactgttctgccagtatccactgtgttcctaactgttctcataacaatagcagcagccctggcatctagccctgaagttggttcatccatgaatattatagaagggtttgccactaactcaactgcaatggttagtctttttctttgctcagttgagagaccattcaccccaggcaatccaacaagtgcttgtctaagtggagcgagttcaacaagctccatcacttcctcaatgaacatctatttaatgacataataacatattaagatcattaaaatatgttagcttgttcttctttgttgtttttttgtttaattggcttgctttatttaaaaaactaacctctctctttttagagtcaacttcagctggtaaacgaagccatgctgagt

SEQ ID NO: 337361 - DNA, 644 bp, Cannabis indica
ccatagtcaactatcttctcgatggtcaacttccaactgaaaaaattgaggcacaaaaactcctgtattcagtgtctcgctacacgatagtagagggaaaattgtatagaaggggctattcaatgcccctcctttggggtgtccttcccgcagaagtaaacgagatcatcaaggaaatccatgaaggcttttgtggggatcatgcaggttggcaaagtctatcaaaaaagattattagacaacgatattactggccaaccaaaaacaaggacacccatgaatttgtcaagaagtgtgataagtgttagagattttcgcatatacctcgcgtaccaccaacagaactgagaatgatgacctcgtcttacccatttgcagtatgggggattaatttgattggggcactttccacagggtgaggaggagccatgtacgcagtggttgctatcgatttctttacaaaatggacggaggctgaacctctggtttccataatctataaaaaagttctcgactttatggttaaaaatataatttgtaggtttggaatacccattaaaatatatagtgttagacaatgagactcagtttgatggtgaattattcactgagttctgcgaaaggaacaagataatcaaaagctt

SEQ ID NO: 337362 - DNA, 1161 bp, Cannabis indica
aaagaggtaaagagagggggaattgggttcgaggtgcaaaaaccaaaaaatcaatcctttaatttccaaataatcccatttactacaattaacataaataagccaatttaccataatgcccttagggccataacacacataagcaccaatacaagggcaaaatggtcacttacaacataaattttctcaaataaaaatttagattattcacatataattataatgccaataaagaatcccagaattgtacttcggccccgaactcgattcggcccgaaatacccggtggtcactatattgcgccaacctgtcagaacacacctaaaagtgacaacacagacatactatataataatatagttccataagcacgtaaatatattaatttcattattttacccttctcggatcaaaattactaaaatacccctgactcaccgacggggtcttaatatggcatatttcatattaattctcatataatagattatataataatacaatcccacaataatacacatttaactagttagggtttgctattccattctcttaattctagggtattacaaaaaccttctttatggctgaaaatccagagaatattaacaccccatatgaggaaactaaccatcgttctggaaaagagcccatgggctgtaaaagatctaccaatccacagtccagaaggaccactcgttccaggagggctcaacttgaggatgaccccagtgctcggaccacacgtccccagagaactccacccgacgttggtcctagtacgcggacaacgtgctccaggagaacttagcgtgggaatggtcagaatcctgggacaagggatgaagagctcaaccgtggaggtgcccaatctgtgggggaaagaattatgaaacggaaggtcgccgcctgagacgctggctcgaagaggcgcagcgttgaaatggtgagttagaacgtgaggtagccttggccagggcggcgcaggggacgaatgctcaaaatgaacctgaaactggagtgagaagacaacaaggcaaacctcgtggctcacgaactaggagacaggaaaaggccagggaagaacaacccggggaaaatgagacaccactagggaattaggatgaacagccagaaaggagacaactggaaactgatgaa

SEQ ID NO: 337363 - DNA, 797 bp, Cannabis indica
ttagtttaaatttggaaactagctattaattaaggtttgattatgaaattagttattaattctcaattattaatttatgatgatttatttgaattcagaatgcattttatatgtcatatatagaaatttcatatttttgcatgttcagtgctcggcaacattggaacgcggtgtatggctcagtagaatcacatcttggtattttagtatagcgggacggtattgttagacattggaaatgttcagattagtcgggaatttagaattttccaagatacccttagtacccttttatgttaatttaatgtgagcgggcaaaaaggtcattttgcctatatgtgctttgtcctttgtggatttttaattaaattattaatctgatttttctagctttgtttggctgaaacaatttaataaaataaggaaaatcaattctttaattcattttatgcaaaaatgaaaagttggacaaaagtttgcatttcactctcaagttctctctctctttcggaaccctcaaaaccagctgggattgctgtgtttttctccttcttcttgttgattctagcagattttaagggatcttgaactcttggtaagcttttgactttgtcttcttgagtttcttgaattgtaagtaagtaaaagttgcatgctttgaggttttgcttgctgtagctactgttaatgtttagtgttgttatcggaagcttaaatatgtttagttatgtggattcaagtaggttttgttgattgttagttagatttaaccaagtttgagttttgaactcaaactt

SEQ ID NO: 337364 - DNA, 631 bp, Cannabis indica
aattttttttttttttatttttagtggcaattgtggaatgtatgccatggagcacattgagcacttgatgctggaccggtcgttggagcatgttcatgatggtaacatgctcacctttagacataggtggtgtgtggacttattttaccagaacttaacatggtagttttttgtaggtttttgtaatgttattcttatacacataaactccccttttgtaattgtattataatctcaccaaaattatatataacaagtaaatttaaagctatttaaattgttgcttgtatcaatttctttatttttttaatttttgataaatacctgtcttataacggtaactatgggaaatgatgacatcttggaaaatgattctggtaggaatcgcattaaaatcgcacattaatcgcataatatcgccaaaaaatacagaaccaaacaaactaaaaaatcaagatcctgtcagttaacatcgcacagtaatcgcataatatcgccaaaaaatacagaaccaagcaaactaaaaaatcaagatcctgtcagctaacatcgcactaaaatcgcacaataatcgcataatatagccaaaaaatacagaacaaaacaaactaaaaaatcaagatcctgtcag

SEQ ID NO: 337365 - DNA, 650 bp, Cannabis indica
tagtatgtgttgtgccactatctagtatgcaagaatctctgatattatctttacgttcatcttcattaagagtacaatccatttaatacttcaagagataacaataaggataatgtgagaaatatatatttcatcaaatagaaatagtacaagacaaaacattaatagaaatgcataatacacaaaacatcacaagtacgtaataaactgaagataaatgcataatatatcaaatatagtagttaatcctagattatacttaattttctctggcatcacaaccactagactcattattatcattgaaattgtctacgaagtcggaagcatctagatgagttgaatcattcataggatcatattgttcaattaagttcacttctttctccttttcttttacagaaattttatacaaatcacaaaggtgtttcgtcgtacgacatgtacgagaccaatgcccttttgcaccacatctataacatgaatcttcaagattttgaggatagttaccatgaacattctcatccgcatgttgtctcttcctttggttgtcaaaatttctttctaaggaattatgaccatttcgtctagggctaaacatttagacccgcgaacccgaaaacccagccacctaccccgacccgctgcca

SEQ ID NO: 337366 - DNA, 102 bp, Cannabis indica
gtcaacctgggtcacacgcgtgttcggacaggattttgtccgaacacgcgcagctcacatttttttcgtttttctttgttttttcatgctttttcatgaaat

SEQ ID NO: 337367 - DNA, 1128 bp, Cannabis indica
aattttttattttttaaatattttatttttaatatttgatttttattttataattttatttaattttaaaataatttttaagtaataatattaggtgtaccaatataaatgtgccacgtataaaagactatacacataagcagtcaatggaggcagttaatcagatgtcaccttaaattttttactagtacagttatttggagggttttaccgctaagatttgagtttggatggttaaatgcaagtgaaataacagttgggagaatttagccgccaaaaattcttatttttatgagcattactattaggtatcagtagtgcccaacaccttctataagtgacgttctatgattggttagtgacatttcctaaaaactattaaattaagttatatggaacctgatacttaattacaccaatagcggtatgacactgaggagagtactagacactagtagtgcctttaatatttctctatttttattatttatttcacatatatttaatttattgattatttttttagaaaaattctacaatgcaccctcataaaaggggtgtgtatcgatgcactcccatctgtttcattatctagaagaattttttagtgtaatttttttgtaattatgtatgttgtaattatttaaaatagcttgcaaaattttgagaaattcagaaaaacatgattcaaatagtttgttatagcatgactcttttattttatacgcgtgtgaaatagatagtttcaacattattttctatattgcaaattatttcaaatttcttaaaatttaaaggatgtcttaaacaattataacgtacacaattataaaaaaaattaaactaaatttttttcgatgctgaaataaaaagagttgaatcaatgtacaaaatattataaaatataataatatttcataaatttccaaaaataataaaaagtttacgttttacagaatattatttttctcttacaaactattatttttagggattattttacaaatatacaaaaacaacaacaaaaaaaaattacaaaaaatacggttgcacagaattttaaatatttttacgatttttgtgatttttttttttgaaaatatattcttttgatatatttttatgttg

SEQ ID NO: 337368 - DNA, 538 bp, Cannabis indica
atggacactcaagacccgaattgctatgttcatgcctaggaaagttaagagcatcgatagagattggtttcttgctttgtaatggaaatatagatgtcatgtatagattttagccgaatgtatatagattcttgacccttgttttgggtgtctataggttgtaaaaatcttgtttgtgcaatacaattcattgatttataaaaaaaaatatatttaattaaatttaatgatattatttgtaaatttaattttataaatacataaatattatttattttatattaatttaaatatatattaatattacttgttttagattaattgaattaaattaatttaaatagatatattaatatattatttgtaatattattattttttattgttgtttttaatattgggggtatgttcaattttaatattcttaaattttatatttatttttctcaaatttttaacactttaaatattatattttttgaaaaataattaataagtgatttcctttaatttataaaattttaaaaatacgcataac

SEQ ID NO: 337369 - DNA, 553 bp, Cannabis indica
aatgggagttcacgtgagtgtgcacaaatttcaagaaataataaaactaaaaaaaaattgttttattgtgagaacttttgttgttttgttttcgtacaccaatcggtacaatcttctccttgttaaattactatcactagaaaatagtaccactcacttatacatgattaaatcgaaccagtggctcttataaataggtattgaccaactaaattaccactattttattcggcaaaattataattaaatacacttttcaaccgataatactttgtaaaaccatatgaataataataataataaaaaatcactcaatagtgttccaattcatatacgagactcaagaaaatgaaccgaaccaagcttctccaatgaaatcacaggaatgctctgttcattcctgaaaaaatttgttggatctacccttctctttatctccaccaatctcccaaaattctccttaaaataactaaccccaagagcattagcagttcgataattattagtcttccaatcgtgatcgttgattcccaaatcaagatctctgtagttc

SEQ ID NO: 337370 - DNA, 782 bp, Cannabis indica
tttaaaaattctgtataaatattaaagtaaagttcatacccataagtccattcactctcgataaatggtccaatcctaaggcaagcataaagtccttgtgattggatttcctttatgaatttgactaaatcgtatcgaccgttgaaatcgtactgttagtttgatcagaaattaataaataaacatgccatgaataaatcaatacaaaattatgaaagagttatactacttaaaagtagtgagatgtgagagtgagagtttgagtagttaagctgatgattgatcactaacctctccctgtttgggctcatgaaggttccaaaacacatatgtctgaatcacatcaactcctccctctttggctttttcaatcaagtatggccacatctgcattattataagttattaccaaggttccaaataatcgcaatttattaaacggtttcactggatttgttctccaattatactttgaataattaaaaagattatgagcccttatattatatactagatgagagtaacttggcgagccacgtaaatattagttttatataagttctagtggtttttgtttaagaattcagtaactaagcaacagcaacaacaatggtagatagatctatttaagtttttcatatttgtaaagattataaatctaaacttttaattttcttgatttaagattttgaattgttctgatttatttgtttatcaatttattgaaatacttgaatatttatttgttctgatttttgaattattatgatttattcatattt

SEQ ID NO: 337371 - DNA, 694 bp, Cannabis indica
tggtgcctaataatgctaaatcttcagtgtactgtagtagtatgagtgagaatgaggttagaagggtgcttgacatgtctggttttacaaagcagaatgagccttttaagtaccttggagtgcccatttgtgctaggaagatctcggcttctaattgtagtagtctagtccagaaaatagtagcaagaataacaatttggagctcgaggaacttgtcttttgcggggagattggtattgattaaatgggttcttctctccatccatatctattggtgccaaattatgttccttcctaagcaaatcattaaggagcttgaagcaatatgtaggagcttcttatggacagggaaaagcttgatgaatggagcaggggttgtagcttgggaaaaggtgtgttgcccaaagaaagtagggggtttgggattgatgtatattcctcactggaatgcagcagccatggtgaagcatgtgtgggcaatagagaagaagaaggacaatttgttggtgaaatgggttcatagcgtgtatatcaagcaacaatcgtggtgggagtacaaagtttctgtgaatggaagttggtattggaggaaaatagttgagcttaaagataaaatcaaaaaccatgtacaacatagcgagttctcaccacatgactacaaaatcgtggagggccaagcttggtttgctcaaga

SEQ ID NO: 337372 - DNA, 787 bp, Cannabis indica
tcataacgagtatcttgttttagaagtaaaccagaacccattggaggaccaatttgaccaagtggactgtaagtttctcctccccaatcaatatatgtagccaagtctttcaatccaccactaaatatgcttgatggccaatatccgatttgatcataattcgttccaaggttaacccaccaatttccagtaattggatcctattatatcatgtcaaacaagtataaaataaatacaaaccaccaatgttaaatttgagacacattttttttttcgtttaaaacaaaaatattaggataaacttgaatgaagaaaaaagaaaattaaaggaaaatatttaattttatttacccgataaatactaatttccatttcccatataggtaaagtaccaggatgagtttctctcagagtcatttcgatcataggtttaggattaaccagaacaaatcctggacatactgtattgaaacaagataattcaccagcctacaaaaatattgcatgattcataaattacacataagtactacacaaacaatatgaagaaatcttaaataataacataaaattagggtaacctgaaaatatatgaagattcgagttcgattatccccatatacactaggatttacctaataaatgacattatagacattataacaaattaataagtgaataaatattctaaaacattgcagtttatctaaaaagcttgagttgagttatttttaacaaataattagtagaaaagataagaaaatagaacttactccccaaccaactt

SEQ ID NO: 337373 - DNA, 617 bp, Cannabis indica
tgtgtgcttgactttgaacgatcattggtaaagtaccttcccctaatcgagttctcatacaaaaatagctatcaggtaacaattgggatggccccttatgaacttttatatggaaggaaatgaagatcacctattcggtgggatgaagtgggtgaaaggaagttcttaggccctgaagctgttcagagaacaagtgaggcagtggataaaatttgagcgcgaatgctcgtagctcagaatagacagaagagttatgctaatccaaagcgaagagacattgattttcagatcgaggacatattattgcaccagatattgctgatgaaaggcatcaaacactttggtaagaaagggaatcttagcccgaggttgattggatcttttgaaatccttgagaggatagggcaagtagtgtagaagttggctatgaccccagtggtggcagctgtacaagatgtgttccatgtttcgatgcttcgaaagtatgtctcagatgcgtcccatattctgagttatgaagcattggaactacaaccatatttatcatacgaggaacaatcggtgcaagtacttgatagaagggagaaaatcttgagaaataagacaattgcactagt

SEQ ID NO: 337374 - DNA, 528 bp, Cannabis indica
aggaaaagccaaactcaagtttcaaaacagaattttggaattagacaatgtcttatacattccaaatttcagtagaaacttggtttctgtttcatgtttacaattgcaacaatacatattggatttttcgagttctggttctacaatttctcgaaatgacattcaaatttgttttgtgtcaatggattaggggctttatgttctaagaccagaagaaccatttgcgcttaataatgaactgcttaaagtagttaaacctagaaaccacaaaaagcaaaagatcgataatgaagatgaaacatatctatggcacttacgtcttggacatataggctatgatagacttcacaggttaaccaaaggtggtccattaaaaaatgtcaccttaggtgaattaccagtttgtgaatcttgcctaaaaggcaaaatgagaaaatattctttgtggaccaaggaaccactaggcatagtacattcagatctttgtggaacactgaatgtcaaggctagaggtggttatgagtactt

SEQ ID NO: 337375 - DNA, 760 bp, Cannabis indica
ttagggtaatagtacattgaatgtgtcgttatgattaccctaggttttgagttagggtttcgaagtggttatttgagtaatttacccaattgtgtattgtgacttaggacctccgttcagttcaaggattttccatttaagtcaaccggcacgcttgaatcgggaatgaggtaagatagcataaattatatatatgtatgcttgtattaaatgtttacactactaacactaatgtttatgttattttaagggtgttagtatagtgtaggattctagtgtggttacagtggtaccaacacgagtacagaattggtactctagtgcatgtggtacaacactcgataactcctgggagtacaaattggccctaccaacacgagtacgaagtcggtactctagtgcatatggtagagtggtcggccctaccaacacgagtacagaggcggtgctctagtgtatatggtacaatggtcgtacttccattaagaacgttcttaaccatttagtgagctcggttgatgcactcaggacggcttaaacatcaagctagtagagcattgcttttatatatgttatgcatatcttactgagtctgtcgactcatcagtttgctaccttgtgtaggtaaagggaaagctaagctggaggaacagtgagtggagcttggcaatgattgtacatatcgcgacagtgcaacttggaggatttcagtttcataacattttgagttgccctgtattttgtgtaaaaaaaaattatt

SEQ ID NO: 337376 - DNA, 704 bp, Cannabis indica
aaaataatttccaacacttataacagtacagacccatatctgtttgaaaacttgtatgtcttggtacgatggatgcatcttgatttgattgtacccagaataagcgtccatgaaacttaatattctgtgccctgttgttgcgtccacaagttgatctattcttggaagtggaaagcagtcttttgggcacgccttaatgagatcggtgaactcaatacatactcgccactttttgttcggctggggcactagtttgggattcgccacccaggccgggtagaaagcttcaattatgaaattgttgttgcgcagcttttccacctcttcttttagcgctagggctcgttcattgtccaacaatcttcttttttgtcaaacaggtcagaaattaggatcaatatttaggacgtgtgaaattatagaaggatcgattcgaccatgtcctcatgtgaccatgcaaaaatgtccaagtttgctcttagaaattttatcaacactgattttacttcgagtagcaaaccttttccaattttgagtttcctggtcggaacagttgggttgattttgatttcttctagttcttccacaagaccaacattggtattttgttccccaagttggggatctacatcttcatccccgccttgggcagtttcctatttggcaatgtctttcccttttccgaactttggctagaggatact

SEQ ID NO: 337377 - DNA, 669 bp, Cannabis indica
aattaaggttctcataccttttatgtatttattttatatcattttagaagttcatgtttaggatgttaaaaacatacttgttagtaaatctagatcctggtaaaatatattctaacaactagcctcagagccattgtaattgatttactttcaagaaatttggacttaaaactatgtatgtatgatttggatgtgattcatgttgatctatgtgtttattaatgattgtttgatgtttgtaaattttttaagtaaaataattagaattttattctagaattatttttattggatagtatagaaaaaattaagcaattcactcttttacaaaacataatttcaattttatttgaattagttatgaatttttgaaaattggaaaaatcttagtggtggtgacaccccatacgcgcacggacatttgtgtcacacggggtgcacgcggcttaggacacgattctgtctgagtgtcctcgcccattagggcaatttttttctgaacagggggtcgtgcccgcggacaggctgcaagcagcctccagtaccaaatccaaaattgtttcatttttcatttttttcatacttttcatgaaattaatttcaaattttttgtgtaattttatatttagatttttatttttcatatttcaaatctaattatcaaaatta

SEQ ID NO: 337378 - DNA, 595 bp, Cannabis indica
gagtcaatcacaactgctaaaaatcctacacaaccattgtgtagtagatctctagcccataatactgaaataatcgggatctgagacccctgaactgagccaacataaacaaatggatcttcaccttttggctaaaaagtcaccattttccgtttgcaatctatgctggccgaatacttggacagaatatccatcccaagtatagtgtcaaactctgttaattccaactctataaggttagcactcaactccctatcttcgattctaactggcatagacctaatgcgcctattggagataaccaactccccgctaggcattagggttccaaaccctctttaattaaaatcacatggcctacccaaaagatagattacccatgtagccaaatatgagggtgtagctcccgaatcaaataacacagtataaaaggagttgttgataggaagctaacctatgaccacagaagcactgctgcagcatcagcttgagtgatggcaaacacccaagcaggtacgggttttgcctctggcttctgctcttctttctttgcctaagggaaatctttcttgaactgttgttggaaattatttta

SEQ ID NO: 337379 - DNA, 558 bp, Cannabis indica
aaagagttttatttagggcataaaacccaacatttccaactcactatctttcagtattctgtaccatgaagacatggagcaaccaagtctaggccttaggagccaaaaaatacacgaactaacaccttgtaagtcaacttgggcacctagggtttcacttatcccccaagttgacagcctcaactagggtttagttttcaagatcgtcttagtgcaaatgggtcaaaatttccattggggcatgaactagacataccttgaacatattttaggtatcagaatcaaacttcgagaactttcatttctgagcacccagaaacccgatgcccgtgcaccctagtgcataggttgaaaatttgtcaatctaggccactctgaagcatcagattggaagtatggctcatgtatcttctttgtattccttaaaaacaaggaataaatgctttcaaggaagaaataacccatgacaaaggctcattacccaggttgacatttggtcatcttgggtccgatttttgttaggagttttttttttttttattttttttttgttttaaa

SEQ ID NO: 337380 - DNA, 644 bp, Cannabis indica
gtccatgagtactccaactcatggagacatatgagtcccctcgtggtcctcatatgcctaccctactagtcccactaattagtagtagctcacttaacacaaaggtgccaggggatagtggagagctgacaccagagtccccccttatagagcattctgagctttcacccttctactaggaatatacatgaatttggctttgtaagacatatggccaaaccatataccaaatcacatagtttctcaaattcgattgcaccattgtatttaaagacccaaataaatggcgaaaaccaagtcatgttgataactctatgaaaatagagttatttagctctttttgtgcattaatttagctttgttctcaagtatttttagtttattttagaaacttttatttacttttacttaattttgtataaaatattagatttagtatttatagattagtcttagtaaaattttataatattttactaattttatttagtttctcataattaattcaattcaatatgtgtgattttgtagaaatttaaataaaaatgatagatttgcgctatgggtcaaaatatgaaacaaactatcattgaaatggacatggacccaacaaagcccaaaattgaatgttctttgagaatgaa

SEQ ID NO: 337381 - DNA, 685 bp, Cannabis indica
tgggatcccaaaagtaattataagacactattaaaggtttgtttcctctagccgacggcaaaacagagtctcaaaatacatcactggtagaccccaacccgcttggtctagtgtggcccgaacatgtacattcctcgtccagctcctacactcatggctgatcaaacacagctttaccctttcctgcacagtagagcacccgtgagccaagcccagcaagacagtataaaacataacaataatatgctcatcatataatataaacagtaatgccatttaaatctgtctgtgtgtcacagacctacatgttgggctcacatgcctgtttatgtttacgtgacgtaaacctacgtgttactctcacacgtctatttatgtctacgtggcatagacctacgtgttgctctcacacgtctaaatacaataaggccttagaatggttcatctcggttatggttaccgagtccaacccgattatgccttgaacgcataacccttaaatctcaatataatcatatacttagcatggcatagcatttactcaacttatatcactagggtaataaccctaggctattaaccgctcatattagggtaataaccctaatcccggttacaattactcacatatatcatattcaacataagagccaccgcgcatactctacatgcaaactactgtctt

SEQ ID NO: 337382 - DNA, 759 bp, Cannabis indica
aaatcgcttcccttcatttccaatcgcagttttctttttatttctcatttttagggttcaaaagacgaaattaccctcgcttgtacgggctctcgctgcggccatggcttcctccgccgcggcgagtgatgccgtggccacggcggtgaaacctctcgccgcggctactgactcgccccaaaactgtctttctgctctcgagttatggccgcggccatggttaggctcaccgcggccaaaagtgcaccgagcatcaattttgcatttttcttggctccacttgtgttttattgcacttttgtaacccgagacttccataacttcgagaaacctgaaaacatagaaaaccagcgtaattctgtcctaaaacgtcgaaaagcaaacataattgtgatccagaacataggctaaaattagcctaaaaaattccctcaaaccgaatctttactcgccctcgaataaagctaaaactaaaactaaaatagaaataaaatgatgcattagataactgaaactttcaatggttgaactaccactaccacctccacaacttcaagcaattgaataaccagaatttcaactcaataaccctaagaattaacttggatgcacaagttagaagtaattatcacaaccattctacactttccgacattcccccaacccatgttcaatacgcttgaatgacatacctctctccactaatgttaacaattcttgctcggaatcaaaaggtctttttcggttacaatatcatgg

SEQ ID NO: 337383 - DNA, 873 bp, Cannabis indica
aggtcagcgagcaactggctggtactgacaatgattcttcttcagaattgctggttggcggagtcttgaaggagttcaccagggtaagtctttttttttaatacttccctttaatcttccatacatatctcagatgctaaagttttttccttgtgcaggcatgtctgaagttggcttacacttactccaaggctaagtctgctacttccaagaactcggctcttttcgacaccctgaaggcgaaggcagacttggccaggaaggatgctaaagaagccagggtggaagtcagagctgttcggttgcaattgggtgaagccaacaagaagcagtttgccgcttagaagaaaatcaatgtgttgactaaggatctcgaggctgctgacacttttgaggagcccatcgagaccttatctgctgaggtgaacagtcttcaggacgagaggacttcccttcgagcagttcttcatcggatgaaggaggaaaaggaagccaaggagggggagctttcgactgaggtggacaggttgaaggagaaggttaatgccttgtagaaagtcggtctcgagctcttctttgatttttggaaggctaatcctcgggccaattttgactacttgggtgacgctaaggacatgtaccttgacttctgcgcgtcccaagtggcttatggcgaaactgaggcagctgcttcaacctccggtcaggccgctgatgcacctcctgttcaaacaatagatcctcctgctcttgttggcccagaagaaccgagccaagaacgtgggactccagctgcttaaacacttctctttttatctttttatttgatatatcttattcagcctttagggccttttctaagacatcatgacc

SEQ ID NO: 337384 - DNA, 711 bp, Cannabis indica
cccataccaccaaaaatagggttttaggtcttgatacattttggttgttcccggatgcaatgagtaagggatagtatgagcttcttccagaatttctttcttaagttcattgatatcagggacacacactcgtgctttaaacaatagcattccattttctgaagttgaaaagtatttagctttgtccgctaaaacatcttctcgaatcttaaccaattcaggatcttccatttgggccactctgattctttccaacaagtctgactgaagtgtcagattaaataatctctcagtcaccaattcaatgtttgccctagtcatctccgaggctaactgaggagaaatcatgaccatgttggatatctgatcaggtccctttctgcttaaggcatctgccaccacatttgcctttccaggatgatacaggatttcacagtcatagtcttttaccaactctaaccaccttctctgtctcatattcagatccttctgagtgaaaaagtacttgagactcttgtggtcagtatatatctcacacctttcaccatataagtaatgtcgccaaattttcaaggcgaacaccactgctgcaagttctaggtcgtgagttgggtaacgctgctcataatctttcaattgtcgagaagcgtaggctatgctttatctgcttgcattaacacacagcctaaaccctgccttgatgcatcacaa

SEQ ID NO: 337385 - DNA, 554 bp, Cannabis indica
gtggaatcaccactatccctaccataagcaagagtaggaagagtgggggttccaccaacacttagagtctctcagggctcctgaagaaattttaccgaacctttggctcgcagagccttatcaaccatttctacatatgatgtcgcttcattcgtagtaattaccaggtcgtgtctaatctttgcatttagacttgtcagatatttctccttcttactgaagtccgtaggcacaaaacccgaagccaacttggccagacgattaaatttttttgtgtactctgttactgacataccctcactctgaaccaactcggtaaattcttttcacttagcactgcggactgcctcattgtaatacttggcattaaacaagtctcaaactgttcccaggtcataacaatgacgtctcgggtgagggatactaatttccaccacacgagcgcatctttctggaactgaaaaagtagcacaagtcacccggtcatttctaatgacccccagcctttattacatccggacctcccagaaaaattggaggtgcttgcttgcaaa

SEQ ID NO: 337386 - DNA, 539 bp, Cannabis indica
atcgtgagtagggtacctttgtttgcactcttttaactgccgagaagcataggctattacctttcaagtttgcataagcacacagccgagaccctggctcgaggcatcataataaaccacaaacttttccttatgtgaaggaagagttaatactggagcggtaatcaagcaatgctttaactccacaaaacttttctcacaccgatcaatccaaacaaacttcaagttcttttgagtcagctccgttaagggtacaacaatctttgagaaaccctcaacgaaccgacgatagtacccagctaaacccagaaaactcctgacctcagtaggtgattttagtgttggccgatcccgaacagcttcaatcttggctggatccaccataatcccatctttatccactatgtaacccagaaatgtgacacgagataactagaattcgcacttcttgaatttagcatacagctaattatgatcctgaaactgttgtaaaaccgctctgagatgcaacccatgctcttcttctgactcagaataca

SEQ ID NO: 337387 - DNA, 500 bp, Cannabis indica
gaatttcttcatcttgttaggaatacgatcttgcatttccacgaatctttgcttccagtccggaggatcttgaggtgggttttcatgtcaaccaccctaaaatcttccactgcctctgccttgtccacggggattctgggaatttcatttccctgaccacctccggtctcaaccctattactctgactccttgtattttgctaggcgtccattagtaggacttagcctatgaacccataagtcaggcatgtcagacagcgatcataaagacttaatatcgctcttatggattttaaggcaactgttgtgataaatccaacacacaagtatacatatcattttaacaagtaatactcaggtaagtgagatcgttcccacgaggactgtagctaagtaccaatcaattgaattcttgtttctatttggtagaatcaataataaggttgaataattaaataactaaaaattgaaaagcaggaaaataataataaaaagtgtaa

SEQ ID NO: 337388 - DNA, 611 bp, Cannabis indica
attactggtcctcatataaagaaccccacattcagcattgtatcgttgcacccatatccaaaacagtccagctccattaatttgttgataatattggagaagaatcactaacaaaattaacaaacatttcattgaataattacccataattaattgttttttttttcattaagcaattatttgtatttgagagtctttcttgtataaaaatagacggtgagacttttacttatgtgatatttggaatatgattagatgaaatcaatttaaatatcataaatatctagtaacaaattcggaggtgggatatataatttctgttaaaagtttaatttgatttaaatttgaaaatggttctgttttgaatttttattttttaattctacaattgcccccaaagaaaggaagaagaattccaataattaataagttgacttatattttcttttacgaaattatttgagctgaattttaaattatattctatttgatattttttttaatcagaatgtactaattttctcttacaaaaaattatttcaagctctacgtggatttttaataagtatgataaatattactctattataattttaatatataaataataa

SEQ ID NO: 337389 - DNA, 1140 bp, Cannabis indica
taatatttagtataaattaaagtttaacatagtattatataaaaatatgatatataatccaattcaatataatacaatacaatacgacctaatacggcgttccaaacgagcccttagtgtacataataatgtatattttaaatcgattatatttttcaaatttaaatgcataatttttattatgtagatatagttaatgaaggtatacgtatataataagaataaatatatacatttagagttattaatttataaaagaaatggttgaaaatgaaaaggttttggtagagcccaccaacggagtgtcggtgggtggctgtttcctggggtcagacacattggtccattttctctagatacatatttttcattatgtgggaatccatatcacactgtttaaatttaaattagttcctaaatatatttttaattatatattttgtaaaaattattgattagattttgtattttgcaaaattattaattaaattctctattttgttaaatggtaaaatagactttatattttttaaaatattaaaaataggattttaaactcatattttgataattttttttaatataacttacttaaagataatttttaatatgaacagatacaaaaaatgtaatcagttttatcataacatctctaaatcggatcattattaagttttattttgataaaaaatcatttcatggtcttatttgtataattttagaaaatacataattcattttatcatttaacaaaatagaaagtctaattagtaatgttgcccctgattttgcccgatatacgtggaccaaccggatagggacacgtggataaaaagagtttaacaagtcgagttaattgctaagtcttcattaagaagggtagcatccgggagctgcctcccggagaaggcatacgaagccccatgtgctcccggaggcctaagcaacatcaaagcatctccgcgaggtgtcaagcttcccccgagcagtcacctcgcatttaatgccgcatgggaggaaacgtgttgggactgccacacgcaataaagtctgacgacacgaaccccgatatgcacctacgaagtcatgatcacttaagtctattgacggctacactgcgaagagtcacgtcagtcaaaa

SEQ ID NO: 337390 - DNA, 658 bp, Cannabis indica
aatgcacaagggcaacatatggctcaaacctccagctctaacgatcaaatagttaaggaggctaatgccatcacaactagaagtggtaaaactttggaagatcaaccaataacagctaccacttcaaaatctccacatgttgtccctgaaagtgtgccatccaatgcttctgcaaaagttccatttccccaggctttgagacctgctgggaaaaatcttgaaaatcgaggagaaatccttgagcacttgacacaagtgaagattaatcttcctttgcttcacgtcatcaaacaagtgccagcctatgctaaaatcatcaaggatctttgcactgtaaaaaggaagcatcatgtcaaaaagactgctttcttgactgagcaagttagtgcggtaattgaacaaaagacaccgctgaaatacaaagatcctggctgtcccaccattgtcaaatcgggactcatgaatttagtcaagctttgctagacttaggagcgagtgttaatctcatgccttattctgtctactcgcaacttggtcttggtgaaatcaagcctacttctgttgtcttacagttggctgatcgttctatcaagaagcctcggggaattgttgaggatgttcttgttcaagttgacaaattctattaccccgtggactt

SEQ ID NO: 337391 - DNA, 647 bp, Cannabis indica
gagccgagcaccgtgtatacctgtacagacgaggtcctcccagccgagcagtggacaatccgaacaacataccaacacttagcaatttcagcatttgcatcgatcgtgaagcataagaacaatccctataaatcttggatcgtatcacagagatatggcaagttgtccaaatccctcaatctttgtactttatatatgtaatgtataatcttaccaattatagagattgtaaacaaaagggaaaccttccctcaagcacacaaccctataaatagtgatctattctcactggaaatggggtcgaaagaattatctaagacagtatactcagagatgtcattgtaagagctttaagagaagaatcaatatattctttgttctaaagtcaatacaaactaaggggagtaggctattactgaactgctcggggccaaacctctttaaaaactgtgttttctttatttatattttcatattatatctatattatatcacttatcgcttacaattaagacttattgtcgttgggtaaaagcgaggtcaatattttggggctttcattgagagtaaagatcacaaacgctctttacttcagatttaatcacagtaaaacaaaatggaacatacaatcaagatcaaggatttat

SEQ ID NO: 337392 - DNA, 773 bp, Cannabis indica
tcggatgatagcttttacttgggactcccttgcataatggggagaaataaaaatgacattctcagcttctttaaggagaaaatgaggaagaaaatatttagttgggagactaagtttttgtctaaagctggaaaagaagtcttgattaagtcagtagcccaggcattacctagctatgcaatgagtatttttcttttgactcaagaaatatgctcgagccttgaaggtatgatggcaaagttctggtggaaatctcaatcgaattcagctagtaagggagtgagttgggttagttggaagcggctttgtcaacataagaattttggtggacttggctttcgtgaccttcgtgactacaatctttcttttttggggaaacaagggtggagattacttactatggaggacacacttgtggcgaaaatttacaaagcaagatattatccgcaaggttcgttttttaatgccgagttaggacaaaatccaagtttcatttggaggagtatttgggctgctcaaactcttgtaaaacatggtgctagaagatctattgctaattgtaacgccctaaataattaggcacgctacccaagtcacttatgaaactctaatcccctaattgggattactaatagaattagcgcggaaattaaactttaattataaacggaattaaaataaaacttgtaataatttaaactttacaatctaaaagttacagaagttgggattccaaaaacatttacaaaacattattacaagtccttttcttt

SEQ ID NO: 337393 - DNA, 550 bp, Cannabis indica
aaactttctacaaaaaaaaaaaaaacaaacaaaaaatattcgatactagtacatatcttctccaactaggaatgggcctcataactcataagcaaagaagaaaatgttaccgttggtatttttatttttacgacttttcatatataagatatatgttccatatactataattatatatattttttttgaaaacaaaatatatatttatatttaacatatgctagtatgtacatgaaaaggtgtaatttttatagatttttgtcttttgcaatgcttacaaaaatatgttttaaaaaagatatattatgtgggaaaaattaaaaaggaaaaagttaagaaataggagaaaaacaatttagacagggtaacactaaccagatatctccttagataatcaactaccaaaacagagttagaacatgcctgcaaaagagaaaaaggaaacagagagagagagatgttcagactcaaatgcaactacaagagtatataaataagaaaagattcacaaagattcaatcacaaatcgaaaacatacacatataatacc

SEQ ID NO: 337394 - DNA, 772 bp, Cannabis indica
acctagaactgcaccccagtctcgatccaaaacccaaactcaggaatggtacttgggacctgaaccagaaccagaccgagacccgtgacagttatctagatcttgacttgggattcgggtaatggggcctggaacagacccggagtcggtgtctagatctgggactcagacttggaccagaacccagatgaagaacaaaacccgaacccatacctagacctgggagccaaatttagaacctaaacaagaatcgccgaacaaggaccctagaacaaaactaggaccgcgaccaagaccctgacccagacctagaacaaaacacaaacctagcctcagacccaaactgagagtagaactcgtgcctggacacagtcgtgtacccagacctgaactaagacacggacctggacctaaatctgggactcgatcccaaacatagagttggaccaagatagggatccagatacaaacctggactcgaaccaagacccaaactgggatcaaaatgctggacctagatctggactgagatcctgacccagacccaaaataggacttgcactcggggcccgaacttggacctggacccgaacctagacttagatcggggtcaagacctggacacaaacttggacacgaactcaaacacccacacctagaatcagacccaaagctagacccgaacccggacccaaactcgaacccaaacaaggatcagaaccaaggacttagacagacccagatagggattggaacttgggactcagaccca

SEQ ID NO: 337395 - DNA, 756 bp, Cannabis indica
agatcctggtaaaataaattccaacagaagaaacttccagcccagcccaggcccgttgagcatgccattcacattagggaggccagtttaccttctcggtcaccctctcccgtactgggaaaaggaaaggccgtcatggctgagataaaaggcttatcaggtgatgatggactctcgagtcttgctcggataatcgcttcgcaggatactccgtcttgtttttaaacttcttgattatcatacttttacacttttgatgccttttttctaaccatgttgctttattccgtacagacatgtctcagaagatgcttgatgctcagaagagagttggaggaagttcaagctcatctcctccggccaagaaatctaggggcggcgaggcgaccccatccaaggaaaaggcaccgtccagggaggttattgatctttttgaggagctaactgtcgcagacccttctactccaaaagccgctaagtccaaagattcccgaggaggaactttggacaggcctgaacaatcaaagggcagattcgagctagctaagagcggatctgagcagacacgggctcctactccacctttaccagtgcatctagaggctaagagaggcaaggagatgctcgctcattacatgaaccggttggttcctgaggtgagtgagcagctgactgatgctgacaatgaatcttccttggaactactgatgggaggagtcttgagggaatttaaaagggtgagtctttcttgacagt

SEQ ID NO: 337396 - DNA, 713 bp, Cannabis indica
ataaaattcttgtgtctttacttactttataatatttcaatcgtattgaactacttgtcgcttacaaaattagactcactgtcgttggctaaaagcgaggtcaacattttggtgctttcattgagagaagaatcaaggatcgatcttcattctaaatttaatcacaaatacgatggtggtacaaactcgtaggggcgtggttgatccagcaaatccacaagtggtggatcctgcagtgtagaatctaagaaacacaagggttctgccagctgtaaatctcggactgctgtcaactgcgggtcacagtgtgacaactcttgtggatgagattgcgcctggtgtgcaagagactgggaataccagtttagcagctgaccagggcgttcatagcacagtcgttccacctgctaccaatgttcaaacgaccattggagatgacactgagatccagaacctccgtgccgctcttggactcatgcagggtcataccaacaccctacatcatgatcaggagggacttcgtgctgcggtaaatctcgcatttgaagagcagaggcgcatgtttgccgaattgagatacaaagagattgaagcgttaagggctcatcatgcagtcattgacaatcgtagtcggcaagccactgtgctgatcgaaaaagcctattaatctgtcaggcagcaacccccgaatgtcatccccctaggtgaaacag

SEQ ID NO: 337397 - DNA, 1012 bp, Cannabis indica
gtatgtagttatatagttgagcccgatcgatttggaaaatatataattcttaacatatatgtgagtattaattttaggaatgattaatttacggtaaattttttctaactattaatttatttgtaaaaaattatccaacttcatattttagtgggaaaatctttaaaagtactgtttcgtttatatttttaaggtgccgtctgttcagtctcattaaattctaattttgttcacgtgacaataacagatcactaaaaaattatcctacgtgactatattttacacaataaaaattaaaatgagtaattaaaattaaaataaaaactttaaaagttattttgcagcaaaatctctgaattattaatttacttgtaaaaaaccatcaaactttaaagttttttggatgattttttgcaagtaaattgatagttggagaaattttgccgcaaattactctaaaatatatacatacatgatgtatttttaacgtttatagttgaagtttagtgagcaccattacggcctttataatctatacaactttaattgtacgttgtaaatttataattgttcaaaccatactaagtctttttatttcatttttttaggccaattgataaagttctaactttcatttcatctcaaatgcagagcattatagcatgggtaacgataggggtgtttacggattagtttggtctcaatttttatagtttttgagctacaccagtataacagttttttaaatattaaaaatcaaaccagactaataaatttttcaaaccaaacctttaagaacaggttggtttggtttgaaaccacgattcaagtagaatttatagttattcatatttttttgaataattatactatttttattaagtttttaattttattttttaaaatatatagagtaatttacgacaaaactcttttaactatcaatttacttgcaaaaaactatctaaaaaactttaaggttggatcgttttttacaagtaaattgatagtt

SEQ ID NO: 337398 - DNA, 576 bp, Cannabis indica
aatttttttaattttttgaacctgggtttgatgctcctccatgtgagttcgatggtccgatggttttttggaatatatttttttttttaattttttaaaagtgggtgcgatgctcctccaaggggtccgatgctccgcggctttttttaattttttttgaattttgtaattaattattatttattattttagttaatgttttaattaattatttttgtaattaattattaattattatttattattttttgattaatttattttgtattgatttattaatatttgtgtaattaattattcttttataataattattaattattaattattattctagttaaagttttaagaattattttatttattattgatttatgaagtattgttttattaattattgttttattaattgttaattttttaatttttttattaataaaacaatttataattattgttttattattaattattaattattgttttattattaattattgttttattatgaattatgaattattgtttattttttattatttttaattaataattgttgtattattaattattaat

SEQ ID NO: 337399 - DNA, 695 bp, Cannabis indica
tggtcttcgttatcttgttcttccagctccacaccaacttctgtctgcattttctttcggttccatattatctttcacccgtgaaccttcttccaggagctttgttgcatactccatttccacacttgcagtgtctttgtttcctatatttcctgcatcacatggagacacactacccttcctggaggtcaagtgaggataatctaactcattaaagacaacatttctagcaatcataacctttggttcgcccttcctggaaatgtagattctataggttcctaaggcataacctaggaaagttcccttcacagacctatgttccagcttgtcaatagattggtgtacatatgttgtacacccaaatgtttttaagtgcgttaggttgggggttctattttaccacatttcatagggtgtttttaggtctattactctattcgggctcctatttacaagggaggttgcagttgctaaggcttccccccaaaatagtttttcaaatctgaaactgaactgtaaacatctaactttgttcaagaaggttcggttcatcctttcaagaacaccattttgcttcggggtcttcactatggttctatgcccatggatcccaaattctttacacatcttgttaaatttgaagttaacaaactccaacccattatcaatcctaaggttcttaattttaaggt

SEQ ID NO: 337400 - DNA, 1699 bp, Cannabis indica
tgacatatgcgagttgggtctaccctgcatgatgaggattatggttatgcggtgtgaattaggtcgcacccgcaatatctcgctggttttatcctgggcgaggtctaaacttcgagaagtctctcacggacatttcagctttcattgggaatctgaatacacgtgtccttttaaagaggagtctggtctcgagtttctaggtgagagaaatctcactataacactgggacttgacctggaacaggtgggttgccaccgagacatcaccaacatccttctcgcatcaacagggaaggggcacgacaaaccccagcaggggtcatgcaacgacccatacccaagggagaaagatgagatgtgatgatgcaagtgtcagattaggacgcacaagaacccatagtcgatcaacacgaggaggagacagaactcgtcgcaatactgatcgagagagtacaggcacaagtaaagctgaaagttactcaaggacaaggtccatgagtaggatgagatccatgagcaggacgaggtccatgagtaggacgaggtccgttagtaactataaccagcaacaaccagatctttgtaatcacttgaacaagaaaaaacctgatcttcgccaacaactcggtcgaaagcaagaggatcctattcaattgcaaattgatgaattggaggacaaaatcaggaggtatcaagtcagggaacatgaaaagcagtcaagatacgaatcggacgaggagctcgaggctttccatccagacatcatgaacactgcattcccctagggattcaagaaccctcatgtcttgtcatatgatggggtcatatatctggtcttgcatttaaataatttcaatactatcatgtgagccatcaatgttacgaacaatctacggtttattttgttccccactttgctagttggagcagcgagcagctagttcaacaaatttacccttcattcaatcacctcttggtaatagttgtcgaaggacttcaagaaaaagttccaagcgacaagagataggcgaccccaggtgtcctcactcactaacataaagcaacagccaggcgagacacttaaggcctacttaagtcattttagcataactactgcaagggtgagaaatctggacgatagtactcagcttactgctcttgaggcaaggatcacgactaatctctccaccactgaaggcgagctatgggatgacctacagggtcaccgagtaaaaaaccttactaaattcaatgatagatctcaagtatttgttcgaaaagatgaagcaagaaaagagatgaagctattaaaaactggctcgggaaacaaacccaacactttctcaacaagtactgtctcgaccaaggctgatgatccaagagcctatagttcaaagatgaaagataaatctaaggagtcagccaaggacaagaaaaagcaaaagaagcatgacaagtacgtcccaatctagaccatttataccgagcttaatgaaactcgagaaaacatttatctcgcacatgagcacagggtcacatttcgtaaacttgagcccatgaggcatgcgagacataagagagatgcaaccaaattttgtaagtatcataaagacattgggcatacgatagacgagtgtcgtcagctgaaagatgagatagagagtcttatcgggcgtggtcattttcggtaatatgtgaa

SEQ ID NO: 337401 - DNA, 1034 bp, Cannabis indica
tgtataaaaactaaaacataaagttttgccacaaaaaaaaataagagggttaagtgtataaaaattaaaacataaaggagtttggccgcaaatcgctcaataaaataaccaaaataatgtaaggagcattctatatatgacatcaaatgaattaataaaattcatctagccacccactctagaatattacatagaaaatataaattgacactttatttataaaaataccttcgacaacatatttatactttttatgtgattttaattaccaaaatacctcttacactatcacttacacaataagacgatagttgcagggtagttgttgtgtagttgcgcgataattgcatcagacgatagttgtggggtggttggttgaaagttgcatcagacgaaggtttcaatcagataaagattgctgggtggttggccaaagattgcatcagacgaagatttcaatcatacagaataactgttaacaaaatgtttatgcacactactagaaatgtcacttttactagcagagtttgctattgccctggtaaaagtaacttttaccagtgcatttcgtaaactgcgctggcaaaaagatcaaagttttactagcgcacatttacaatggctaaaatctaatttttaccagcacatatatgcgttggaaaaagttattttgcccatcacttttcattttgtgctggcaaaagttctaataccaatgttgatttgccaaccccttttgccaacacatcagaagtaaatttcattttaccagcataatactaaacttttgccagcacaaaaatgtgctggcaaaagtgacatttcttgtagtggcaactgtaatgcaactgttatgaaacattaaaaatcagaacagtatttttacgtatgtaactctatctacatgtctcttcatgagttaatatgaataattcaccattaaaattgaaaacacaaaatacaccatgataatattttattgtagtattgatgtaatttttttttggatttatacttgagttatattgtttggg

SEQ ID NO: 337402 - DNA, 509 bp, Cannabis indica
tggggtatctaccctatttgtgatactggtattagaatgtgggattgggtcaagttcttatgggacctaaaaagcaaaggcataaatgatggggaggtcttcctttatgcgtcaataataattgataagatttggcaatcgcggaatgataaggtacacaacaacagctttgctgatatttttaaatgcattgactctattcgcttttcttttgcagatcaccaagcttacttactcccttgccccaagttgaactcgttggatgtttggcgtcctccccctcaggattggttgaagctgaactgtgacatcagagtagggttggatagcatgtgtgcagctgtggttgcaagggatcatgttggcaaggtgatcggggttactacttccaaactggagtttgctgatgctctctgcggggaagcggcggcgtgctgcttagctttagaggcggctaggactctaggttttcattatattattgttgagagtgattcgagggtagtgat

SEQ ID NO: 337403 - DNA, 693 bp, Cannabis indica
aatttcttgtttttcttgtttatcttgcagtcgttcctctagtagttgtgtgtaagtgctccttggaggctttttgaacacctctctttgacacacagacattcctttaccatgaacacgaccagggtgctcgggtttatctaatgcttgggcaagaacatcattttgagccaaccacaacaagttcaccacttgcttttttctgaagtagttcatcctggacaaataaacatgattactttagtttggatgattatcaaaagatcaaatatattttagttaattagttaatataattacttacaatcttttcaccaattttttgggttgattcatctaaaaattctcctttagaattcgttcaagattgcttccaaagtacagctcggtcaatgggcttagatgtacgacgctcttttcatatcttgtcctctatttgcgctattaacgtccgagctgatcgatgaacatattcttgcttagaacgtctctcttgttgggcctttcgcatcgcctaaataattgaaacaaaaataatcatcattgcaattatgcttaagatatataaattgaaatattaaaataaaacttactttgaattcaggattatttcgggaagctacaaattttttccattgttcctttgtaatattcttatttttggtggctctgtcaatgcagtcggatttttct

SEQ ID NO: 337404 - DNA, 589 bp, Cannabis indica
aaatatgtcttgcttcccatttaaacaattaagttggttattgttgccttaaaaatttacttgatcgacaattgcctcttctttaaaggttacataattactatcatgtattgcaatttacatgtgacgccttaaaagtttacttaatatatggttgcctcttctttaaaggttacataattgtgattatggaattagctgctgggttccttttcaaataataaaattggcttttgttgtctaaaaaatttacttgatagatggttggctcatctttaaaagtaaaatttacattcaaatgtaaattttttgctagttgaattaaggaaataaataattgggagtaaaatatattgctatgtataaataatagtttacttgattgacagttgctttcttccattgttacaaaatgaaaaatacctttgaattttatcttatggtactaaggaaccttgtgaaatattagaattgacttgtgatgccttaaaaatttacttgatagacaattacataataactattatgcaattaactgctggttgcctttttaaataataaaattggcttttattgtttgaaaaattta

SEQ ID NO: 337405 - DNA, 769 bp, Cannabis indica
ttccaaaagaccataattcctcagtaaattcaatctttggtctatttcctagatagagtcatcgagaactctgagagctagagaagttacataagctttacctttgctctcgctcttacagtgttgcttaggtgggactagttcggaaggcccttcgtttggaatgggaattctagggttctcctcgggaggagatacctcgatggatgatgcctcaaggacctctccaaggttcagcaaggctaaatggaaatcgctaccttcaccggacactaaaaaagggcaagaaaaaagtccaagaagtcagtaccctacatccgaatgataaatagggtacttggggaggcctcccccactgcttggagaggtccccactgaattcatcaccattaccatcactaccatacaacagcccacatggtgattgttgacttcccttttagccaacgacaatgagtctttttaataagcgataaacgatatgtcgtaatgagaatatatataagaaagcaataataagacacaggaattttatagaggttcagccccgagaagttcggtaatagcctaatcctcgtcatttgtattgacttaagaacaaggaagaaatttccttttcttatagctcttacaacagtatctctgaatatataattcttagataataatatagccttagcttaactgcgtatcggcttataattttccggtcctttgcccagtgaacattcctcactatttatagggctgggaaacttgaggaggaaga

SEQ ID NO: 337406 - DNA, 558 bp, Cannabis indica
catcattttacccttctcgggtcataattaccaaaatgcccctaactcaccaacggggtcttaacatattaaaattcatgtaatttcacatatattgaactatctaataatataattcctcaattaaacataattatctaataagaggtttcctaatccatttcttaatttcgggtattacaattacccccttcttagagaaatttcatcccgaaatttacctgaacaactccggatatttctgttgcatattcgtctccagttcccaggtggcctcttctaccttactgttcttccacagtactttcaccagtgccactgtcttgcttctgaagactttctgtcttctatcgagtatcttcacttgttgctcctcatatgacaagtctggctggagttccaacgcttcataacttagaacatgggacgagtcttaaacatacttccgaagcattgaaacgtggaacacatcatgttcagctgccagcactgggggtatagccaacctgtacgctacttgccctatcctttcaaggatttcaaaaggtccaatgaacc

SEQ ID NO: 337407 - DNA, 1041 bp, Cannabis indica
attcaataataacagtataataaattatttaaatagctatgaataatttcaaaattaaacgtgattaactgctaatttccaaattaaactaagcggtctttacatctcgacacttccaaagtctaactacaacaccccaacattaaaataattctataccataaagaaaacgtgactctctactggcccaacgtctctttccactgcttccaaacacattacagagcaacgggaaattcatacaaaatagcataattaattatatcaaactcaaataactgtccacgatatgcatattataaataatatttaatctcataaataaaccctagttatttattaatccaaagtgttaagcataagcggtctttataattaaccctcgttaataggatttcgtactcgaaatctaacctggataactctggatattgaatccttatgtcagactccaattcccaagtggcatcttctactttactattcctccaaagcatttaaccaacgctatggttttgctttgaaggaccttctctttcctatccagaatttgtattggttgttcatcataaggcaggtccgcttgtaactccaatgcctcataactcatgatatgcattggattagaaacgtacttcctcaacatggagacatggaatacattatgcacagctgacaatgatggaggtaaggctaagcggtaagcaacctgtccaaccttctcaagaattccaaaaggtcctataaatctaggacttagcttacctttcttcccaaagcgtcggattcctttcattggtgacacatgcaggaagacatgatcacctggctggaatgcaacatctcagcgcttggggtctgcataacttttctgcttgctttgagaagcaagcattcgagctttaatcttgtttattgcctcatttgtcttttggaccaactcagggcctagatattttcgttcacctatttcgtcccaatggattggggagcgacatttcctgccatagagcagctcataaggatgttgggttttatgcc

SEQ ID NO: 337408 - DNA, 536 bp, Cannabis indica
tcctttttccaattaaggaaaatcaaatgaaataaaggaaaaaaaaagtcaaaaattaaaggaaacaacctcttcatatctttctccctttcggctgaagcaaaccagggggtttagttatacatatggttcgaattctgggtttaatttgaattgattttaagctctggatattgcttttgaactatggagatggttttgagcaagcttgagctttgaaactcaagtttaggtctttaatggcataaattgatttggtgacttttttctgggaatttctggttggattatattgtttatgcattgtacaggtatactagaaagtttggtagagtttggcttgattttgaggtcatgggggcatttttcgggttcccagcacagaactggaattccggttctgggggacctgtagcaaccggtcgaccggttggtgtcccagaactggacttccggttgggaatcagtctgccggttgggggagcttttggaatcctagtttttcccattttttagatatttagggtattgccatg

SEQ ID NO: 337409 - DNA, 763 bp, Cannabis indica
acttaaaaacgggaaaaactagggctcgggaaaaagcccaaaccggcagaccggttcccaaccggaaccccagttcctaggtaccaaccggtcgaccagttctactggtcccccagaaccggtcgaccggttctgtgctgggaaccctaaaaccgatccccctaactccaatcaatcccaaactttgcaataacttccagaacacctgtatgcactataatagaccagtttcaagtaatagaactcaacaattcacaccaattttcaattcaccattagaaagctaagtttgagttcataaactcaaactttgcccaaacctcaattcaacccttaattctagataaaattacctcacacaacatcaaataaactccacaatacccaatcaaactctcataattcatacagcaacaaaaaccctaaattaatctataaaacctaacttagactaaagaaaacttaagaaagaagagcaagaagaaataccttgaattggaacttcaaaactcaactagaattcagagatttcagcaagaaatcaccaccttccttgctggattgatggttcgaaagagagggaaagagagagatgagaattgagacttcaatgctaagcttcctctaactcttctctttttcttttatttttcctaaatatcaatattacaataataaaaggcagccattattcactagaagccaaaacaagggtcttgaagggaaaaaaaaacctaattacccctctaactattaaaactag

SEQ ID NO: 337410 - DNA, 1168 bp, Cannabis indica
aggctcgcaattattcttactagatcgcctcaggtacaccttctagtacacttgcaaccgttccttttcgtggttagaaactttcccactagaattaatgctaataagcattaccgcccatgcataaacgtatttaacagttttatatcaaaatacatcatgcttctctattaactcacacatttaagataagtaagcaattcaaataatcaacaaatagtatgttaatcaactaatatttagcacatactaagccatgagtcaaacgagtctttatagccaatgtacatatcgagcccgtcttcaggatgttgaaaccttgtcactctgataccatgttgtaatgccctaaccctcagagatgccacgtgtgtgctgttacaaacttatttcttactaatcttttagtttagaaaagtgtggtttaattaaaactcttttttttaaaaaaaaaaacaaagttgaaataaaaatttcatactaaatacaccataatatggtgatcccctgtttataaatttcttttacaattggttacaaatcactgttacgaaaataaagttatatatccgaacgtagaaaagaagtcgatcctgcttccctaaagctaagacactacgactgatatctatattgctagaagacctctgactcatggccgaacacaacttctaacttccttacctgcatcacaaagcacccgtgagtcacaatgactcagcaagaaaagggctagtagataaaatcatagaatgtgctagcaaattttattacaatataacatacgtaccaataggccatacacattcaaggtgcataaataacttaacgtctatgcgagcgcacttattacataaacaagaatatttataactattcataatcaacaatctcagagtttcatacaacacgctaaacaaacaacattataaatacccaccttcagtgcttcataaagcactttaattcagacattaccataaccacataatctcaatgcttcataaagcactctaaccttacatctctatgaacacgtatacttacccttcgtgagtctttgagattctacaagaaaagtgactaacttcataagcagtataaggtttgtctagtaacactataacaaaacgtatttgattacaacctatcacataatacatgctta

SEQ ID NO: 337411 - DNA, 854 bp, Cannabis indica
gcatatgcatgacattatactaatcttaccttgatttcgaattcaggtggcccggtcaacctgagtggaacaactgctcagcgaattacaggctcctaaatcacatcaatcataacataggtgagtgacacgctaaatcactttccggggacttaaacttgaaactaaaagtttctctatcgataaataatatggcaataccctaaacaacacaaaaatgggaaaactaggattcccaaaattgccccaacctgtagaccgtttctggaaaaaatacctagaagccaaccggaattccagttcctacaggcccctctaaaccggaattccagttcagtgcaggaaagaccgaaatttccctatctcaaccaaaataaccgcaatccacatgaaaccttccagacctgttctaagcatcctaaagatcattttccaagcaacaaaacacagctacaagcacaaaatcaaaacttgccattaaagctccaagtttgagttctaaactcaaaacttggttaaactactcaacaatcactaaaacatgctcaaatcaacataaccaaacataaacaagcttctaaaaacaaacccacacacaaacagcagctacataactcaattcctaaaaacatgcaaaattcataacttcaaactcaagaaaactatgagggagttactagaagcttacccaaagcttgaaaccaccaacaccttgctgaattaagcttgaaatgaagaagaaaattgacaaaccctagctgcctctaggtggattcgaaagagagaaagagagagagtgaacatgtgatcttttccttagttttgtaaaaaatgaattaaactaattcttttct

SEQ ID NO: 337412 - DNA, 812 bp, Cannabis indica
aaaatctaactactcattcaaactaaataaaaaattaattagtttgattggatgttggatgtattggttctttagacacctcgtttaatatccgacctaatccaattagatattcaaaaataatatcaaatctaattcaagcacaattggatcatatccattatttggcggtcgattataattttatcggtcagttgtcattagattggatcaatttatgcacacccttactagtattgtgggtgtgtctttccaaccacgttccgcgagtaacactacaacatttatcattaaaaacggtgaaggagtttgccgctaataaaggaaaattttgttgctattggccattagcggcgagaatccgctgctaataattagacactattgatggttattaacggcaaattttgagtctgtcgctaataaccaccaatagcgacgggtaatagtggtagatgcccactgctagcaattaaatatttcaaaaattaaaaaaaataaatgaaaataaattaattatgttaaaattaaatataaatataaaaattaataataaatcataaatattataaatatataaataataaattatataaaaattaaatataatttaactaatttttaatattatatattataccactaaataataaatacaatattcattcttattataagggaaatttgaggcaaaagtccccaaaaagttcacgttgatacagattagtccccaagttccaaaaatagcggcaatagtcctcaaggtcacacttgttatttgtccgttagtcctaattttaactgagacgttt

SEQ ID NO: 337413 - DNA, 871 bp, Cannabis indica
ttctgatatagagatctaaggagtaagactcagttgatagtattgcactatcaaattgtcgtaattgctatggatcaatcaggtttgtatatctaactattatatatattattgtgttctatattatatacaaattttatatcctggtttattgatttttctaccatgtggtcctagattgcttattgtatatgatttaagacctataatttgtgtaacaattaatatatatgtatatataggtgtactcttaatgggtattacccatgaatgggtaatattagaaaaatttgaatttttaaggcttattttttttttatttaatttagaatttttttttatatatattatatgggttggattgttacatcagaatgaaaaaaaacaaagttttttggcaagaaaatgataatgaaagttgagtttgacttaaatatttttcatataaatatatttttgatataatgtgacaaaaagatatttttttgatattttctttaattaaatagctaaattaaacataaaaatttaaatttcgcttatattatttgctatcggaccaaaatctaatggtttaatattttaaaattaatatttatagttaaatttgtttagtatacccatcaaagggtaatacccattaaaaagtattccacatatatatatatggaacacttcttaatgggtaatacccattgatgggaactaaaaaaaattaataaggtaataatctaataatctttttatggcaagtttctaaaattaattttttataaaattgaaaataataattacaactaatatataatttgaaaaaaaattataaattatttttaaaaattaattaaattactactttattattttatga

SEQ ID NO: 337414 - DNA, 920 bp, Cannabis indica
tcttcatcaacttgtgtgctttggtttagataccttgcggattgatccctcgacgttggatggttcaggtccagaccttcagggttggttctccgttccctgcgtacacggttagtatgacgtctagaagtcgttacctgagggttatcggtgcgaatagcaggaactcgaggagggcgtcgggctcggttttgtccatctacttcggcctgtagtgcacgcagttgatcctgaatcgcagcatactgatcagtggtgacctggatcattccctcgtgtaccaccgccagagtgacgggggaaaatgcttggtcgctggtggcgtggatgtgtccccgacttgagggtcagtcgtttctgggaataggttgagaggtctgatattgcttctccctactccgccgttaatgacgtccacaggtggcactccagctccagataatggtacgttcatcatcccaatgttgatggacccgttgttagctcctccgttggcgtgatttccagccatgatgatattgttctttgaaatgaatgaaatcttagtcgatttcccacagacggcgccaaatgttgtcgagtgaatttcgcaacaccaaattatattgttttgttaatatcaaagagaattttatgggtaatgacaagtgcgagtattcaacctagaatggcgagtactcgactgggaatgggaaaacaatcaacaaaaactggaaaataacaataagacagagaattatagtggttcagtcagattatgatctgcttagtccactgtagcaagggattcgtaggtgccatttcatggtggatcacctctttatataaaagcaggtgtccaatcggttacacaaggatcacattcattgttaatccattatttacatattaaattgcaataattaaacccaagcaacgtt

SEQ ID NO: 337415 - DNA, 926 bp, Cannabis indica
acattgatcgtgggattttggacaccttgccatatctctgtaatctgatgactcacgatgcgaaagatgaattcgctaattgttggtcgatctgcgcggattgctgattgctttgcctcgagcatgcatatgatactcgaagtcgattccacgtgtcacaatcatttgatgccacgtcagagtgcaaaaattgggctaacaccttccaatctgggaagagggtcaaagacgtattgtacccctagtgatctttcttgcacaaaaacaacgtgcatgcgagagtcatcttgaatttttatgtaacaagctttggcttcctagaaggaaggataaagttgtataaaattcaagcttatactttgcttgaaaagatcaggggtggaagagtcactgggagtaaagcagacttgaagcggtccttcccttccgggaaagatggttgaaagacgtacgtcactcccaatgatcttccacacacgaggagcaggttggtgcgcatctctggagcccggggaaagtttaagaggtgcatggttacaaccctagtgttatcccaatttttgcgctctgacggggcatcacacgatggtgacacgtggattcaactctgggcacctactcgcaagacacaggccgaacaggacaccacatacgtttgctcggacgaagtcctcttaactgagcagtaagcaattcgtgcaacacaccaagactaagcaaattcagcttttgtatcgtgagtcatcaaagaaatccctataactttgggatctgattacagagatatgtcaagatatccaaatcccacgattagtgtattctttatgtactatgcaatctttctacttatatcaattgtaaccagaagggaaatacttccctccaacgcttatagccttataactagtgattcatactcactgggc

SEQ ID NO: 337416 - DNA, 556 bp, Cannabis indica
aatagaccacataaatttgacttatttatttgatgactcaacacacattttatatatacaattgtgaccctaataaatttctaacatactaggcattactggtgccttttagcaattttctaaattatctggaattcgttacttaattgtaccaatagtgaaataacacttaaaaaaatactaaacactaatagagaaaaggaaaaatacactgaaagattttaagaaaatggacaagttgatggagaaaaagaaaaaaatacaagacaatgaaatattaggtacactattatttgttttagtatttaaatgagtttttttagtttaatttttatgattgcataaattgttattgtagttatttgggatcacgtgtttaatttataatagttgtacaatatgaagtttttagtatgaaattgttgtcatagttcatttttcttttctcattctattattaattaaatttttagtgtgtaatttttgagttattagttttaggtgagtcaatccatttttatttattttttttgaatttattttgaattctaaaaat

SEQ ID NO: 337417 - DNA, 535 bp, Cannabis indica
aagcaatttggattgaccaaaacaaaagttcttccatcagcatccacaactttagcagtacgtagtccatcaaggtctcctcgagacccccgattcagcacaacgaaggccaggtccgagaacatgtggactgggaagagaaagtcccccaaaacccgtcattctaaaaggcaggcatcaagtaacaagtagtatattcggtacaatggttacaaaagttaggttttaggtcataaattatatttagttatgttatatatttgcatcatactactgttaggtgatttggaattgcaataatgttggtgattttataatttactatagggtactatagggtaagacctgtggtagtttttggaatttggtggaaccaattattattactgtgtggtgattattatggtgaatattattactgttgttatcttttgcaattactgttaggttttcaaaatttttttaccataacaatacgtgaagtacataattctgaaaatgaaattaaccaattttaccttctttttgacactat

SEQ ID NO: 337418 - DNA, 1205 bp, Cannabis indica
aatataatcatgactaagttcaaagtttagttccatgatttgtagtacactggatttagactgacatgataatcagtgatgaggtatacttacacctcagataagtgttatgtcttttctagggtgttggcaaagtataccagtatcggatgtatggagtatacattggattggaccgatattgatcttggatgagatatcataaacttaccattatatctttctaagtcaatatcaccagtttaacttaggtctatatatcttaatcctgagatgattaggttcgatctcaattgtattatttatgttcttagagttgttcgtaaaagctgactaatggttcaggtagatacttacatcttaggaacatgatagtataattaagtgggagcgctaatcataggtatggaatctatagcttctataagtatttagaagtgaaatgatgatttctttcgagcttggcttaatagagataagtgattgagatcttatttcagtaattatattagtttactgaaatatcatttatacgtagctaagtgttttaaggataaaatacattgaagggtagaacggtaaatttgtccatattcgatgtagataatcaatagaggatcttcgactatttggattgtaacaatggataattcataacgtatctatatcttggtacatgtagagccttctatataattaagagtacaattccaaatctatagtgacacaaggaggaattaataaattagagaatttactttgtaaattctagatctacttattggtcgcttagttatatagccccatggtccccatactagttgagataatactgcttgcaaactcaattaattagttttaattaatcaattataattctaaaatttgactatgtcttatttataaattttcactaataagcatggcttaattgtgaagaaaagaggttttgggatttatttattaattaagagactttgtatgatataattaataaataatataaatggtaattttatttgataattaattataattattgaataaatagttttgacatttataggattgaaattgaaaaattgtaattagtgaggcccattagtggcctaccacttagtgtgaatttcccccattattttattctttttaatccatataattaaaacctaaaccctagttaatactataaaaggagcatgatg

SEQ ID NO: 337419 - DNA, 664 bp, Cannabis indica
tatatttatcagcaaggaaaaagttacattgagacttgaaaaattgtcatacaaagaaaggcacacacacctttatcaatgaggctgccaaaaatacatatataagactttataaaataattatttttaaatatattcaaataatttggttgatttctaacttattgttattattggaagagatggtgacaacccaaaatagtgttcctgaatcttcacaagcttctgagctttagatacttcaacaaactcttggagagaggcatggccatcagcgaggagtgggtcacaaattaaaagggcagtcatcaagacgatgctcttacgggaaataattgttgagatgtagaaacaaatacagatgttgactcaacagttgtcacatgaacgtcgggaaccaatggatattgagatgaatgatgcagctccaacccaacaattgcatccacaatcgtctcactcttaaatgcctgaagatgggtttggttcatcttttcaggcaatcggttttcacccaatggattttcagcatcagcagtcgcaacagacttctattttgtttcagtaactgctatagcagcctcatgttccttcgtttgtgtaacaccctaactaacataggcgtattacgtgaattttaaacattgtgcagctcgttgctaat

SEQ ID NO: 337420 - DNA, 509 bp, Cannabis indica
atcccctgaagttgcaacttaagctccttgagttcagctggagccattctatatggagctttagaaacaggttcgactccaggtgccaaatcaattacaaaatcaatctctcgttgcggcggcaatcccggcaactccttgggaaacacatcgagaaagtctcttaccaccctgactgcctcaggcccaaatgtttcgggtctgctggagtcaatcaccactgttagaaatcctacacagtcactgtatagtaaatctctagccctcagtacagaaataatcgagatctgagaccccagaacttatccaacataaacgaatggatcttcaccttctggctgaaaagtcaccattttccgcttacaatatatactggtcgaatacttagacaaaaaatccatccccagtataatatcaaactcaatgagttccagttctataaggtcagcactcaattcccttccctcgatctgaaccggcatagacctaatgtgcctattagagataat

SEQ ID NO: 337421 - DNA, 882 bp, Cannabis indica
tgaacaattataataattacattccatacattatacatctgcgtatataaatgtgccatcgcactgtatattacattatctcatatacaatgatgccactgcatttaatgtctataagatagaaaacatataataaaatattaagcattcattttatattttaattattttctacttatatttattatagagcattgttattaggcattagtggtgcttatggctatctagatgtgtaagcaccatgattggttagtgatactctctaaaaattattaatcaaattatatgagacatgatacttaattgtgccaatagtaatatgacacctagaaaaatactaaacatcaataacactttttgcattactctaatttttttttattaaaatgtatattatattaatacaaaattattactaatatgtttatattttttttaaataaataataattaataaaatattataatatatataatttttattttaaaaatttaaagattattcgattataaaattggaaaaaaattaataatttaatatatagatttgattagtatgtaaatatttttctttttaagatttttttttattataaatacattaatgtattttaaataaatatatattattactagaataaataataaatagaataactcctttaagaaatcataatgtatttttttatagaaaaaattatttatcaaaaaatacattatgaaattgtattatcagagttattgttttttaaataactatttactttatttattaatgaagtgttagttgagtgccacaagctcaatatgtgcttcccaaaaagtctaatatctcttctattttttttttttaaaaaaaaagataaaattaataaaaca

SEQ ID NO: 337422 - DNA, 556 bp, Cannabis indica
ctcgttctacggttcagtaagcttttattgctttagtagtttatttaatttttatgaaataagaaaagcctgataggaagcatgttagtagcctgatagtagaataggcgaatgttttgtttttaatttccaaattaagcggcattagtaagctctctttgattgtgacctgaagtgccaactcggggtttcgagactgttcagactagatgaatgccaaacgaaataccaagagtcagggcaactcagtcgggtcaaatcagggttaaggagcttagttctcccaaatgttaggggctgaggtagagatcccaggggcagggctcatggtcggggtaatgttaacctgcctcaggctgcccaagtcgatcaggaagctcgaaattgggagattaggtttgctgaaatgcaagcgagaattgaagagcaagatctagagattcagagattgaggcagcagggggctcctgcagtgcctgtgcctgaggttcctgtggcacccgcccctgccgctcaggccgaaatagtagtagcagcaaacagaatggaacccttg

SEQ ID NO: 337423 - DNA, 878 bp, Cannabis indica
ataactttacgaaaaattcaaacctcccaataaatatattgggcgggttgaatattattctaacccgtccaaataacccgaataaaccaatttacatattttttactaaaattatttataacatattacataaattacgttaatagttaaactattttacattagtttgtattttatagtgtttattttgaaatttagaatttatagttgataattttgattgtatttgaatattatagctgaaatttagaatttacatacgaggatattttttttattttattttttgaaaaatagtgtttaatactttattttttattcaattcatatttatttttaaacattaatttaaactataactgtttttttgaatgaaaataatctttattagacaaaaatatctgctaatccaaagaactgaagagcaaggggaatatcactctcagaaaagagacgacctgaccaataacaagcaccacgtgccatacagtgcgcggctttgttaggagaccgtttaacatgaccaatagaaacattacttaaagaaactaaaataacttcaatctttaacatataaactaaaaatagaaggcatagataccgaactaagaatagcatgaacaactaaaatgcagtccgtctctaaaataacatttgacttgttattcctctttatccaactatgtgcttctttgacacttagaatttcggcaatttcaggtcggcaactgacagaagaaatagttgaaatcgcctccattactcgaccatcacagtcgcatgctacaaaccccgtacctatctcatttgtttctccaaaaaccgcttcatccacattaatttttaactgaccagcagccggtttggaccagtaatct

SEQ ID NO: 337424 - DNA, 907 bp, Cannabis indica
atatgaagcttgggttatctccctactcagctgaaaaaaaaaaaaccatgagcataatatcttgctttgaaaactttactgaccaaggagcgatcattgactagcaaccgccaacattgctttccaagaaggcctccaacatttttatgacggctaaaccggtcccaactcatccaactaacacctgctttccaaatagaatcagtttgccacaaaaattttgtggtaagacgctccaattccttccaactctccaaaggtaacaaaaaaaaactcatagcatagctggaaattgattggacaaccgctttcagcaacacttcctttcctagtcgagattgttaggctatttttagcctacgttttgggtcactttttatagttgttttccttctttattattatatttggaataggattatgcttgttttctttgatttcaggtttcacactttgaatatatcaattgatcaaatttcgaaaaacaacaatctatagaatagaaaaaattctgcaagaaaataaagctgaaaattcaagcttaaatttgactatgttctgatcagattttggaaaaagtcaaaacataaaagttttagatttctttatcttctttccaacgcatcttgaatcaactcatttagagtttgtttgtgaaagttatgcacattttactgaaagatattgaagttgtcaaattttgctctagtagtcgcgaccaccactttccatggtcgcgaccctttttcatggtcgcgactaagagccaaacagcaagttttttttttttttgtattttagcctatggtcgcgactaggctttatgtggtcgcgaccaggggcgaaacactggatttttggccagtttttgactttttcagagataacaaccctaatttctatttaa

SEQ ID NO: 337425 - DNA, 1378 bp, Cannabis indica
taggcgtacatttttaatttttttaaataagcggcattagtaagttctctttgatcatgatctaactagactagctcttggttacgcaggctattcggattagatggatgccaggcgaaataccaggagctagggcaactcagttggatcaaatgaaggtcagggagctcagattcccccaaatgtccggggccgtggtagaggtcccaggggcagggcacgtggtcggggtgctgataacctgccacaggttgcctaggctgcccagaattgggaaaacaagtttgcagaaatgtaacccctgtatgaaaggttccataagcatgcacctccagtttttctgggaggtccagatgttatgaaagccgagcaatggctaactgtgatcaccaggatattgaatttcatgggcgtcactggaaatgatagggtggtctgtgccacttttcaatttcaagaagatgctttagtttggtgggacatggtgtccatgatacatgacgttattacaatgacctgggagaaattccaagagttattcaatgccaagtactataatgagccagtcagaagtgccaagaaaaaggaattcacccatttgattcagagggaaaatatgagtgttactgagtatatgactcagttttatcacttggcgaggttggcctcgggaattgtgccaaccgacttcagtaagaatgaaaaatacatggatggttaaatgcgaagattcgacatgatttgatgattactactaatgacagaaccacctatgctgaaatggtggataaggaactgcgagctgagggcacagtgggatgcatgatagagtctggtgggactccagctgttggcgaggctcctacccctcctgcatcaagttttagcaggggaggtagtggttcggccatggaccagaaaagaaaggcatccactacaactagtggcttcggtcagaacaagaggttccgggggaaccagggttgaagtaatcgccagagtggcaccgaaacctgatacacttacccagagtgtcccagctgtaaaaggcaccatcttggggagtgtaaagggcagggctgctttcagtgtggcatgccagggcattataagagagattgtcccaactcagatctgaagcaccaaagactgcagcgaaacccactccagcaagggtgtttgccataactcaggctgatgcagaagctagcccttcagtggtaacatgtcagctctcggtcaacaacttttacttctctctactgtttgactttggggccacacattcttatgtggcagccataatctttagtaaatcggatagaccgtacgatagttatgaatcagggtttggaaccctattacctggcggagaatt

SEQ ID NO: 337426 - DNA, 489 bp, Cannabis indica
aacccagttcggcccgaaatacccggttgtgactataccgcgccaacctgtcaaaacacacatgaaaaagacatcacaggcatactatataataatatagttctataagcacgtaagtaaattaatttcactattttacccttctcgggccaaaattactaatatgcccctggctcaccaacggggtcttaacatgttataaatcatataaattctcatctattaaattatataataatataatttataattattcataattatctagttagggttttgctaatccctttcttaactctagggtattacatgaagacagggacatggttctgaatggtgggtacatcttcttcaatagaaggctagtgataatgaaggcatgagatcctaatacaaacttcaagaaaaaagtgtcaaaactgtcccaatttgagtgcaacttgaagatttagacctgaaatactggggacaaagatctttattcaagat

SEQ ID NO: 337427 - DNA, 1290 bp, Cannabis indica
agtctgtatatgactaaatcatttgtgaatagattatatctaaaataggccttgtattcattcaagatgatggaagacaaatctgttggagagcaggttgattctcgatcttgaaaatatttgtgtcaccattgaagtcaaagatcaagctttgttgtttctaagttccttacaaaagttatttgtgcactttaaagatacaatgttggatgaaagagagtcgatcacactcgatgatgtacaattaaccttgaatttgaaagagctgaatcaaaggattgagttgaagaattttggaagtggtgatgaattgtatacaaggggaaaaagtgagaaaagagaaagtcacaaagattcaaaagaaaaatcaagatctaaatcacagtttgataaccagaagaatcttagatgttggatttgtaagaaaataggatatctcaaaagggcatgtccagagaggcataagacgggtgattcaagatccaaaggagatgcagcagtgagtagtgacggttatgactcagctggtgctttgctatcttggattctgagtgttcattcatatgacaccgaataaatcttggttcaaaaaatttacatctggaacttatgggactgtgtatcttggggataaaaagtcttgtaagatggtaggaattggaatcataaggttgaaacttcatgatggtgttgaaagcgtgttgaaggacgtccgactagtacctgatctaaaaagaaatttgatctctatttgaatgttagaagatcaaggatttcttgttaaaattgagaaaggaatcttaaaagtttgtagaggatcgatggtggtgatgagaggaagaatatcaaatgggatttatccactagaaggtaccacgttgaaaaatatgaaggtgtatgtttcaagcaagcacgtaaatgaaactgaagtatggcacaagagacttagtcattgtaaagaccgcttagtttaatttggaaattagcagttaattatgtttaattatggaaattatttatggatatttaaataattatttataatgttattgttgaattctgaaatgcattttatgtcatttagtgattttcataattttgcatttccggtgcccggtaacatggaactcggtgtttggctcagtaaaatcacaacatagtatgttagtattttggggcggtttattagacattgggaatgtcgagattggccgggaatttagaatttctcaaaatacccctttagtattatttatgataatttagtgtgagggggcaaaatggtcattt

SEQ ID NO: 337428 - DNA, 913 bp, Cannabis indica
ttttgtataagatgttgcttcgtttgtagtgatcaccaaatcatgtccaatcttcacattcaaaaaggccaagtactttctttcttactaaaatattttcacacaatacccacggcgagcttggccagacggtcaaacattgtagtatattcactaaccgccataccctcagtttgcaataactcagtgaactctttccgcttagcgttgcggacgacttcattgtaatatttggagttgaaaaactcccagaattcttcccaggtcataacagtgatgtcccgagtgagggttatcaactcccaccacacgagagcatcctcctagaactgaaatgtggtgtaggtcacccgatcatttccaaccacccccataaaattcagaattcgctcaatcactgtgagccactgctcaacctttatcacatctggaccttccagaaacactagaggtgcttgcttgtgaaatctttcatataacggctccatacggttggcagcagtaggttattctgctggcaccgctagagctgtaacggccggagcttgttggggcacgacaggaagaccctgctgccttactctctgaatttcttcatcttgatggcggattcgatcttgcatttctacaaacctctgctcccaatccggaggagctcatggtggatttacaggatgaccaccctgagctctgccacgaccacggggattttagggaatctggtttccctgaatgcctcaagtctcaacaatattaccctaacttcttgtattccactcggcgtccatttataggacttagcttgcgaacccataagctaggctggttagacaacgatcacaaactcaataccgctcttatggacttaaaggcaacacacttaaaacaattaattataatctattatgcttcc

SEQ ID NO: 337429 - DNA, 513 bp, Cannabis indica
caattacaaccaacctttaatgtcttttgattatcattttgttcataacctttcacctgtaattgtggagaatttttttttattcttaagctatgatatctatttttgtaataagaatctatctatgtgatttctggctgaaactgattgctaattgtccctttagtgtatacctgggttaacttggactttgtagttctctttggtaattaatttgtttccttatggcttggactactttgcaatgccaatgttggtttatttttatgatctcatcactggaagggtaagataagagaaatccaacatatattcccttatgttgttatgggtgttgttgatgttgtagaaaatgcttgttttctgtgtaatacgatgccttgtgtactaattaggatttgagttgtaaaggatttcctctgctttccaccatatctctttcttggtgtctaaacaaattaaggcttaaaaagtcttccgttgagatagcaaaataagagagaccaaaagggt

SEQ ID NO: 337430 - DNA, 1296 bp, Cannabis indica
aaggtgatcaatcttaaacatggaaatacacacaaatatggataatttcacaaacaagacaaaagaaatagcaattatcattaactaagcaaaacgtcaatcaacattcaccgtcttccccaatcgggagtttacttaataaaacccatattaacatccataatcaaatctacaacagaaattaatataaaaaatcaagagttatgaaagaactagttggtgattgcgctccggatcgtcacaatagcttcctctcctcattcattcactttttggggctaatctctaatgattttcgtcataaaacgcgagtccttcaaatagaaattagggttgctacctctgaatgacgaaaattcaaaactggccaaaaatctcgtgtttcgcccatggtcgcgactacataaagcctagtcgcaaccgtaggcatagtgaaaaatccatgctctctgcctggcctcctagtcgcgacccaggtcgcaaccatagaaaagggtcacgaccgtgggtaagtctggtcgtgactaatgaagctaatttgacagcttcagcagatttttctccacaatgccccatcttttcaacaattgatacaatttgtactctaacgcctcggggacctgaaacaaggaatctcaagcataaaaccattccaaaaggaaacattaactgagaaaacacttgtgaaatcggcccagaacttaggctaaaaatagcttaacaaaattctcccaaactagattcttactcgcccccgagtaagactaagactaaactaactatgttgtcagatgattataatgctgctggctcatgttccatttccttccattaattaaactatattttgaattccaaaaactctaacatttaattgggatgctcatcttatcacaacaggtgcagatacaacctaacttcacaattgaaactatgttataatggtttcactccattgtataattccgcaaaccaatagccaatatgcttgcatgcttacctctctccactaatgttgacaacattctttttggaatgaaaaggactttttaggcaagaatttatggcttagatattcagaaaataaaagatatttttggctaaagatataagcacatttaaaacccacaagcttctcataattttaaagtttcccgaagtgttcccataactaaccatgattgagattttctgtatttttcaatcaccagacatcactgaaaatatatttatttttcttttcttttatttttgattttttttctacttttctagtgatgtcgagctacaattttt

SEQ ID NO: 337431 - DNA, 531 bp, Cannabis indica
taaagaaaatagtaatttaaaagtctaatacatataatacaattatattgcaaaacttaatagataaaatgtatattctattcttatatatttttttctacatacaattttttaatagataaaagtctaaaataaaattaaatattttttatatatatacaatttttttttcttcctttgaatttgttattttatttatttaatgtgttgttggagacataaaataaccatacttgttttattttgttgctagtcatgtgaaaaaaaaaattataaatattaaataatttaatattataaagtaaccaatccaaagtaatcgatccaatcctgaaatccgcacttgtgtggattggatgttgtttgaccaaaaaagtgcggattggatcggatgaacagccctaagtgaaccacttgaggctaactcaaatgggcataggagggtgagtgtgtgttgaagatcctgggttcgaatcccaaattatgcatggttgtaatatataaacgcttaaataaaaataataataataa

SEQ ID NO: 337432 - DNA, 546 bp, Cannabis indica
ttcatgttggtttatgtgttatttaatcatgttatgtgaattacaaaaattttccatgaaaataattttattttcgttttgaaaatattttatttggattccttgtgaaaaattaagcaattttggtttttacggaactcaattccgataaaaattgaaaaagttatgaaggtttgaaaattagatgtcaatggtgtgcatcgagtgcaccaggcactcggacaaggagacacgcgcgcggatgcctggagggatcatgtctgaagacacggcattgcacccgttcaaacacgcttgaggctgtacttcgctcgtgtccgacgctgcaggcgccgaagaatgctgcccacatgaccctgcaaatctctcccttccgcgcatgccaggccccatttggagccttgctaggctgcacgtgcagccctcctctgcagcaacaccccaatacctgattttcatgagatttttttcccaattttgatttttccaattttcaaaccccaaaaatcaaaataaaatattatttttaatatatttaaacttaaa

SEQ ID NO: 337433 - DNA, 1500 bp, Cannabis indica
taggacccgatcttagacccagactcggaccttgacatggatctagatacgaacctggactcgaacccatactcggacccatacccagaccgtgatcggaccaggattgggactagaactcggacatgcgactgtagcaagacccaaacctaaacccaaactcagaccagaacccataccgagacttggacccagaccgggacctatgtcctaggacctaaaccaagaccgcgacctggacctgaagccaaaaccagacccaaaaaccagggccgaacccaaaccaagaccctgacagggatcaagacatggacccagacccaacctttgactcagaccagcactcagacctcgacccagacccagacactaacctgaacccagaaacagaatcgaaattagaactggtagtaggacccagacccaaacatggaccccgactggaacctaagacccgggtctcagaacccagacccagatcggaactcgagagtcagcccggacctggatctggacttgaaccgtgactagaacctagatttggacctggaccaggatcgaaaacccgaacccgaactcagactaggacttaaaccccgaccggggtcctagactcggatcgagacttaggaaccagacctagatgggggacctggagtagggactcggtcttcagaactagcaccaagacccaggacttgaccccgaaactggaccctgaactgggacccggaccaggacattggaccagaagtggaactatactaggaccaaagactgggatcctgatctggacctagggcttggacctgacccgtagtctatgtttggatttgggatccatacccgaactaaaacccagacccggactcaaatccaaacctagacccaaacctggacccgtacctcgtgacttgaaactggaagtggaaccaaaagcggactgggacatgggaataaaaccaggggactaggacccagactcagaccaggaccaggacgtggacccaaatcaaaactcgcattatgactcaggacaagaacaaaaaccagacatgaacttggacccaaacatgaacttggacccagacccagacgcaagacctgaaccgagattggagactgagacttggacccaggtcccaaacctagattgggaacccaaacctgaaattagaaccagaatcgggacccaggactgggatggggacccaacacccgaccccggtctccactactacaaaaagtacaattctcatcgatttttaagtgttatttgaagaatttacgtcggtctccaccaacgtatataccgtagtcgcaaatagttttttattagcgttgttttttaaatgacgcaaaaaacaataatcttcatttaaaaactaacgcaaaatatacactcttctttttcatcttctgcgtcagtttaaaaaggacgcagaatcgtttgtggcatttaaaactgtcactaaaaatttatagcgtcggttttaaaat

SEQ ID NO: 337434 - DNA, 721 bp, Cannabis indica
ataaaatagattacattgaaatggagttttatttagggcataaaacctaacactcttagtcaaggactatacaagttgtctctcccagcatcatccactacttccaatcatgtcaatctctctgtgtattctcctactatgtctttaaatacccaaaataaattttcttgtactatttcttgttcatgtactacttctgaatgtattgctacactttggcataatagacttagccatccttactctgttattcttaaaaaagttcttcaagaaataaatacaaatttgcctaaatctgatttacaattttgtgatgcttgtcaatttggtaaaaatcacttaatgcatttcagtagctcttctttaaaaactactcaacccttacaacttgttcactttgatgtctagggtccctccccaaaccctactgctaaagggtatgagtattatatactatttgttgatgattttaccaaatacagttggatttatcctatgaagagtaaaactaatgcttttcctatctttctaacattcagaaccttcgtggaaaaataactcgatcatagtataaagggtttacaaacagattggggtggggaatacagaaaattacaacgtctcttacaaacactaggcatcttgtttagacatccttgtttttatactcaccaacaacaaggtagagtagaaagaaaacataggcatgtaactgaaatgg

SEQ ID NO: 337435 - DNA, 609 bp, Cannabis indica
aggagatccttcatcctcctttgtcagagaaaaaaattaccgctaccactaaacttctcaattcctagtttttggcctgtcatgtttcttgagtctcaccaacctttgtactggttaggggattcccaagaaagactgtgtatatttatcgcagtcctatcaacaaaggataggcccggacagtcttctagacagaatcacccttataagtgagttcctaggaaagacatggagagtcacatgcgaactacataaattccagtctcctagacagaactacttatgccatacgtaaccaatgacgttgcaggaatagagctccgacctcgtagttctgatacaaattgttgggaataatggacagtattccaattccccttcaagatcaatatttgtgggaaaatacaatggggactccaaaattcctttctgatgtgaaaaatcagtcaaagctgcaatcacagagcacattcaaaaattttggatatcttccaatgtaaataatactttacgaataataatcaaaacactaaatgcacaccaagaaattatctcgtgacaaataaaaaccacggtaaaccttccactataacaataataatgggtaca

SEQ ID NO: 337436 - DNA, 1172 bp, Cannabis indica
ttgaataactgccttatttagtgtgatccaccacttttcaatttttgctaggatttgattagcaattactttgcaatttaaattgaaaataataattgggaaacatgcaaagggtggccagccttggtgtgtatgggcctcactggaattttgcagtttcactactagaaaaatgagttttagtgacacacattgagtaactccaaaactatttagtgacacttcaacgcgcgtcactaatgaaggtgactggaaagccaggttttagtgacgctccacacatgtcactaaaccattttacattcactttctgcgcgtcactataggcgtataaagtcagattttgtgagactaaaaaagtaacagcaacacacagagagtgtcactatatccctttttcttttctttaattaatatttttaaagatatagtgacacacaaaaagtgccactatattaaatatttttctaaaaaaaagaccaaaattaaaaaggaatatcagattctttttaattttttttaataaatacaattaactcaaattaaaataatatacaaaaaaaaattaactaaaaatacacatatatacataatgattcaaagtttaaaattaaatctccatacataatatcctcaaaaagcacagtaattcacaatgagtataaacataaatttaaaccaaaaaattaaaaaaaaaaacaatattccatttattggatagagctgccataaaagaagaaagcataccattgtatataaaaataatttatatatgcagtatatacgtgaactatttttgacaaaagacataccattttttctatgttatatattgtataacataaactattacaaacataatattgttcatattcatagcttttggctagactaaacattaaacaagaaaactaaacttttagattcatagagcttcaatcgcgaccacgaaccggaaccacaaatgagcttcaaacaccgccaacgagggacaagcttgcgatcgaccacgaaccagaaccggacccacagatgaacttcaaacgtcgttgacgacggacgagctcaaacgtcgtcgacgagggacgagcttcaaacacaatcgacaccaagatcctacacagagagagagggaaagagaaacaaataaaagaaaaataaagtagagatat

SEQ ID NO: 337437 - DNA, 717 bp, Cannabis indica
aaaaaaaaataaaaaaaattttctcattgtattttaaaaaatatgtcaaaaaaataaaccaaatacatgtatctacaaaacaacacacatacaacaaaaaaattatcaaaataaattaaaaatatacaccataaaaatttacacataaataaaaaaactataaaataactatacaacaaaaaaaattctgaaaaccattgaaaaataattaaaacacaacataaaaataacaaaacaaatgcacatatatacaacaaaaaacattgttaagaataaactaaaaatatacatcataacaaatgcacataacgaaaaaaaaattcataaaaataatagaaaaacaactataacacaactatagaacacctaaacaataacataaaaacaattataaaacaataaaaaggcaactataaagcaacagaaaaataacaagatatcgacctcgttgcaatatgcaaatcattcattgattaacttcaaataaactacaaaacataaaaaaaaataatacttttatcaatcatgtaagacaggaagagagaaagatatacgaggaatgcttttaatttttttgtaagagagagagagaaagagtgttaaaagtaagaaaaaatatatgagaaaaagtgtgtaagtacaaaatgtgattaattaaagaaagatagtatgaagtagtttgagtgtgagtagtaagaaaatataaaagagagaaaa

SEQ ID NO: 337438 - DNA, 535 bp, Cannabis indica
tgattttaattaatttttggaactgttgttagctgcggaggcttttgctgtagggcccaaagaagttgaaattgcgaagaagcatattgctcagcttcaagaagacgttaagaagttgaagcaggctgcgtcttccaaggccaaagaattagaggaacttcgtaaggccaaggagcaggtcgagcttgaagccaaggcaaagattgaagagatgtctcgcaacctggaagctgagaaggagaacggcaagaaacagtacgaccaggcggtctcggactacatctatactactctttccaaagttccagacttcgacttctcgattcttggagcggaagccgcagaaatggccaaggcttttcgcgctatgtcacccacaccaactcaagttggtggagggatccttctcgaggagactgaagtcgcggaggcggaggaggttgagaacgaggtggccagtaaagtcgcagatgaatctgttcctgctgctcccaacgctgatttttcccttctatgtttgaactatatttctttt

SEQ ID NO: 337439 - DNA, 708 bp, Cannabis indica
gtaaatctgcgagtcactcggacgaggtccgtgagtaggacgcagtctatgagtgaaacaatgtctgctagtaattactcccagccggatctacgagagcacttgaatcggaagaaacctgatcttcgccaacaacttggtccaaagcaagaggatcctatccaattgcgaatagacgagttggaggacaagttcaggagatatcaagtgggggatttagggagacaatctggatatgactcagacaaggagcttgagtcgtaccacccagatatcatgaataccccttttccctcgagatttaaaaactcgcatgtctcatcgtatgatggaaccactgatccggtctcacatttgaacaactttaacataataatgtgagctagtaatgtgacaaacaatttacgctgtatcttgtttcccacctctctagttggagcagcaagcagctggttcaacaagtttactcaccattccataacttcctaggaacagttgtctacggattttaaaaaacagttccaggctgccagggatagacgactcgaggcagcctcgctaaccaatataaagcaacagcccgacgagacacttaaggcatacttaagtcgttttagcacagctgctgcaagagttagaaatttggatgatattacacagcttacaacccttcaggcggggatctctattgatccatcaaccgttggg

SEQ ID NO: 337440 - DNA, 1520 bp, Cannabis indica
ttggtatttataattagttaaataaagttttaattatttacgattttcaataaactcattaattagcaacgagctgcacagttatgttaaaaatcaagttaacacgcctaaactaacgagctacatagttaagttaaaaatcacgttaacacgcctaaactagtagggtgctacaatttggtatcaaagttgccaggttattttctgaagatcgtcacgacatgtacaatcatcatcagcgattagctcgtctcacagttcagtaagcctttgttgctttaatagtttattttaatagtatgttttaagaaaaacttgataggaagcatgttagtagtctgatagctgaataggcacatgttttaaatttccaaaataagtggtaattagtaagtttttcttgatcgcgatctaaccagtctagcccttggttacgcaggctgttctaatagaatggacgccaggcaaaacactaggagttagggaattttggtcggatccagtggcagtcagggagatcagatccccctaaatgctcgtggctgaggcagaggccctagaggcagggcacgcagtcgatgtgatgttaacccgccgcaggctacccaagaatgggcaaataggtttgcggcaatgcaagccaaaattaatgagcaagaggaagaaatcagatgcttgaggcaggagggtcctcctgcagtgcttgctccataaatgcaggtagctcatgcccctgctgtgcagtgaaccgaatggaaccactatatggaaggttccgcaagtaggcacctccagtctttttaggaggtcccaatgtgatgaaatccgagcagtggctaacgggtattactagaatcttgaattcatgggtgtcaccggcaatgacagagtggcatgtgccacattccagtttcaagaagatgctctagtttggtgggacatggtgtccctaacttatgatgtaactgttatgacttggggaaaattccaggagtttttcaacacaaagtactacaatgaagcggtcagaattgcaaaaagaaaagaatttaaccagctgacccaaaaggagaatatgagtgttactgaatacacaactgagtttgatcgattggcaagattggcctcaagaattgtgccaaccgctttcaataagaaagaaaaatacctagatggattgaattcaaagatgagacatgatcttatgattaccactgatgacaacaccatctatgctcatacagtgggaaaagcactacgagctgagggcgcagtggagtgcactcgggagtctcgaggtactcaggttgttggtggggctcctactcctcctacatctggttatagtagaggtggtagtggctcaaccactgatcagaaatgaaaggcactaactggaccggtggccccttccatacaatgtttgactctggggccactcactcgcaaaacctacatcactacctccagtaagcattgataaataattaataacaaaaagttagtgaatgtatatacct

SEQ ID NO: 337441 - DNA, 596 bp, Cannabis indica
tcagctttcggctcctctttctttgcctgagggcagtctttcttgaaatgccccaccatgccacacagaaagcatgtcttccggttgcactctcccgggtggtgtttcttacaatgaggacactcagggtaagagtaaccctggcgtccacctctgccttggtttccatgaaaccgcttgctttgccttgaaccaccagatgctgaggtgactttccttttctgctcaatggtggaatcaccaccatcccttccatagacaagagtaggaagagtgggggttctaccaacactcggaatccctcggggttcctaaaggaatttcacagcacccttggctctcaaagccttttcaaccatttcaacatatgaggtcgcttcagtggtagtgatcaccagatcatgcctaatcttagcatttaaaccggccaaatacttttctttcttactaaagtcaattggcacgattcccagggcgagcttgacctgacggtcaaacttagtagtatattcagtaaccgacatcccctcggtttgtaccaactcagtaaactctttccgcttagcactgcatacaacttcattataatatttaga

SEQ ID NO: 337442 - DNA, 780 bp, Cannabis indica
attatacacatcattgaattgatgatagtgattcttgaagaattttaaggtttgttaaacataatagtgactcctgaagagtatatatattttggagaataatatagttattttattcgtgtatataaaaataaaacttgtaataattacttatatgttgtagtgatttacattaccttatgaaagtttcattgaaatacaaattattgtgaacatgaagttcatgaattgagttattttgacatgatcaaccatatgcaataaattatcaaatggtttgactacattttattgaagaactagaagatttttctcattgttaatttataaggctaaaaaaaatgtgcatatatttagacatagaaaaaatgtggatagtgagacctttctcttctttttatattaattctcttagggttatgattgaattattaaaataaaaaaaaatgttaaaaagagagcaaaagtaggatgtagtggccgaccctatgtgggtccatcactagttagattttttctacttttctcaataatttctctatttttcacaaataccacttttgcacttttaatcctataaatgccaaaactatttatttaataattaaaattaattttcaaataaaattgtcatttaatatatttatttattagactcaataaagtctcttaattaataaatggctaattagtaatttttccccatgaactttcacatgtagtaaatcgtgtcccctgaacttttttggccgttaaaaatttcccccgaactattgagat

SEQ ID NO: 337443 - DNA, 682 bp, Cannabis indica
atgcccatccaatggtggttcaatacactgtgaaaatgggatgacagggataaaggcccgatgggggtccaaaaaatgggtttcgaggcaatttttttaatatggtctgatgggcccaattaggggccaatggtgtgtccgatggggggtcgataaatgggttgggacgatttgttttggctgggttcgatggagcccgattatgtccgatgggtgtccgatcagggggtaaaaatgggttcggggtaatttttttgatcgtgtccaatgggacccgatggggtccgatggttggcccattttcagtccaacatggttttgggactttattttttgacggggtccgatatggggccgatggtggtccaatttgggcgcgatggtgtacaaatttattgtattttcaagaatttggataactttccagtgagatttttgttctaaattgtaattgtaatttttcaatgtatgtgataggttcatctgttaatgcgtttgttatgtataatagtgtttgggagcttgagggtagacattgggtttttaaccgaggaaaaaatttgacatttgacattgatttgaacataagctactcaggtttggttgatcttttgtatgaagaactggatgttgacaaagtgcagtatgacttgaaattagaagtaaattacaagaacatgaa

SEQ ID NO: 337444 - DNA, 1018 bp, Cannabis indica
gcagcgatggaggcggaggacttggctatagcttcgatgtagtttgtggtgacgagagttaggggtatcgaatgggcggagaggcgagtgtatttgaagcccgctgcgttgcatatctgagctacagcgattttggcgatggcgaaggagaagtcaggaggtgttgattctgattcaatctctgctgctggtgtttgagagtttttttgagggtatttggggttttggttttgggttttcatggtggattgggattgggatgttgagtttgtgtttttcttcttctacttaaaccctaaggatatcaaaacacactctttaacagggtttatgttttgtacttttcttttgtactttttttaaataataattactgcattttttttagaatgctaaggacaacactctttagagcattgagtattcatttttttcaagctagtttgtccctctcaattttaacattgagtaaagagtaatttgcggtattaatacttaagtttatttcaaagttgcagataaatactcaagtaaaaattttggcggtaaaaatatctctgttaggattctggaagttctgtagatacctcttcgttaagtgacatgtaaatgtccacatgtcatcttcgcattcgtctacattatttaattattatttttattatttaaaatatttgaaaattattttaaaattaaaaaattaaataaaataaaaattaaaattaaacctaattataaattaaatttacataataataataatattaattaaaaacataaatcttcatctcccataccatcgtcttctccattgtgttcttaatagagacatcccaaacctaaaaaaaaaattcaaccaaaaatcttaaaaaaatttctcacccaaaaccattcacccacttaaagctcaaaaacattcccactaagagaaaactgatctaaccaatccaacaaacaaaactctactcaaatatcccaaaattgtaaaaaaaaaaaaaaaaaaaaacccaataaattt

SEQ ID NO: 337445 - DNA, 540 bp, Cannabis indica
agagagagagagatagtacgtaaggtactgaggagagtgggagggagggagggagtgagtgtgtccactgtacctttattccgaattttaggcttacttttaaaatttaaaaatttagataatttgttgatttaataatattttagcattttattatatattattatttttagttaacctaaacctatcagaatacgatatctcataatctttttatcaaaccctaaactatcatagttttatttttcctctccaaaccaattagtcaaagcctcattcttcttcatgtttgctcctctcaaaccttccacaattcttcttattttctaccttcattcttaaagttttggatttataatcaaggcttgcgggcttgagacatcgaatagaaatatgtgaagaggtatgaaatattttcttgctcaataatgctaaatgttatctagggttcggatctattatattttttcgttttcagaaaaacaagtttcagtaaagtgatgatatctctcttgatattgatccgtttttagagatttt

SEQ ID NO: 337446 - DNA, 590 bp, Cannabis indica
ctgcagagcaaaaatgcagaatgacaaaccttctgcaaccccgatgactagtggaaccaaattatctgcatatggtagcgatcccattgaaaatgtgcaggagtatcgatctattgttggaagacttcaatacctcaccattacgagacctgaacttgcattttgtgtcaataaagtttgccaatatatgcaccagccactgcagtcacattggatggctgtcaagcgcattttgaggtatgttagtggcactgtgaaacatggtctgcatctccgaagaccttcaccctcttcaatggatgttgttgcattctgtgatgcagattgggctacagatcccgatgacagaaggtctacttctgggtttgctatctattttggttcaaatttagtaagttggcagtgtaaaaagcaacacacagtgtcaaggtcgagtacagaggcagaatatcgaagtttagcaagtgtggttgctgagttgacttggatgaatagtctgttcttagagctaaagatatcactgccccgagttcccaccatctggtgtgataatctaagcacgattttgcttacagccaatccggttcttc

SEQ ID NO: 337447 - DNA, 858 bp, Cannabis indica
atatttagtaccttaaagtaaaacttaatcaatataattttataaatttaatcaaatagtcctaagttatatctaatcaaataattaaatttgaattaagaattcataaaattttagactgtctgattgtattgataaaattttatcaaaaaaatttaaatttaaggtaccaaatatgtatgattataaatacagagttcccaacttgtatttttttaatggaaatatggcaattttattagatagaatcatccataacaatgttcatcaactcagaaggtgagttggttacatcaaaaataaaaactgacgagtaacaagaactctgagcaaggaaatgcgcgaccttattagcggcatgtttaacaaaattcaaagagacattaggtaaatcattaagcaatttcttgcaatccgaaacaataaattcgaaataagaaggaagacacacaaagctatgtattgcttgaactgcgacaagacaatccgtctcaacaatcacctaatgccaaccttgagtcttgaaccagctcaaaccttctttgataccaattatttcaacaacttcatgagagacacttccaagattaagagatgttcgggcttctataaaggcaccatcaccgtttctagctatgaaaccataaccataagaattcaaagcttgaaaaatcgctccatcaatatttatcttaatcgtattggtaactggtttagtccaacgctcatcctccatcccttgaccaacatggttaagtagaggctccattctctttcgttgagcacacaaggtacaaaatgtgtagacaccctaaaattaatttataatttgtgctaaatttatcaaaaaaaaaaaaa

SEQ ID NO: 337448 - DNA, 791 bp, Cannabis indica
ctaacttgatttgtttttctaatgagataaatccctaatggatttaattccatataatttaaatcctaaacctagttgaaatactataaagggaataagatggctctcattttcatccaattaaaataacctagtttttattccttattagacaactagaaaaataagagcttccttctttgtattttgaaattccttcttattgttcttcattaattttgagccattagtgatagattacatgtccattcatatcaaatcaagtactcaatcatagtgtggaagattttgaagaatccaaccaaactgaaggagagaagatctaaatagaaggagtcattattatgttgttgccatcaatgtaaggatttcttaatctcttatatgtttattttatcgtattagaaaattcatatttagggtgttagattatagaattataatcaacatacatgttagtaaaataacttccaacataaccttgttcttattgagttttcaacacatgagcaagaataatagagagaaaaactaatttccttttctctctatagatttcaaaatttactgtgtaaaggaagtgttctgatttctcaaatcaggcttctatttatagtagttaaatccctttaagtaaatcattatttaattgtttaaataaataaatatctataatcgaatttagttactgatatttatgagagaatctctcaactacttgagagaatatctcaataactttaaaatatctataactatttttcaaattagatatttacctaactgaatta

SEQ ID NO: 337449 - DNA, 561 bp, Cannabis indica
atatgatcaaccaaaaaaagttataaaaataattaatcttataactcctctctatgttacaaagtgaaggttacaatttgtaggttaaataaatcacatgttacacaatttatttgtcaaacacttaatatatattattcacataataatatatattaccacactttaatatacatattatatttttaaataatataacaatctcccactagaataaaatatgtaacacacttgtaatatttatttaatcaatcaaatataatattttctcactttgattgaataaaaacataatattatagtagtattacttatatggattaggtaaaatatctttcgactttaattttatctcagtgtagttaccacaaagtttgatgaaattttagttgacgtagcattgaactactattctttaagcacaaatcggtgataacacacactcttactaatgctcacttgcgatagcatgtctcgctcttgcaccgttaatggtcatatgcaaaattctaattcatagactctctagagaatactcctaattctcataagaggcggcac

SEQ ID NO: 337450 - DNA, 488 bp, Cannabis indica
catcctcgttaagccactcagtatagctgaaaacagctagcttgaggttccctctggagtcgagcataacgttctccggcttaagttctctgtgaaaaatggggaaaataaattaggatttttgatagagaaatgggatagagatgtagacaagattactggctttcagcaagaagaaaagggcaggaagaagaagaggacgatgaaggggacgaagaagaaaagggcaagattactggtgttttgtgaattagttttaggctttgagttttaattaatgatttattttattttaatttaattaaaatacaaatatgaatattaaatatttattattttattttattttaaaactatttttattttatttttaatttttaaattgatttacaaataaaattttaaaattaaatgacgtggactaatcaaagaatgacacgtggacactaacttggcacataacggccaggtacctacggaagttccac

SEQ ID NO: 337451 - DNA, 620 bp, Cannabis indica
aacctagacgaataaccaaacccgaaccaagacctggacttgggacccaaaattataacctcaacaagaatcgccgaaccaggaccctaaaacaagactaggtacgtgaccaggacccggacccagacttagaactgaacacagacctagcctcagacccaaattaagactggaactcgggcccggacacgttgtgtacccagaccggaactgagacccggacttggacctaaatctgggacccgatccaaaacacagacttggaccaagatagggatccggatacgaacctcgactcggaccaagacccagactgtgatcgaaatgctggacctagatcaggacagagatcctgacccagagctaaacttggacctacactccggacccgaactaggacttggacctgaacctacacccagatccgtgtccagacatggagacaaacccggacacagactcggacccaaactcaaacccacacctacaaatagacccaaagctagtcccggaccctgacccaaacttgaacccagaccaagatcaaaacaaaggacttagaccaagaattgaatccaaactcagatcgggatttgaacttgggactcggacccaaccta

SEQ ID NO: 337452 - DNA, 839 bp, Cannabis indica
gaagctattaagtttattcttagatttttattaatcttttagacttttactaagtttatttagagatgtttcttatattagtgctttgttaatttattttttttaaaaaaatgtgatagctaggtgatatgtgatagattttgagttattatttttttgaaaaaaattaatcttctagacttctattaggtttatttagaggtatctatatttattctatataaaatgtggttatataacagaattcttggtttatgagaaattattgggtgactattttttttaagttttctattaaaaaataacattttttcttttgttgaggttaacggggttaaatccctaatttatttttaaatgctttatcgcgaaacttcctttcactttccctctctccctcgcatctcactttctcaaggtttattttgctttgtaagttttttgttttttcctttctttctgtcatgtcctgttgaatttaatatgtatatgttaggtattttctattttatttaaaagtgatacaattaattcaatttttcccaaacgttgctgtcggatattgcgaaagagtttgggtatcttgatttgatcgatgcttgggataatgatggttggggggtcggagtaattactgtgagaaaagataacggcgattactttgtttgcttcgaaatctccgataatgagattgcttatcctgtttcgagattgagggattcatcttgattgggtttggcggcgtcgaatctcgcaagaccacatgtagccttctctgaccgtccaacgaaggaccaaatcaaaatttcaattcgacaatgaggttcacataaacaatg

SEQ ID NO: 337453 - DNA, 778 bp, Cannabis indica
catagataagtttgatcatcattatcaatctcttttcttttaaggtttctaggtttagcaatattgaaaagttcattattaagtgcgatttgtatatccggtcttaaaacataaagcccttgttccatgtgagcaacacataattgaaatccattacaagaaattgtgcaaacagaactcgaaaaattcaatttataaaattgtgtctgtaaacatgaaacactaatcaagtttctactaaaattaggaataaacaaaacattgtctaaaactaaaaatttcttctgaaacttgaggtgggctcttcctttggcttggaccgatactaactcgccatttccaactttgagcttcaactcctctgggttaagataatcccaagtttcaagcagctgcaatgaagaacaaacatggttagtagatccagaatcaacaatctagaaggatttgtcattctctaaaacacatgattcaaaaacaaaagcattaccttcattcgaattgtttagaagtctgggacatcgttcttcctgatgtcccttctcattacaatttgaacattgaagagtactaccatcaattgtagttgaagaagcagcattgttagaagcttcattcttaattcctttcctctgacaaaagtttgcaaatccgggggggggcattgcaatcaaatttcgttcatgagctcgcaattctgcttctagcttatccatgtcggaagagttaaaattgttgatcatataagatacaacaaatccattatactctggaggaa

SEQ ID NO: 337454 - DNA, 483 bp, Cannabis indica
gataaatcataaatatcatgcaagtttcataattaaaccctaattatctgctaatttccaaattaaagttaagctgtctttaaaattatcccctcgttaaaaggatttcgtcctcgaaatcttacctgaacaactttggatactaagccctcatgtcggactctaactcccaggtggcttcctccaccttgctgtttttccagagtactttgaccaaagctatggtctctttccgaaggactttgtattttctatctaagatctgaactggttgctcttcgtatgataagtttggttgcaacttaagattctcataactcagcacatgagtagggtctgaaatgtatttttgtaacatggaaatatgcaatacattgtaaactgctgaaagagctggaggcaaagcttaacgatatgccataagtccaactttctcgagaatctcgaaaagtcctgtaaacctagagcataacttgcctcttt

SEQ ID NO: 337455 - DNA, 562 bp, Cannabis indica
gtaaaataatttccaacacgtcaaccacttgaagtctggttgagagaaatagaagtacccagacctgccttgcttaggggttgacttcaaatcaaaaaaccagctaacgtcgtggggagaaggcatataccagttttgggaggcatagaggatgaagaaggcggacagatacttaatgcccttgggagtaaactgggtcggacagaggcgaaagaagtctgacacattcctgaagtacggatgcaaagataacaatgccccttgctgggcatgagcacccgaccaagcacacattcccttttcagggtttgtagctcggttatggtgagcgggaatgtaactatacaattcgcccaggtatccatcctggtcgagatcccgcaggcacgcttcagtaaccttagacggaggactcacccacctggcacccaaggtactttagcttctatgaggaaccgcagcagtaagttcctctttggcgtagtccacgccctcgaccaggacttcaccatcagcatcgactagctccccagcctcattgtatcccccatagtttgggggt

SEQ ID NO: 337456 - DNA, 1990 bp, Cannabis indica
agaaaatcaaatttcccattttatataatattttaaataactgctataaatttcttttttgagatgatacaattcgataattgtctaaagaactaaattattaagttacaaacatatatctaacatttaaaccgaataatacgaaacaaattatcttttagtaaatgtaaaagttaaagtggaaaaatggttaaatgtaaaagttaatgagaaaataactaattattcttccaaaaatatatattcatgttaaacttcacatttccggataacaatggcttcttcagtagtatcaagagctttcactcactcccatcgcacgctttcattcttcaccttcaaaaactcaccaccaccaccttccaccacctctctcctcttctccaacaccaccaccacaaccctaaatctaaactacccaaaacgattcctcacttccttcacctctacacaaaacgacgccgtcccatcatcaccccaatctagtcaacgtcccaatgtggtcagcattctcgaagaacgtggcttacttgaatcactcaccagtgataatctccgtctcgcttgctccgacccccttaaagtctactgcggattcgacccaactgctcaatccctccatttgggtaaccttttgggtatcattgttctctcttggtttcaaaaatgtggccaccaagctgttgccttgatcggaggagccaccgccagagttggtgacccttctggtaagagccttgaaagacctgaacttgacccagaaactctgctcattaacacaaagggtatcacccaaactataacaagaattttggggtcaaatggggttttggttttgaataattatgattggtggaaagagtttaggttattggattttttaaaggaagtgggtcgatttgctagagttgggactatgatgggtaaggagagtgttaagaaacgattggaatctgatcagggaatgagttatactgaattcacttatcaattacttcaagggtatgacttcctctacctgtttgataaaatgcgtgtgagtgttcaaattggtgggagtgatcaatgggggaatattacagcaggaactgagcttattaggaagattttacaagtggaaggagcttatggtttgacatttcctcttttgttgaagagtgatggcaccaagtttggaaaatcagaggatggggcggtctggctttcgcccgaaatgttgtctccatacaagttttatcaatactttttctctgttcctgatactgatgtggttaggttcttaaagattcttactttcttggatatggaagagataatggagttggaaagggatatgaagaggcctggctatgtccctaacacgaatcagcggagacttgcagaagaagttactagatttgtccatggcgaagagggtttgattgaggctttgaaggcgactgaagctttgaggcctggagctgagactaagttggattggaaaactattgaagggattgctgaggatgttccttgttgttctttggcttatgatcaagtcaataatttgtctgtggttgatctctgtgtttcgtcgggtttgtttgagagtaaatctgctgctcggcggttgctgaaacaagggggactttacttgaacaattcaagagttgatagtgagagtaagagagttggtgatgaagatattgtggatggtaaagttctgcttttatctgctggcaagaagaacaaggttattgtaagaattgcttaacacattttttttatcataacttatgatcattattagattgtttcaaattgttgaagttttaaagtttgtatttttgttatgttagcaagttaaagatctattctttggctaaaatattcacttgtccaaccaaattcactttgtgtctatgcaatttattgtataaaaagaaaagaagtcagtatggaattggtaattctttgtaattggatttgtgtgtaattagaggtaattaca

SEQ ID NO: 337457 - DNA, 548 bp, Cannabis indica
ttgcttatcatatatgtgcaagaatttccttcaaaatgcaaaagtaccctttttcaatcatttgacctacgctaagtaggtttgatcaatgtgggtaccaagagtacatcattgatgtatctcttgccctttttagtgtcaatggcaatggtgcctctgctgactgcttccatgaagtcaccattatcgattttaactttagtcttggatctatcaagactacaaaagatgctttcgtttttcatcatgtggttactgcaacaactatcaagataccaagtattctttttcttcttctgatgcaacttggcagacatagaagagagtactttcatctatttttctcttacgaaaaaattagcttgatgggatttctttaaacgacaagtttttcagtgtggccaaattttttaccattttggcactgtggttttcatttaaaccagcagtctttctccaagtgactttttcttttacaaatgccacatggaggatacttgtcgttattttctttttgtttttcttgtgtcttttttccatcagctttt

SEQ ID NO: 337458 - DNA, 820 bp, Cannabis indica
cctcaatcgtatcccccatagtttgggggtgcaaaatcctcctcttcctccgccccgaagggactgctacgacggacatcgtcctgctcttcaatcttctggacctcagcatcccctttatgatcttccccctcctgggcggctggatcttgttcggcgctaggcaaagtggcgtgccgagccatttgagggtcagatgcgtcaaccctacgcattgtctttttggtacaagccatcattctatggctggacaaaagattcaaggaagaatgcctagcgcaagagttgaagtagatccttgtcgatttggtgttcgcttccccaaaactcacccgggttcatttacaaaagacaacacacaagatgagtgtttggtcagaatatcgaacgttgaaacaagcaaatatgtcaaccagaagtactcaataggttaaagaataagaatatttaacgaaaagtcaaaactcagaaagtttgaaattttctcgagttagggcaaaaaaattcatgaagcttagaataagcaagatgaaagacaagcattatgtagttcaaaaagaaagcattatggacggtaaaatcacatgagccatgacaagggaaaatcgtagagtttctaaacttagggtttcctacatatgttctacagcaaagtagaaggtgcattccaaaagtaaatgcgcaacgtaaacataaaggaaattgagaacttactcaaggatcagatgtctggattcaggttatgccaagccaaacgagcagttctgatgaagacatttcagtaaacttgaagccaaaaacctctctttttgctctgaac

SEQ ID NO: 337459 - DNA, 665 bp, Cannabis indica
accttcataacacagtgtaagaaaaatcatacaaacttataattaataaattcacattttcactaagtagacattcatttaatccatagccatataatctcagtgctttgaatagcactctagccatacatcattgtaattacataatttcagtacttcacttagcactctacttacacaataacataatcacctaaactcagtgcttcatcaatcacccttaccactcgttatcaacgagctatgtatgtcactatcgttgcccgataacgtgaacgataagtaagaaacctatgcacagtttcaacgagtaattactcatgacggtaatgactgtatcttctctcgatcataatcgagtcacaaatgataataattgttacctcgatcataatcgagtcacaaacagtaataatcactatctcgatcataatcgagtcacaaacagtaatattcgctatctcgatcataatcgagtcacaaacaatagtaatcactatctcaatcataatagagtcacaaacagtaataatcgctatctcgatcataatcgagtcataaacaatagtaattgtttcttgcttaacatgtattatagtacgtatagcttttcttaccttagaccagaaattaggaatgcgagccgacctgaatggaataaagct

SEQ ID NO: 337460 - DNA, 734 bp, Cannabis indica
atcatgatgaatctcattcatctaatcactcattgtcgaagtcttcttcttccaaaggtgctccaaatgtcgagaaagtaatagtgcccttgccaactgtgagttctcgtacaaggtccaaggtatccacacctcaaaaacccgaagtggttctacccacaagtgtctccaaagggaaaaaggtggtgtcttcatcttcaaaggctaaaagtctcaaagagaatcccccttctatatcatcatcggattctgaacctatagaagaaactgaggaggatcacgaatcagagagtatgtctgattcaagtgaagagtttgtgcccaaagaacaaccctctggtgatgattctaggtctgaaagtgaagaccttgaagctaaacctgttagtgcaaaacaagttgttgtccctgctgcagttccaaagaaggacaaaggaaaactacccattatctctccaagtgctattcttcctcagaaaagaaagaggccctatggtattactcttgaaaacttcaagccccattctcattatttttgttacaatgataatgctagagacatgaaattttatgagaatcgaaattttactattgaaaaaatttcaatgtcattgctcataagccttttggggtttataacatgttgaaagaaagaaaatggatggatactttgatcggttttgatggctatatggatcgaattgtgaaggaattttatgctaacatcactgatg

SEQ ID NO: 337461 - DNA, 626 bp, Cannabis indica
ctggtccctaggttccacctgaacctggtcttcctggttctgttcaggtgtgttccctatttgttccacctgaatagatccagaactttcctctgcatttctacctgcattttcagtctcttttgtacctgcactagggttagatgtaatatgcaaacatggaaaaatatcttccttaaatattacatccctgctattaatagttttgaagcctctttgttcccaaacccaaagcctataacctttaactccctcaggataccctagaaaaacacatttcatagctctaggttctaatttcccaacactttggtgtgcatatgctgcacaaccaaatactctaagattagataggttaggaggtttaccagaccatttttctttaggagttttgaatccatttgcactggatggacttctgctgattaaataaacaactgttaaagctgcgtctccccagaatccttgtgacaacccagattgtaacagcaagcatctcactttgttgagaatggttctgtttattctctctgcaactccattctgttggggtattattctaactgtcctgtgtctctgtatgccattttctttacaataatggttaaactcttcattacaaaatt

SEQ ID NO: 337462 - DNA, 823 bp, Cannabis indica
tagaattcgtatcgagatgcctaacttgtcaacaaatcaaggttgaacatcagagaccgacagggttgttacagcctttaaccctacctgagtggaaatgggaagatatcacgatggactttgtggttgggttacctagaaccacgggtttatttgaatctatttgggttgtggtagaccgattcacgaagtctgcacattttctaccaattaaaatgaccttttcagtggatcgatacgcgaatttgtacatcaaagaaaaagtaagactgcatggtgtaccaaagtccatagtttcggatagagatgtgaaatttacctctaagttttggcaaagtttgcaacgggctatgggtaataaaatgaaattcatacaacttttcatcctcagactgatggacagtctgaaaggacaattcagatactggaagatatgttggggcctgtgttatgtatttcgagggcgtctggagtaagtacctaccgttgatagagttctcgtataataacagttatcaaagtacgatagggatggatccctatgaattgttatatggccggaagtgtagatctcccattcactgggatgaaacaggggagaagaaatacctaggtccagaatcagttcagcaaaccaatgaggcaattgagaagattaaagctagaatgcttgcctctcaatgtagggaaaagagttatgcagatccgaaacgcagaaatgttgagttccaagtaggggatcacgtgtttttgcgagtatctccaatgaaggggatcaagcgtttcaagaaaagaggcaagttatgccctagatttacaggac

SEQ ID NO: 337463 - DNA, 811 bp, Cannabis indica
tcctccatttgttccacaattttttttcggattcccacatggggatctaactcatcttcttccgccatttctggctcaataatttctcggaccatcaacacgggtaggtgggcagcaacattatagcattgcctagcctccccttggtttcccctcactgtccctatcccagcttcctgggttgggaatttcaggcacaagtgccgtattgacgtaacttctccaaagtccaccaaggctggtcggccgaggattgcgttataagctgttgggcagtccacaaccacaaacgtgcattacatgaaggttctctggggtgtgtccgggcacaaggtgactgggagcctcacttttcccatagggataagtgttgttctgttgaaccctgtgagttgggaaccacttgatgataggtctcggtcagttaggcctattgcagtgaaggcctctttgaatagaagattcacgatcttatttgcaatgggggtctctatgaccaatgggccatggtgaggaaaacgcactgttttagcgtcttcttccgtgaatgtaatgggttgatccattagccggggcctttgagatgggagttgagtaacttcccaaacttcatcgtgtttcgcggcctgtacgtaccgtttgagctctttgcgggtagttcctccgatgtggggtcctccggagatcatagccactctcccgttgggtctaggtggcaggccaggaatatgctgggcatcaccggggggaacaactagagccaatactcctgctgcacctcctggtgttccttgcggcaaagctccagccg

SEQ ID NO: 337464 - DNA, 719 bp, Cannabis indica
tgttgcccctaattttatccaaaatacgtagaccaaccggacgatgacacgtagactgaaagggtttaacgtttagataattcagctaagtctctttagctaaagggatcagccttagacatacctcccacagaaggcacgtgagtctcacatactcccggagagcaaagctacaactaagcatctccgggaggtgtcagatcctatctgaacaatcacctcgcatttaatgccgcatgggagaaggcgtattgaaactgccatatgccttaaagtctgacggcgtaaccccctttctgcagctactacgctatgattagtgagcctagtgacggctactttatgaggaatcacatcagtcaagaaggataaaggactacgtccattaaacccctacaaagcctagggattagaccatgcatttcctatgatgtatccagtgggaatgtgtgcctttactgagaattacagaaagacatgtacctcaattctagggatcaccccacaaaaaacactataaataccccccaaactcattaaggcaagggtcgagaattctgggtttcataagaactagagaggaaaaccaccaagaacattctctgtaataaatactatcataaatacactgactcgtggactaaggctcattaatgccccaaccacgtaaaaatctctcttattaattccttatagctttcgtaaatattactattata

SEQ ID NO: 337465 - DNA, 2098 bp, Cannabis indica
gaggagtaacgtttctccagttatttgttttgccaaaactggaggtgtcgctaaatgccttttgacgttctgaaaggcctcctcacactcttctgtccactcgaatttcttgttgcctcgcaatacattgaacaatggcaaacacttatcagttgacttcgaaatgaatttgttaagtgcagccatccttcctgtctaggcttgtacttctttaggctttgttagtgatggcatatctatcaatgccttgactttttcagggtttgcttcaatgcccttcgcgctgactatgaatcccagaaattttttagaggaaactccaaagcaacactttttcgggtttagcttcatattgtagttctttaatatttcatagcattctacgaggttcgtggtatgattcacacttttcactgactttaccaacatatcatcgacgtaaacctccatgttttgtctgatctagtttgcaaacatctcgttcaccaatcgctgatatgttgccccagaattcatcaggccaaatggcatgaccttgtaacagtaaagtcccatgttggttacgaaacttgtatgttcctaatctgggacaagcatttttatttggttatatccagaatatgcatccatgagtgacataagctcgtgcccagcagttgcatccaccaaattgtcaatcttgggtagtggcaagtagtcttttgggcacgccttattcaaatcagagaagtcaatacaagttctccaagtatcgttaggttttgggacaagaacaggattggctatcaatgagggatagaacacctcgcgtataaagtgattgactaacaacttatccacttcctatttgagtgccctttgcctctcggaatccaagggtctcctattctgcctctttgctgggtagtttggattggcatttaaatgatggaaggtaatactagggtcaatccctatcatatctccatggttccaggcgaactaatcctggttcgcccttaagaaacttattagctgctatttcaactactcgtccattttcttcccaatgtaaacacactttgtgggatttcctgggtcgagaaaaacctcttgcaattctttaattggttttaataaatttctttcatcttgaatccgatgatcaagatcttcatccttcttttaactttcttctgccaagatcgccattaactggtgactggcttttctgtgctgtagctctattagatagcaatcgtgagctagcatctgatcaccttgtaccactcccacaccctcgagtgtttggaacttcagggatagatgcttgatcgaactaatttccccaagtccgatcaatgctgggcgacccaataatatattataagtcgatggtaggtcgacaaccaaaaagtcttgcataattgtggcggataggggtgcctctgccaaggtcaatgcgagctcgattatgcccttgctggcgatactgcagccagtgaagccgcacatatttaccatgcaaggcctcaacttgtcctttttaagccccatcttcttcagtgtttccctgtaaaggatgttcactgaactcttgctatctataaacaccctctttatccttttattggcgagctggatagttatcacgaatggatcgacgtgatgatacctcacgttcttctcatcttcctccaagaatatgattggaggttcttcagttcttaccttcttggaaggttttggagcaaatactgactgctcattttttatttccttcacatacctattttgggcgttgttgctctctcctgcaatatgcaatcctcccgaaataaccaggatgtcccctcctttcataggaggaggttgtaatcctggttgtttgggttgctgggcaaattgggctggttttgtccattaccctatctcttcacatactgcttgaagttgcacagggcgatgagactttctttcaaatctttcaactgacgacactcgtatgttgtgtgcccaatgtccttatggtacttgcaatacttggtaggatctctttgtgcctcgcatgcctcataggctcgggcttgctgaaggcaaccttgtgctcatgcgcgag

SEQ ID NO: 337466 - DNA, 750 bp, Cannabis indica
atgacctgggaggaatttcgagaattatttatgctaaatactataacgaagcagtccgcagtgcaaagcggaaggagtttgtggagttggttcaaagtgagggtatgtctgtgactgagtatacaaccaagtttgatcgcttggctaagttagcttctggaattgtaccaacagattttagcaagaaggggaagtacttggctggattgaatgccaagatccggcatgatttggttattacaacgaatgataccacaacttatgcagaaatggttgacaaggctcttcgagctgaaggagcagttaagtttttgcaagaaacccgagagcctcctagtgttggtgggatcactactctccttatgtctggtcctggaaaagaacttttgatcagaagaaaagaactttcccatcttcgggaagttcagggcaaggaaaaaggtttagagggaaccagaatagaggggggcgtcagacttactcttatccggagtgcctgcgctgtaagaagcatcatcccgggacttgtaaccagagagcctgtttccaatgtggtttagtgggacaccttaagaaagattgtcctcagttgtagaaagaggaaccaaagcttgaggtcaaacctgcgcctgcacctgctcgtgtatttgctataactcaagctgatgctgctgccagcccttcagtagttacaggtcagcttctaatcaatggttttgtatactgttttatttgactcgggtgctactc

SEQ ID NO: 337467 - DNA, 572 bp, Cannabis indica
agttaattaattaattttaattagttagaaagaaagaggaaaactaaaggaaaaataccgaatttgaagggaaagctctctttctttcctctctctcttcgaaaccagcaagatcaaggggaagggctgctgatttgtggtgtttttagcaaagaaattttgggagaatcaagctaaggtaagccctagtggaacccttctctagttttaaagtttttgcttagtttgaacctgtgaaattataaattgggggctgttagggtttgatgcttgtatagtttgaattctagggttagtttggattgattttaactcctagcagctggttttagtgtttgttataggttttgtggaagtttaagctttgagttcaaagctttggtctctaatggcaagttgagtttcaatggtttgttctgtgattttctggctagaatatattgtgtataccctaattaggtattctagaaggtttggttgcatttggtggagaattgagcaaagaatgaaaagcttgggggaaactggtgcaaaccggctagccggttttggcagggttccccgggcctttc

SEQ ID NO: 337468 - DNA, 1984 bp, Cannabis indica
ctttttgaggagctaactgtcgcgtaccgttctgctccgaaatctactaagtttaaagattctcgaggaggaagctcgaacaggccagaacagtcgaagggcggatctgagctgaccaagagcggatcctgagctaattctgctgcttccaagaacgctgccatgtccaacaccgtgagggcgaaggtggacttggccaggaaagacgctgatgatgccaaggtggaactcggagctgtacgaatggagctgggtgaagtcaacaagaagcttttcactgctgagaggaaaataacttagttgactaaggacctcgaggcttctgaccaacttgaagctaccatctacttctggccagaatgttgatctgccttccgctcagacaacagatcctccagctcctgctagcctagaagacccaaacaaagagcttgggactccagctgcctaaatgcttctccttttatctttctttttttattttatatatatctatccgaccataaggcctcttttaagacaccatgaccggccaagccttctttaaacttggaattatttttcatttacagacaacaggctgattgggcagcttttaatcccagtattacatgcttttgttatctttaatgaatttcattctctgtttataatcgtgcaactgtgtttgttttatctttaccaaatgctttgtacaggtataggtgcccccacagtgaccgagcagacttattactcttggtcacttattttttgcaagtaaacttttttatctgttcggggttttgggttcgaccaaacctttcgtacgcactggatggtaaattaacgacattttagtaattttgactcaatttgaatattgaaataaacatatttattcatttattgatcgaaaatgtgtttgttaccgtagtaacttacattagagctacttgatctaatatgatcttttagctcaacataaaataaaacaaattgcagaaattagaaattgtactttaaatggtggtcatccgacctgggtactttttcatttttgtccgaaccaatgggcgtagtccgcccagcaggccattcacttaacagtaattgttctttcaatacttaatatggtcatccgacctggtactttattggtagtattttcttaaatgttccccattccaatatcgtggtactagaacaagttgcattttttcatcatacttacccaatttgtatgctcctgattcgagaacttcaaccacctgatatggtccttgccagttaggtccgagtacacctgccatgttgtctttggtgttcaaaaatattcttcgtaggaccatatctcccacaaagaatttccgagccttcacttgtttattgatataccgagctactttttgttgatgggctatcaactttcagttttctgtggttcgcttctcttcaatttcatcaagtgattcagcaaggagtacatgatttgcttcttggttgtacgtcaatcttctctgggatggtggctggaactcaacgggcagcatagcttcatatccatatgccatgacaaatggagtttgtccggtcgccatttttttagttgttcggcacgaccatagaacttctggaagctcctccaaccagtgtcctttaccatcttcgagtcttttcttcaatgtatccttcagggtcttgttgactgcttcaacttgaccattcgcttggggatgcgccactgcggagaaacttttgatgatacaatggttcgcacaaaaaacagtgaaggattggctgtcaaactgttttccattttccgaaactattttgtacggcaatccgaaccggtagattatgttctttacaacaaagtcttaaactttcttagatgtaatggttgcgactggttcggctttcgtccacttagtgaagtaaccaaccgctaccactgcatactgcactcctcctttgcctttgggtaattgtttgatcaggtcaa

SEQ ID NO: 337469 - DNA, 961 bp, Cannabis indica
tcaacaaagtgttcatacatcttcggaagtgaacgtaacaggattatagcctgatcttcatcctcaattttcactcccaggttattcagatctaaaatgatcttgttgtagtcatctacgtgcttccttagttctttagtttcatccattgtcaatgtatacagtttcttcttgaggtagagtttgttggccaaggaattcttcatgtagatagaggccaacatgttccaaagtcctagagccttttcttcatcagcaacctcccttagaacctcatctctaagactgagcaagatagcactgtgtgcttttgtcacaatttctagtttctttcttttgtcatcaatcaggtccaatgaatcaggatccagagcctcatagattccttgatgcaccagaaaagctctcattttaatcctccacaaactaaaatcattggagccagtaaattagtccacctcgaaccttgcagaagtcatttcaaatcaggttcttgaagcttgaatctgattctcgatgacttgaatttggttgttgaaagtttgaagatgaatcttgatcacttgaatccatttcttaatcttcaattcaaccttgctctgataccatttgtggtgaaaacaccctcaattcatggccaataacagtgccaaaacaacaagaacaacaattaacacaacaagtgatcaaagtaatctttcaaaccagaaaaacagaatttaaacaatgaaaggattaaataaacttagctttgaatcaaatgaaatcttattcaatctttaagcaccattacaatccgaaccaagtactcaattgagtctaagtgttgaacacattacaaatcaaacctcacatggtagaagtcatctctaaggatgagcaattctacttttacaaccctcctatacactcacaaatctggtacacggattagagagaaagagagagagaattctaggtg

SEQ ID NO: 337470 - DNA, 594 bp, Cannabis indica
catatcatttgtatatgctatattacatatactacattatagtctaacattttgaagacattaaagattattggaggatcagtgaagattattagataagtttttcttcatattttaattgctatataagtatttatatattgaaaattttgtttttaaatttggtttttttttcttttataagttaatttcttacttcatttatcttttttggtttttttgtaggttgttaatttgtctatacttcaaaacacgaaaagttcacatattccagaagatctgaactcattggttactttttagtcattcaagcagaagcttcagtcttaatgatagtgctgggattggctttatacattgttctttcttcttattatgtggagtctaattatttaactttcgtttctgttgttcaaaagtgctctttcttttgacatgagctaggtctttttttaaatttttttgcttactttgttttccagttttcttaaggcatccctagttcatattcgtttctcatgaattagttgtgcatacacttagggtggatggtgaattagcttagattgaggattatatatattttcttattga

SEQ ID NO: 337471 - DNA, 532 bp, Cannabis indica
ttcgacagaacacttgggcttggcggaaatctggtcatcgacgggaccattatggtttgattttttttactggatgtattacaagtttctttgttcatcgttaaggattttttaggaatgtttgtattattttttctgggttttgtttttattattcaagtttttctaggtttttttggtggtccgatttgtgttgtcaatttgattttgctagatagatgttggtgagtgatgaggttttcgatcgcattgatgttgctacacgttaaagtgggatctgagatctgagtaaaaaaaaattgggaaagaacaatggatgaatttgaattggggttagaaattttctgggttcgggagcaatggatgaatttgaatgaatatattaaatgtatttaattttattttaagtatgtgatttagttttttaaataaattatgtttaattgtaatataatttttatattttttaatgattgttttaattttaaaatactttttaaatgtttaaattaattttttaaataaaatatat

SEQ ID NO: 337472 - DNA, 689 bp, Cannabis indica
aagtttttaattaatttattaaatttttaactgtttttgaatttattagctttattgtaattttatatgtttttgtgtgtttttataattaatttgtgataatatgttatgtggtatttatttttaattttattttagttttctaattaattttatgtatttttaggtgtatgtgttagaaaaatattgggatgaaagtgaagaaaatattgaagaaatgagccaaaaatgaaatttttagaaagaaaatcacatcagcccaaaaagaagctcactctgggtcagctctttgaccccatctggaccgttcgttgactaatctggacctgccacacttgcttgctctagcccctgtggttcccgccttgttagcgtcccaccaaccagcgcacgccacgtcccaccccgtcagctctagcccaccaaccgcaacacgccaagtgtcctactgagataaaaaaaaaagaagaaaaaaatacttgttaattggcttttctctcagccaaatttcccattaaaaaaaccaaaattcttattctctctcccacattttacacacaaatacctattttatcttcccaatttatttcatctaaataaacactcctaatttatttttaccctatctttttcactatttttccatccaaacaaacatttattttcttcaacactcttacacatactct

SEQ ID NO: 337473 - DNA, 879 bp, Cannabis indica
tctgaactttattttaataacaattagctctaagttaatgtgcctttgaccttacagagttcatgttgttactaaaatgtaacctaattgatttattgtcacaacatatatctttaatagctttcaataccattcctaattttgcagccatatgtgacaaaaaatctcacaactagaaactttataagatcagaatcagaaatcttaatgatctctaaaattttcagctttttgatttctgataagtgaacatatagtattttgttctccttaaattccttatagcccatttggctgcataccaaaagttccctatatggctacttaaatatctatcaaacattcttaatatgtatattaagtaaaaatacatacatgcttgagcatatattgaattctaatataaattaagaatcttttatatttattgaattctaaggtttcttttagaacaataacttatacaattctttagctgcaagcctttcacctggtacagtatctttgacctcatagagttcatgttgttactaaaatccaacctaattgatttattgtcacaacatatatatttaatagctttcaataccattcttaattttgcagccatatgtgacaaaaaatctcacaactaaaaactttataagatcagaatcagaaatcttaatgatctccaaaattttttcgtttctgataagtgaacaaaaacttgactgcctgcttggaatctaggccttggccaacaagggttcccaagcagagagaaggtcggccagggtttcatgacccagccaaggggtggccaagggaccctaagcccaggcatgggccgaccagactttagggttaccctgtatggctggccagctcccatgagaa

SEQ ID NO: 337474 - DNA, 378 bp, Cannabis indica
gatcaagccattgcttctcttactaagagatttgaacattatcaagaatatgaaaatatttttagttacttgtttacttctgacaagttacaatcattagacaatgcaaatttaaagtcttgttgttgtcattttgaaaacgcattgaaacataatgaacaatctgatattgatgggaatgaattatgtgtggagttgaagctattaaggcaaatcttgcctagagagaaaatgagagctatcgacatattaaagtttttgaaaggcgtagattgtttttctaatacaattattgcataaaaaaatttgttgactattcttatgacagttgcttttgcataaataagtttttcaaagttaaagttgttgaagtcctac

SEQ ID NO: 337475 - DNA, 1402 bp, Cannabis indica
tctcaaatgcaacaacggccaaagaagcgtgggagaagctttaagcttacaacaaaggagcagagcaagtgaaaaagatttgtcttcaagctcttagaggtgattttgaaactttatttatggaggatactgaatcaatttctgattatttcagtagagtattatcaattgtcaatcagttaagaagaaattagtgaagtaaaggttataaaaataattctttgtactgtgagtccaacctttgagtacattgctacaatcattgaagagaataaagatttagaatccatgactattgagcaactcatgggttccttccaagcctaggaggagaaataaaataggaaaaagaagcgaaaggagaaaatggagctattactaaagctcaccttggaagaggaaaattctaacaacagtaaagatcaaaaaggaagaggacgtgaccaaggaagcgcagatggacgtggttgagaacaacgaagagaagggagggtggctataataacaataatttcaataatagagaacgaagtcgaaattcacaaacaccaaaagggcgcggaagaggcaactcgttgtcatgaagtgacaaatctcacatcaagtgcgacaattgcaacaagtacggtcattatgactccgaatgtagatcaaggaggatcaaagaaagagccaattttgcctaagacaaaggtggagaagaagaaactttgttgcttcccagcaaagacaaagatgaaggttaagaaaataaatggtatcttgacaccggtgctagtaatctcatgtgcgaagaaagaagaatttttgtatagctcaatcaaatggtaaaaaggaatgtatcttttggagatgaattaaaaatacccgtagaaggcaaaggtaagattcttatacgcttaaaaaatagacgtcgtcaattcatctcaaatgtttactttgtgcccaacatgaaaaataatattttgagtttaggtcaattactagagaaaggttatgatattcacttaaaagagaataaccttttcttaagagatgataaaagtaatttgattgccaaagtttccatgacaaagaatagaatgtttctctgttccaaaatgttaaaggcctggtacaatgagtcatcatggctttggcatctacgctttggatgtctcaattttggcggggttaaactcttagagaagaaagagatggtgagaggccttccatgcatcaaccaaccagatcaactttgtgaacgatgtttgcttggaaagcaatcccaaagaaattttccaaaggagtcactatcgagagccataaagccacttgggctcgtacacactgatgtttgtggcccaattaaactaaactcatttggtaagagtaaatacttcctcctctttattgatgattt

SEQ ID NO: 337476 - DNA, 583 bp, Cannabis indica
agaaaagtatgggcttatttcttaaaggagaaattagaagtgttcgagaacttcaaaaaattcaaagctctagttgaaaaagaaactggtcttcctattaaggccatgagatctgactgaggaggagagttcacatcaaatgagttcaacaaatactatgaagataataaaatttgtcatccattaacagtgccaagatccccccaacaaaatggagtggtagagagaaagaatcgaaccatactcaacatggctcgtagcatgctcaaaagcaaaagaatgccaaaggatttttgggctaaagcgatagcttgcgcagtctacttggtgaatcactctccaacaagaagtgtacatgagaagacacctcaagaagcattgagtggaagaaaacctagaatttctcatctcaaagtctttggaagtattgcttatgttcatgttcccgatcaaaagagaacgaagcttgatgacaaaagtgagaagtacatcttcatcagctatgactcaagatcgaaaggctacaaattgttaggctttataccctaaataaaactctatttcaatgtaatctctatcgttt

SEQ ID NO: 337477 - DNA, 1062 bp, Cannabis indica
gggaccgggacctgggcccagacccagcctcgaaccctacctgagaccgaaaccttaacctaaaccttgcctcagacccaaatcacgacccgaacccagactcagatccaaactcgaccaaaacccgtaccccgtgacttaaaactggaatcgaaactagaagcagatcaggacccaagaacaagaccatgacaaggacatgaacatagagccaaaactgtaaccggacctagacccagactcggtcaaagaccgactctgggattgggttcaaaatctaaatccaaacccgaactgggactcaagacaagaacctagacctgaattcagaccagaacattgaacatgactcgggacctagaactggaccccagtctcggtcctggacctagacccaaacctagacctaggacatgaatttaaacaagactaggacccgtgattgggatgcaaatcttgtccaatgattagagaaccagggcttggacacgacccatagtggatgtcttgatcatggactcggacaaggacccgaagctggaaaaggacctagacacaaacccaaacttgggacccaaaaccgaaacttgaaaaaagaacgtgatcaggaccatggaatcggagcaggaccgtgatttggaccttgactcgggctcagtttagaccgaacctagtcgagaactcgggttcagacccagtcctggacccaggctagcactcagactcgaaccagaacctgaagacgaagtcgggacacgatcccacacccggacgaagccctttacctaaattggaattcggaccttgacatggacacaaacccatacccgaacccaaataacgacacagacctaggcccagacgtagacgcagacccagaaccaagacctgaacttggaccttgactcagatctggacccagaccgagattcgaaaaacccgtactcggactcgaactaagactaagaccctgacaccaacttggacacagacccggacccggaaccaaactcagacccagaataaaaactgtaaattatgactaggacccagacctaagac

SEQ ID NO: 337478 - DNA, 787 bp, Cannabis indica
aaatagtttcaggaggagcaggttgtgctaatgtccaactccaccaaagatttctccatgtccgtacaattacttcactcactgtaactctgtaactccaataagtgaggaaggagaaagatgcaatctttaaacccctttcccctttctttctagggttttattatgccactgcatcaccatattccggaggaacccaaacaactttgacaacgatccattttcatgcacctaacagagatgataagatcaaacataataaacaaactcagagaaaactattaaaactcaaatcaacattcctggtgttccctaatcggcaatcctcatttcatcaagactcacctccaacaatccatagaaaccgctcagcgtcatttgcggcgatgagagctcaaccatacgactcaatcttgtggacggaaatggtgtgcgggagtcgtcgaacctacgattggaatcacccggacctcctcagcgtcatttgcggcgataagagctcagccatacgactcaatcctgtggacgaaaatggtgtgtgggagtcgtcagacctgcgattgggatcacccggacctgcgattggaatttctgttgtagggagtgtttaaagggtatatgaattgatgtggaatgggtaaaagttgtttggtattgggattgagagtgagattatggctagctttagggccatttgaaaagaattgtgtgaagaaggggatggttaacgaacgtttaaaaaaatggtggatggttcttttagggttaaatttaacataatattctt

SEQ ID NO: 337479 - DNA, 575 bp, Cannabis indica
cctatgtacttttattaatgttaatattcattcagtgttattttatgctatattatataccacctatgatttttattaatgttattattaattcaatgttgaatgttatttttaattcaaaattttttcatttcaattatggtctttttaatttatgaaaacttaacttaattaatgaatttcacctattagtgataaacataatttttttgtcacaactttaattattttttcaattatctaatttcattaaattaacaatttatgtaacattataactaatataaatgaaaattttcaaattaattaataagtgtttaatttatcaatttttaacttaataaagtttctaattattattaactaataagcaaatttgtgacattttaaaattaccaagttatttaaatgaatttgtgttacaatcaaaatcttaactaattaaattgtcaatttttaatttaaatttacttagtgatgttgtaattatttttcataaataacatattaccaatatttttattataattaataaactattaactaattttttaaatttatcctattatcatatc

SEQ ID NO: 337480 - DNA, 848 bp, Cannabis indica
aaggtctaaaaattgatttctcaattttatcataaataaaatttattatttattctatcaataaataataattaattaattctcattaatctcttatttcacaaggattaaaataaatattattttctctaaaataatatatttctctctttaatattatttaaaattaatattatatttgactaattaatataattttatccagtaaaattaaataattaaatattattaattatataattcataattgtcataattattcaaaataataatttcataaattactatttttttctcttaagaatttatttctcatagaaatctattctcactcaaatttactcattaaataaaatattcccatgtacagtgttgtatagaggtgactcggggaccatagatctatattttgaagctccaatagacacttgtgtcactacaacaaaagatagtattaggggcgataattttaggggtgacaaataattgcctctaataacccattattagggacgatattcattagtcgcccctaaattattgttcttttaattcaatttaaaaatttaaaaggggcaatgtttaatatttttaggggcgacttatcacccctaataattggacaataaatattttatgtaaaataattatataaaaggactttgtggaaataattgttattaggggtgcctttttaaatttttagggacgacttttgtcgctcttaaaattattttttatttattattagtattattttagtaacatttttattttcttaataattaatctttatgttttttttattaaatattttttttcacattttataaataatgataattttt

SEQ ID NO: 337481 - DNA, 753 bp, Cannabis indica
taattgataccattttttcttaccatttaattatcattgtatataacagcattatgatgttgtttgcatcaatggtgccagcatatttatcattgagtcagtcaaatgtggggttacgattaagagagttcactctcaattgtattttttttccacacactgatcacaacacttacctaccccaatagcattaactccattactgtctctcttgacttatatcattcctaagtttgatcatattcttggcatcatcatgaactagaaaattaataatggagtttctttcttttcttgttattttgagtcttttttctctgtctagaacggcttttgttgtggttaacaccattagaccatcagaatttatgagagataacaacacagctttattggtatccaaaggaggaaagtttgaattgggattctttactccaacagatagttcatcaaacaatcgttatttgggaatttggtataagaacattgcagttcaaactattgtttgggttgcaaaccgatgtgaaccaatcattgattcatctgccttgttgactatagacaacacaggaaatcttgtgctttttcaggcaagaacaataagagtgtgctcatttggtctacaaactcctcgaaacaagcccgggaaccacttgttcagctcttggattatggtaacttggttttgagagatgagaaagatgcaaacacaacaaaatttttatgggaaagctttgattatcctactgatac

SEQ ID NO: 337482 - DNA, 1023 bp, Cannabis indica
ctctctctctctatctctctccctttgtcgatattcctctgtcgatatctctttctctctctggttttcactctccttgcgtcgaaaccacactcgagccaccatctccgactcccctctaacctcaggcgaacctcgctccccctttctctctttcgcttggcttttcctaagataggtcatctctgacgcagtgacgagacatcaacaaagtactcacctgttggaaattattttactagaatctagatttactaatatgtatatttgattaacaccctaaatatgaattctctaaaacaatgaaataaacacatataaagtttagaaaaccttacattgatggcagttgaataatatgactccttttgctaagatctctaacacttgttcctttctgtcgcagagtaataacaagatctgagcctggatctctttttctccttcggtttggttaaccaccgtctttcgcactgtgattgagtacttgacttgttatgtgtgggcatggtactctatctctataggctcaaatttgatgaagaacaacaagaagggtcgaaatcactatgaaaggactctcatctactagttgtctgacagagttcgaaaactaggtttagatatgttgaagggttggttggatgagaatgagagtatcatgttccttttatagcatttcaactagggtttaggatttaatttatggattaaaaaataaataaaataatggataaaaatcccttctagtggctgaccacttaatgagcctcactagttgtaatttttccactttatttcaaccatttatcttttctttaaataatgtcatattttctaattttaatcctataaatgtcagaactatttattaaataattataattaattattaactataattatcatttatttgatttattaattagacttaacaaagtcttttaattaacaaataaatcccaaaatctcttttcttcacaattaagcccttgcttagtgaaaattcataaataagacata

SEQ ID NO: 337483 - DNA, 887 bp, Cannabis indica
tattatttttttatttttagtttttttttcttattaatgtatattttgtttatttgtagttaaaatattttatttatttgcaaagaaaatgttagatctttacattgtcatttaatatggcaataaattggctaataagtaacgttattacaatcatacaggtgggtgtgattggtcacttctaactacctacacattgctagtaacgtcacaatcatacacgttgctaaataaataacgttaatcacataaataaatacacactgacaaagatgtacatgtgattcaatcttatctagctagagacaaagcattataattgatctacatctatacaatacaacaatctatctctaaaatatttattctaacatgactagggtgacaaaacgtgtcatcgtctcgtgtttatattatattttatgtgacctatttttatattttgtgtcaggcgtgtcgacccattttttgattcgtgtctaattatctcaactctaacccgacccgtaaaaaatcgtgttgtgttcgtatcgactcacagtgacctgttttgctatcaactctaacccgacccgtaaaaaattcaagagaatcaaacaataagattaaagaatagcggaagcgtaccggagtccatagaatcgattttgtaatgacctttaattggtatgatcttccaatttgcatcaaaacctttctctgtagtttttctcttggtgatggggatacaagagtggaaagatacgatgcaaatggggaccattacccgttatattaccaacagacaaacctgttggtaatatttattgactatttctatttggcccctcatcaatatagaaattgtccttatggtatccacatattaaaatcataacaatcatgcc

SEQ ID NO: 337484 - DNA, 589 bp, Cannabis indica
tgctttgggcacgtggggatgcatttatgaccataatcactgcagttttttgctttttgctggcaacgattcgtttcctatccatttaatgatacggcgcattaaatgggtgtcagacgagtactcaagcgtttcctaccgcctcgatgagtgcttgtcccaaccgttggatctgtagaatgcgaatcaattcctattccgaccgtacgatgatgctcgatcacaactatctcacacccgttctagcctataaaaaccaaccttctcatttcatttggttactttcaccatttcaccaaattttctcagagcttccacagagaggaaaaaattccagacaccacagattatctgctccttttcctttgccgttgccagtcctctctttatcgacgatcaacaccaacccccagtcttcaaacttcctgcaagttctcaggacactttatacttgtatatcgtttgtttgtattgcgtgtttaagatttctgggttgaatgttgaacttctgggaaatgattttgcgtgagtttgcttgtgcaatgcatagaatctctcttttttgcgccttggttgtttctttttacta

SEQ ID NO: 337485 - DNA, 507 bp, Cannabis indica
ttaattactaaataaaattgtcatttatgcaatttattaattagaccatacaaagtctcttaattaacaaattgaccccaaaacgtcttttcttcatgctatcccaatttttgctctttgacgtggcatcacatgatggtgacttgtggaatcgactccgagtatctgttcgcaagacattgtctgaataggatacctcatatgcatgctcgaggcaaagcaatcagcaatccgcacagagcgaccaacacttagcgaattttgctttcgcatcgtgagtcatcaaagaaatccctataacttagggatcagattgcagagatatggaaagctgtctaaatcccacgatgagtgtattctgcatttattatgaaatctttctgcttaaatcaattgtaatgagagggaaatacttcctctccaagctcatagcctaataaatagtgatgcatggtcactaggcaaagggtcaaaagattttacgtgagagatattatctaagaattc

SEQ ID NO: 337486 - DNA, 530 bp, Cannabis indica
tacaccacaataaacgtatttgatccccataaattcttgtatgcactattttgaaaattatattaatattttcattaattaacatatataaataacttagttaattaaaatatttgttacataaagagtaattaaattattaccttttcaacatcgcatgaatttgttggaaaattttgtggccatctatagggtctaaatggataatttttcttgacccaatgacctctagcatccaattgcctcaactccggccatgtactttgaacaaaattctacaacctcttcagatatgtagcactcaaccatagatgcttttggctgatagtggttacgtacataacttttaagtaccttcatatttcttttaaatggatacatccatctcgcccatactggcccacacaaccttacttctctcactggatgaaccattagatgtatcatgatgtcgaaaaaagatggcaaaaaaactttttgaggttgcccaatgtttttactacgtgttcatgtaatgtatctaatttatc

SEQ ID NO: 337487 - DNA, 568 bp, Cannabis indica
gaagaacattccttatgcttctgctgttggaagcttaatgtatgctcaggtgtgcacaagacctaacattgctaattttgttaaagtgttaggaagattttagagtaacccgggtgtagaccactggaaagctagaaagatggtaataaggtatctttagggtatattgaagggtgataatttaagccagtgtcaaaagaaagattttaaaagagaagaaataaagaacaatccttatgcttctgctatcggaagcttaatgtatgctcaggtgtgcacaagacctaacattgcttattttgtcagagtgttaggaagattttagagtaacctagggatagaccactagaaagctggaaagaaggtaataaggtatctttagggtacaaaggattacaaactgatgttcaaacaaactaataatctagaagtagttggctactcagattcatatttcattggttgtactgattcatgtaaatcaacttctggttacgtgtttatgtttgctagaggagctgtatcctggaggagtaacaaacaaactttgactgctacttctactatg

SEQ ID NO: 337488 - DNA, 656 bp, Cannabis indica
atgctagaacaatgttgatctgatgtttatgcaaaaaaaacaatgtgaaaaacaacaattttttctaaaaaaaaaaacaagtgataccttgtaaaaagataattcataaaaatgtaaataaagaaaagctctgtaaaagatgtaaaaaagaattcataaaaataaaaaaaaattgtagtgtatcgtgtaaatttatctataggaaatgtatttgtttaactaaataattaacgaaaaataatattgtatagtgaaataattacacaataggcctagaggagtgctaccatcaacttcttgttacaacctcttaatcaatttccacgcccaaaaacatatgtcagaatattttttttatttttttttcacggcggtgttcgttatgcttacaacatcattcttgtaaatttttgaaattttttgaatagtttattgtagtggccaaaaattgctctaagcccaacgaaaaaggcccaacgatcgaagtacttacgaagcccacttataagtcagaaacaaggaacacgtaagcccaatggctcacatgggccacgcccaatccatgccttttgggtcatacccatattcgaatgtccaacccacaataaagcttgattctaaagtgtaatgttagggttgacgcgtgggggaagaag

SEQ ID NO: 337489 - DNA, 650 bp, Cannabis indica
atgaatcaagagtttgatgctctcaaaaaggcaggaacatggtctttggttccttatttaccacatatgacagtgattgggaacaaatggattcacaaagtgaaacttgatgcttatggaaaccttgatagactaaaatcaaggcttgttgctaagggatatttgcaaactccagggatcgattatgaggacacattctctccggttgtcaaaccagccactgtaagaattattctcactctagccgtgtctcttcattggcatgtcaagcaattggatgtctccaatgcttttttaaatggtgcacttcatgaggttgtttacatgagtcaaccagaaggttttgttgatcccaccaaacctaatcatgtgtgtcaactacacaaggcactctatggattaaagcaggcacctcgtgcatggaatcaaacacttcgagataagcttctggaatggggttttagtgcatcaaaatccgacacatccttgttcatctatggttcgggtaacaacactatcattctccttgtctatgttgatgactttttagtaactggccctaatgtctctctcatctccaagctaatttctgatctcaacaagtccttctctttaaaggacttaggaccagttcattatttccttggtgt

SEQ ID NO: 337490 - DNA, 2008 bp, Cannabis indica
actagaaacaaagagtgaaaactaaccgaaatatgacccaaaacttagactaattttagcctaacaaactgtcggaaggctaaactgatctccgggagccagtcgatggatgacttcaacctctcgaaggttctctgccaaaacattcgcaccccggccgcggagaaagcacttcgggcggagattatagcctcggcagaggaccggtactagaagtacctcttcaggagggaagaggagctggcctacatcaaagcccaagccgccgtcgggaggacccttcgcctggaagagggcacggatcgggtgccttccaggcctaaatcctttgtcctggttcccaacactggggctcccgacgccagcacgtctgggtccggtaagtctcctttacgggtctatcatgttccttcagtccaagagtattcccgctataggcctgtaaaattcgaagaacacctttttaagtttaggatgccccccactcggtggggggatcacgccaaggctttttacttttcccacttaggtcatttctttggccggtcccggatcggtctcggacctcctgcacccatccctttggatcactcagcgtacttgtcttctaactggtttctcccctcagattgctttcttggggatgatgaagctagcactgtagtttaagactttgctagggctgagttagagagtcagggtaggactggctttgttgtttgctgttaggtgcatgccttcttatagtcgttctaacatttttgtttgttcctttttgcagcagccagaccaatggaagaccttctagcgactctcgctgagacttacagcccggactcttctcttcctctggctcctgcccaaatgatgaccccgaggaggtcgtcttccaatgcccccttaggcacaatcgtcttaatcgacgaggaaggggaggaggaggaggaggaggagggggagattgtagcttcccttgaccgcaagcacaagggtaaaatggtcgagactgagtcttccaagaggcccaggaggaaggacaccccgactgttagctcggactcagggattcctcccgaggcagaggagtacaccgtgcctcttagcattactcttactccgatccccgcatatgaggagaggcaacaactccgaattgcccaacataactacgccatggatgagtatagccgaggaaatgttaaggtgcaagccctgaagaaagtcttgcgggaagcccaacaaaattctctacgcgaggaggccttcaaaagcgcttgggatctgaacatggaccccctgacggattggtttaaccgtttcgtcagtctggctcttgctccctttgcttccgagctaactagccagtttgtctcccatctgacccaactctcggccaaaagatatgcagcctgtgcctccacgaactctatttaccaggttcaggatatcagcgctgccatggctgcggtaagtttttgtgattcattcctctcgttttgctggtatttcgtcttaaggcattctcattcttgttttctttttcagattaccgcagagactggctgcctctcaaagaccctgatagaccatgggtacgtcatgtccgaattttggggcatggacgaggccatgaagagtctgcgagacttttcggctgagaggaaagcatttcgagatgaggcccagtagagggaagctcaggcgcaggagaggcaccgagaggagctgaaggttcagggcaaggttgtggccaaggccaagcgcgagctgcgagaagccaaggaagctgtggatgagctgactgccaagctgaaatccatggaggagttgcaccaagcggacttgcagtcgatgacaaacctgaccgtggaggtgaaggagctgagggactttaaagatcaagccttgaagaaggctaaaagagatgagctcctagcccctatcgtctgctgttgctatattttatgaatgctacgcaagtatacgcaatcaagtagtaaatctcaca

SEQ ID NO: 337491 - DNA, 545 bp, Cannabis indica
agccttctttaatgcatatagttgttatattttgtttatcttaatttcttaaccgtgttgatgtttcaatttaatatatatatatatatataattcaaaaacaaggattttgatacttttaactacacaatcacaatacaatccggcgacgatttaccgggtgactatgattgtttgcagtaatttaaaacggagaataataatggtcatgagatatttatgtaaatcaaactatttgatagatctgctagctatgtaattaatggatcttcatttttcaatctttgaaaaaacattctgttgggttgagaaggagccgattttgggactagcatataatagggtcaaaaacaaagacccagcatgctcatgattattctaacaaaaataggagcgagaaatggctaagaagattaaaagtgagaattaattttttaagtaattttgaaatttaaaataaaaaataatatgatacatacgttactattgtaactttattgctgaatttaatactatagtagaaaattttctataattatatatat

SEQ ID NO: 337492 - DNA, 703 bp, Cannabis indica
attgaggagaaattaaatcatatcaaaacaaaaaattaatgtcaaacaatctccatctaaaccctaatgaactatttagctactcatgttcatcgtagcaatttcatagatatttatttaagaataaaagaagaaaatagagaagaaaagaatgatgaaaaccctcttaaaaaagcctcccatattgaatttaatctccaaaattcatactccttgattgcttctaaatttccttttgaattgcttgttgaaaataattgaagtccacttcttttatagccaataagggataaaaaaaagataacccacacagaaaacctattctgctttctatgtcacgacccgtgttctgattccatgcagctccaggcttgccttgacacgggcctaggcatgggatttccatgcataggcatgaccgctattttgcgcacaattatcttttatttgatcgttttttcttttttcatcttattccttcgatattttctattcttcttctattttaaatatgcaaaagaaaaaaagatgaaaagcgtaaaattgctcgaaacaagagtaaaactaaattaaaaatacactacaattaacctaaaattatcctctttggttacaatagtccaaacatacttgaacattgctgctttgttccacttagctacattcttgaaaccaatgcatctagctgttggaaattatttta

SEQ ID NO: 337493 - DNA, 767 bp, Cannabis indica
ttacctcgttccgtgctcaagtctgtcggttagcctgagtggaaacgcaacttgacactttacagggccctaaactataatattcaaaactcgatgacagacacgctaaacacttgtcggggatttaaaattgaaattaaagatagccctatcgataaaaaggatgctaaaaccctaaataacccaaaaaggggaaaactagggttctgaaaaatggcccaaccagcaaactggttcccaacctgaagtccggttcctgggtaccaaccggtcgaccggttctaatggttccccagaaccggtcgaccggttctgtgctgggaacccaaaaatcgactaccttaactcaaaacaaccccaaactctccaatactctccataatgcctgtacatactctaacaaaccaatatcaagtaacaaaacctaacaattagcacaaaatcccaaatcaccattagagagctaggtttgagttctcaaactcaactttgctcaaacctcaactcaactaacaattccaacctaaattaacttaaacaataccaaacaaactccagaacaccaaaataaactttaatttacaacatagcagcagagaattaaagtttaccattaaacttaacttaagcttggaaaagtcataaaggataaaaccaaaggaaattaccttgaatcttagtgttcaaaacctgttggaatatcacaaagaagttgaagaattgaaccctagtttggtcctctagagaattcgagagagagagagaga

SEQ ID NO: 337494 - DNA, 1161 bp, Cannabis indica
aacttcttctagttcttcaattgactttaactggtttttcttgtcttgaattctagggtctagattctcttctttcttcttgccttcttctgttatgaccaccattaattgatggttggctctcctattttggagctctacacgatagcattcgtgagccaacaactgggcacctcacactacacctactcctgctggtatttggaatttcaaagacaggtgtttgattgaactgactacccctagtccaatcaatgcagggcgatccatcaatatgttataaactaatgttagatcaactactaagaaatcttgcgttaatgttgtagataatggtggctcgcctatagttaatgggagttcaatgatgccttgactgtcgacactatctccggtaaatccacataagctcaccatgcaaggttttaactttgcattttgtagccccattttcttcagcatatccctgtaaaggatgtttactgagcttccattatccaccaacactctttttatcctcttgttggcgagttgaactgtaatcacaagaggatcgacgtgtggatacctcacgtgttttgtatcttcttccaagaacacaattggaggttcttctattttagcattctttagtggttccggaacaaacaccgattgatcatttttaacttcattgacatatcgcttctgggcgttactactctctctagcgagatgcagacctcctgagataaccaatatatcctcgccctcaatagggggatgttgcattctttcgttatctgggttgttgggctgaacaggtgggttttgttcatttccttggcacttcacatattgtccaaaatatccatgagaaattaagctttctatctcgtcctttagttgacgacactcttcaattgtatgccctatgtctttatgaaatcgataaaatctattcggattgcgtttgtgtcttgcatgccttattggctcaagtttgtggaatgcaaccctatgctcatttgcgagaaagatgtttctcgagtttcattaagctcagtgtaaatggtgtaaattggcacatatttatcgtgctttttctgtttcttcttatttttagatgattctctccagtcatcttttctttcggtgttcgtattggaaattattttacca

SEQ ID NO: 337495 - DNA, 672 bp, Cannabis indica
ccaattgcgataaacgagctggaggacaagtgcaggagatatcaagtgggggaattagggaaatacaattctgacgaggagcttgagccatatcacccagatattatgaataccccttttcctttgggattcaaaaacccgcatgtctcatcttaaccacatatttggtctcgcatttgaataactttaacacaataatccgagagagtaatgtgacgaacaatttacgttgtattttgttccccacctcacttgcttgagcagcgagtagctagtttaacaagtttacttatcattcaataacttcctgggagcaactgtctagggatttcaaaaagcaatttcaggctgctaaggataggcgacccaaagcagtctcgctaaccaatataaagaagtagcctggcgagacacttaaggcctacttaagttgttttagcacggctgcgactagggttagaaatttggacgacagcacgcaacttacagcccttcaggcggggatctctactgatccgttaaccaaagggtgtgagttgcgggatgatttacaaggacggccagtgagaagcatcactaagttcgcccaaagggcttaggtgttcgtttagaaggaagaagcatgaaaggaaatgaatctattgaaaaaaagctcgggaggcaaacccagca

SEQ ID NO: 337496 - DNA, 485 bp, Cannabis indica
aaaaccattgatcataatattttctcattattacagttttgccattaattaaaaaagtataatatcttattaaaagataactaatttcattttctaattaagaaatattaataaagtaaagtaacaatattagcaatgaaaaaaaaatctattatgctaacgtaattatttatttctacaattatattagtagaaatatgaataataagaataatatattaatattcattattttttttttttacagaaataaagatatgtttaccgaatttttcaaaaatcgattataaaataaatagagtttaagaaacaaacaattttaaaaaagaagaaaaagattaatgctctataaatgacataacacttattcaagatgtaagcataccttatcgtcgattatcatgtcagtcttaatccagtaaaccgataaattatgggatttaaacttttgaacatataatcatgattatcttccactgtgttga

SEQ ID NO: 337497 - DNA, 716 bp, Cannabis indica
tttgatggcatcttggttcacgtactggaaggagaatactcacatgggaacaagctgatgggagtcagctgcgtgtggggcgtgtggaacaagctgatgggagtcagctgcgtgtggggcccgggctgacgaacggactggcgcgccagtggtagagtgacacgtggaagacttgtctgctattgcactcttttgggccggatttggactctcttttcgggcttattttatctcttataaatgccataaaagtgtgttttgggccacattttcatcatctttttatttcttttccacttgctattttcttcttcaaacacaaacaaaattaaatccaaacaaaatattttcaacataaaatatatcacaataattttaatgaaaatatttatttaaaatttaattaatttgtatttctttaattaaaaacaatgtatttttttaactttttatttctctttttgctattatgccataaatactaattattatttataaacaaaaataaaattaatcttaattaaaatattttcaatataaaaatatattacattaatttcataaaaatattataaagaattaattttgttttgtatttttacactgtaaaatatgtaatattttggcatttaacagagtgcaagcttgtatcggtctctgttaacttaatctaatttaaaaaagttgggtccttttcgttgttttttttttttttt

SEQ ID NO: 337498 - DNA, 557 bp, Cannabis indica
atagaatttatatattgaacatataattatgaaataattcatgtgaaccatgcaacatagaataattatttctgatcttttattaataagtaaatatgattatattgaaatggattttatttagggcacaaaacccaacacttcaatgacgacaaagttatcactaacgactttgtcgttagcgattgttttagagggaaaaaccccatcctttccaacggtccattttcaaaaaaaaatattactaacgacattgtcagcattgataattttatcaatgccaacaattttatcattaatagagttaggaccgtcaaacaccatctatttccccattggtatgattttatccgctttgggcctaagccctcatggttttatttttgggacattcccaaaaggtctcattctaatggagataatgaacatccttatatacccaagatccttagcatttctagccaatgtgagactttagttgtacacccaacaattctcccatcaaacaaaggaccatcttgcctcccctcagaagattacagatctaaacctgaatc

SEQ ID NO: 337499 - DNA, 545 bp, Cannabis indica
tgattaatatacgaaaatacacattttaaagcattgatcatgtaataaaattaagttttagtatttattttcataagttttaaatgaaaattttattagaaatgaaaataatattattacttaacttttgtattatgttttaatatttaaaaggttttgaagcccaaagaaatgaagctgtgataaacttcaacaaaatccacacgtgtacttcttaaatcattatatgcatatttatcacttgggtcacttggatctcaattcatgggctggaattaaggttgtatagcccaactcaacatgtagtccaccatcaattgtgacgagcgaaccccaaacaactgctccacttactccatgcgcatcatatcatcatgtctccccacttgcgcataagctcaacttcccaccttcttccgaatttgaagccacactttccattatttttcacacgaaaaaattcatcagctggaggcagaatgaggctctataaatagtactactttagagtaacaagcagcagattttagtagtgttattatacc

SEQ ID NO: 337500 - DNA, 774 bp, Cannabis indica
ttaggttaattatattagtgtaacctaaataaaattgaattagcaacataattagctttaaaataaatgattttttttctcattgaatattttgaagttaattttagaaaaatacttatttaatgagatatattctagatagttatttctagtaactaattatattttctaatatttatttaattacgaaaattttttttaagttgaaaattaattaattgttagttaatttggaccaacataaattagaatatttttcctggtattaaattagaattaataattaaattaattttatatatttaatacatttaattaaattgaaaattaaatatttaagtttattttattcttgatacttaaatattacttattttcagaatatttaattaaatggaaaattattttaagttggaaattttaatttgagaacaacttaagtttgaataatttacaaaatatgttttattttattttattaatcattgtttcccgaaatttcaaaattgcattatttaaatgcagataattttgaattttttttttgaaaaatagattgaagttgaaaattaatttttaattaattttagatcaacttaaatcaaattaatttttcattaatgattaattaaaataaatatattaaaatatattatattattttaattagaaaataaagaaattagttagtgaaaatctagatagttattttctatttgcttgaagtatttttctagttatatttaattagatagaaaattaatatttaagttg

SEQ ID NO: 337501 - DNA, 650 bp, Cannabis indica
ttggtagtaaatctatatcctggtaaaataatttccaacactgtttagggtgtgatttaggattgattcattcgggaagatgaaggtccgatgtcaggcctgatgtgggcccgatagtcggcccgatggtccgcccgatggggtcattaggacccgacgttgagccggatggggtaggcccaatggtgattgatttttttcccttgatgggcccgatagggcccgatgtaaggcccaatggcccttttgtttttttaatttttaggcccgatattgggcacgatagggcccgatggccctttatttttttttaattttttaggcccaatattgggcacgatagggcccgatatatgggtccgatggccctttatttttttttaatttttaggcctgatgttgggcacgatatggcccgatatatgggtccaatggtcctttgttttatttaattttttaggcccgataaggcccgatgtacggcacgatggccccagtaaaattttaattttttttttgtgatatatgggtctgacggctattttttctagtgtttttttgcagtcttccaaagttccacgacttttacttccaatgtcagaacattacattggtcgtgtgacttggcaaagtgaaagctaagtttatgg

SEQ ID NO: 337502 - DNA, 537 bp, Cannabis indica
tttcatcttgaacttggggattaagatcttcatctttcttctcgttttctcctgccaagatcgtcatcaactgatgaccggcttgtctatgctgcaactctatgcaatagcaatcgcgagtcagcatctagtcgccacgcaccactcccacgccatcgagtgtttggaattttaaagataggtgcttgattgaactgactgcccctagtccgatcagtgctggacgacccaataatatgttgtaagccgagggcatgtcgacaaccaagaagtcatgcataacagtagcagtcaaaaggtgcctcgcctaaagttaatgcaagctcgattatgccaaggctagcgatgttatctctagtgaatccgtaaagattcaccatacaaggccttaacatggccttttttagtcctcattttctttagagtctccttataaatgatatttaccgagctcccattctctatttacactctcttgatcttcttattggcgagttgaatggttatgacctgcggatcgacgtgagggtatctcac

SEQ ID NO: 337503 - DNA, 506 bp, Cannabis indica
aaagagaaaattttattaataatctcaaaatgtcataatgaattgtcagcaataatatgaaatagggaataaaatccaaaaccaataattgaaactaaattatttataaactgaaacaattaaataaaaaataaagaagatttgagcttcatcttcacttggacaatctccacccttctatccaaccatccgactcaactcgctaggatagcaatctaagtttaagcagctggagctgaaataataagaaaattaacatggttattagatctagaagtaatagcccaaggagataataattctctaaaacacatgagttaatagcataaatggaaataccttatttctttgccaaaaacttatgacactggggtttccagtggcccttttcgttgcaatagaagcactttccttttttgctttgcatttgcattagtagcctttttcttattatttgtggtaacaactttaagaggcttcttcctattcttccacttcttcttttg

SEQ ID NO: 337504 - DNA, 518 bp, Cannabis indica
tagattcagggagagggtcggagcaaggtgcaagtatttaggttttttttttgcttaattgcttttttggattttttgcatgggattgtgggttgggatgagaaatatagtggagatgaagggatgacacttatcggcagtaagcctccaccactgagaatggtgggtggcaaattgtagaagtttttatatatatatataaatatttatatatataatgtttttagtctttaataaaagaaaatgaaaaaaattattcaattttttaataatatttttattatttaaataatttttatattgtgaactaataaacttttgacatgtggaaattttaagaactacaatcagagttgttaaattgagtatctacgaactaatgagaatatcgagtaaggaaatataaccataattttttgagattaggacttatgtgcatcaaagtaagctttttggggatttatttgaatcaaaataaatttttttgagacttatgttgcactttaatatcaacacgt

SEQ ID NO: 337505 - DNA, 521 bp, Cannabis indica
tctagatcctggtaaaacatatccaacaactgcctcagagccatggtaatgatttactttcatgaaatatgaattgaaacaatgttttgtgttgatttgaatggtttcatggtagtttatgtgcttatttgatgatagtttggaaatcgcaatatatgttgtaaattttatttcgttctaaaaatatttttactggaaagtagtcaaaaatttaataaatttaggcttttacagaacccaatttgaattttttatgaattagttatgattttttgaatttggatgaaaatatctgattttggttggacacgtatgggcgcacagggctatgcaacactcggacagaacccatgttcagacaaggagctgatcgagaattctcggacacagtcctgtctgaaggggtgcacacgccgagtatcctcggccaacaaaggctgcacgcagcctatttgctcggtcatcactccccatccgcgagcgtaggcctgtgcaccaaatttgttttctacataattttt

SEQ ID NO: 337506 - DNA, 538 bp, Cannabis indica
agggtctggacctagaaccgcaccccagtctcgatcccgaatccaaactcagaaatgggacctgggacctgaacgagaataaaaccgagacccgtgatagtgatccagattttgactcgggatttgggtaacgggtcctcgaacagaccagtagtcggtgtctagatttgagattcagactaggaccagaacccaaaggaagaaccaaacccgaacctagacctatacctggggcccaaaattagaatctaaaccagaattgccgaaccagaaccctagaacaatattagcaccgtgacaaggacctaaacccagacctagaaccgaacacagacctaggctctgacccaaactgagactggacctcgggcccggacacggtcgtgtacccagaccggaactaagacccgatcttggacttaaatctgggactggatcccaaatacagacttggacatagatagggatcaggatatgaacttggactcggaccaagaccaagagtgggacaaaaatgctggacctagatctggaccga

SEQ ID NO: 337507 - DNA, 654 bp, Cannabis indica
atatattttttttaaaaaaaatttgtaatcggttttatgagatattatgtgttatgaggttttttattgtagaactagttttatttttaatttatgtttcattgttttaggaactgatttcccctttgttttttaattgtaatcgatttgaattattgtgtgttacttgtttgtattcattatgttatataatcagttttattttagttataaccggttttgaattattttgtataattggtttttattcattataacactgttatagaactagttttattttaattataactggattaagttattttatgttatttatttttatttattatgttatagaaccggttatatttcaattataactggtttgagttattagtttttattcataaaacatgatatatttttagttatatctgagacatttacttatggtgacttttccaatgacttttccagcgattttttcggcgacgacgacttttccgacaacgataatttttcctgtgacttttccgtcgacactaacttttccggcgcctgtgacttttcggtgccagtgaattttccagcaaaacttattgttgttacaaatatggaatttccacttttttttacaaaaatatggcacaaaaaaaccatataaatgtaaaa

SEQ ID NO: 337508 - DNA, 590 bp, Cannabis indica
ttcaagagctaaaaatgaaactcccaaagcctcccgtactctcgaaacctttgggcggagaagaactggggatacacttagttgttacagagcatgatgtgagtgccatgctgatcagagaggagaacaacatacaacactcagtctattacattagtataagactcattgaggtcgaaggccggtacccattgatagagaaactcgcgtatggcctgactctagcaacaagaaagttaaggccttactttcaagctcatcttgttcgagtggacactgatcaaccattatgccaaatactacaaaagccagacgcttttggacggttactcaagtgggcagtagagctgggttagtacgagattactttccaaccccgaacaacaatcaaaggccaggccttagcagactttgtggtagaatgcacaggcattgtaccaattatgaattaactactagtgtaactttctgactaacacagaagtagttgccaaaaagtaaagaatctagttttcctagagcagtagacatataaagaggaatttcacaatatcaaggattttgtggttaaggatatgtaatggcggaga

SEQ ID NO: 337509 - DNA, 530 bp, Cannabis indica
gagcttcccccaactctcttcttcagagcgtcgagcatcttcagagacatatttgcacggaataaaaacaatgtggttagacgaaaaaaggcatcataagtaaaaagcataataatcaagaagcttaaaaataaggtggtgtatcttgggtttcacgggaagcatttgcctgagcaagactcgaaggttcatcatcacctgacaagtctcttatccctgctaggacggctttcccctttcttagtacatgagaggatggccgagtaggtaaactgggctctctgattcgaattgcatgttcaacgggcttgggcttggccagaagtttcttcctccttttgagcggagtcacctgctcttcctcagcctcatctacaggatccaaaggctcatgagcatactatttggcccttgcacctccctttaacttagcgtcacgcttaagttgaataagctcatcctcctaatgagctccctcagcccgtccagcactggatttcctcttcttctccttcacaggctgggggaat

SEQ ID NO: 337510 - DNA, 1071 bp, Cannabis indica
tacttacaaaaaaaaaaaaaaaccttagtaccaatatccaagtttaggtactacccatatgaaataatttttaatacatataaatatatttcaagttagtttaaaataaaaattttgggtgaaattttagaacttgatgatagatagcaccatatgactcttaaaaaaatgtgtgttttattattttatgtgattatttattttatctttgaataaatagaaattatttgtgaactagttatgtaagtatgggtgatatcttatttaagtttatcttcttttagagattcttagaaacaaacaaagaacattaggaaataatgtctccaagaagatcagttcgaatcaacggcaatagaaacatccacgtggatgcagcttcagcacccgcaaggggcggaggccgaggtgatggtagacgcggaggccgacgtggaggccaaagcggtaggggaggtagacaaggagcatcggtagcaccggtagatgaagtagcactcgaacaacaacaagcacctcccaatgctcaagctgagatactccgagaaaacgctcgtatacgtgaggagctaactcaagaaattgcaaggctacgagctcagaatgaggagttacgccggaatcaaaatccacccgttagaaacctagctcttcaaccagctgcattgaatccagaaccaatacaacattttgaacctgtgtacgagcgattcaggaaacaacaaccaccaatattcaatgggagctcggactcacttgaagctgaggaatggttgcgctcagtggagtccatattggaatatatggacctcaatgatagggaaagagtatcctgtgctgccagcctacttaaaaaggatgcacggatctggtgggaagtagtaagacagagtcgcaacataacaactatgacctggttggactttgttgatgtgttcaacaggaagtactacagtgccgccatactggctgcaaaagaagatgagtttatgaatctgaggcagaacaatctcactgtcacggagtgtaaagcccgcttagttaatttggaaattagcagttatttatgtt

SEQ ID NO: 337511 - DNA, 846 bp, Cannabis indica
cctaagggcaaaatggtcatttgaccataagtgatttactttgaattatgatttttgaaaggaaaaaggatttatttttctggttctatctctctctcacccgaaccctctctttccctaaaacccttttgattttcaaagttaattgttgagaaattgcttgaagttgggtgtggattgaagctttggaattgtggattcttgagcttggagttaggtaatttcttgctgagtttatgtagaaattgttggtgattctcttgctgaattttatgttggaaaagcttggaaaaaaatgatttggtcttataattgcatgttgtgttcttgagattaatttgagcatgttattgaataaacctttgtatgtttgatgcttagtattgtaattgagctttggctgagattatatggtgattctaggttggaattcatgttttattttgtgttcttgctgctgaaagttgtggttaagtatgcttgtgagattcaagagcttgaatagatgttgtatggaatttttgggtcaagtttggagcttgaaagttgtatattgtaaaatctgattttggttgtggattaatgcatgaattttgtgtttttatcctctgttttggttggggttcgaaatctaggaaaagttggcatgtttaggccttaaaaatggagtttttgggtgttctgaacccagtcgtcgcgacgggatttttggccgtcgcgactgggtttggcagtgagaaaatatgtttttcccgattttgttttggccataacttttgactcgggactccgtttgggacgttctttataccgttggaaagctctttccgagctctatgtgattat

SEQ ID NO: 337512 - DNA, 1006 bp, Cannabis indica
aaagcaaggctcgttgcaaaggggtttagccaaagacctggtctagactatggggagacattcagtccagttgtaaaggcttgcacagtcagaattatcttgacaatagctgtgtcaaagtcttgggaagttagacaacttgatataaacaatgcttttctaaatggaagtctaattgaagatgtttttatgacacagcatgctggtttcgaggataaaaattacccagattatgtttgcaagttgtctaaatccctatatggattgagacaagcaccaagggcttggtttgataagttgaaacaaacactgcttgagtggaagttcaccaattctaaagctgattcctctctattctttcttaaaaatgctgctgatattgtgtttgttctcatctatgtagatgatataattgtaacaggaaacaatgctcaaaagctcaagcaattcactgtcaagttgaacaaagtcttcgctttaaaagaccttggcctgctgcattatttcctaggaatcgaagtgtttagagatgaaactggtatgtacttatctcaaggaaagtacataacagaattactcgagaagaacaacatgacacatctcaaaccatgccctactcccatgacagtagggaaaactctgtcaattgaagatggtacactgctgaacaatcctacagaatacagaagcttgattggggctctccaatatctcacacacactcgacctgacattagtttctctgtcaacaaactaagtcagttcctcaaagcaccaactgatgtccattggtctgcagccaaaagaattttacgatatttgaagaacactcaagatcacggcctgcatatcaaacccagtgacagattaactcttactggtttcactgatgcagattgggcttgctgcccagatgataggagatcagtggctggttattgtgtctactttggagactctcttgtgtcatggtcatcaaagaaacaggctgtcgtttccagatcca

SEQ ID NO: 337513 - DNA, 789 bp, Cannabis indica
aaggaagtcaatgataatttgaaaaaactattagagtaataacatttaccaattattcgaagtcaaacataatgtcaacactataattggcaaaacagaagcaaaactaaattactttaaaagtaggaatcaagaaaggattgttcaaaacaatctgaacactacactgtaattcgagaataaatgtgccaataggataacgtcaactccaatataagtgtccactttaagctttgacttcctctcacttggctttgagatcccttagccctcggctgtgcttgcttcttttataatttttttttgatcctttgttgagcttaagttgagagacatagagagaagatgcattcttctctttttacagcttgctttccttagctatatactgagaaataaggtcactaacactccatgttatattataagtgttgtaggttgtcttgataaggcgaaaagagacgggaagtgcatggaaagctcgatgaataatgtaagagttaggaagaggaatattatgatcttgcaacttggactgaacattcactaattttcagaataaaatctcgcactcctttagatttatcatactaaatggttgtcatttcattcataagacgtccagctgtggcattttcactagtgtcaaatagtttttctacagcattgaaaaactcatgagcatttgaggtgtttggcaaaccaataaatgaatgatcaggaattgaactttcatatagcaacgagactaagatgatttgaatttttccattgtgcatgaagagtttt

SEQ ID NO: 337514 - DNA, 522 bp, Cannabis indica
acaaattggtacaacacgacacgaaaaatgtggacttaaacacgatacgacacgaaatatatagacttaaccatgacataacacgataatcttaaaagacatggcacgtaaacacgaataatctattctaaaagcgtgatatatgaaaaacctgatatttgataataataataataacaataatttgaatatttattagtaaatatttaaattttaatagttctgataatttttttatataattttatgtgaaaaattgctaaaaaattatataaaaataattgagattataaaaaacacataattttagtaattatctcattaattataaaaataaattgtgaaaaaatagagcacgaatttaaacttgtataaaaaaaccggctgacatgagtaaaacacgacactaatatgagcacagcaaaacacaacctatattcttttatggtatgatatcatacgacacaacctatattttttagggatattggcggctaaaccacctgaactttacggtttgta

SEQ ID NO: 337515 - DNA, 683 bp, Cannabis indica
ttttaggttcccagcacagaaccggtcgaccggttctaggggacctgttgcaacaggtcgaccagttggtaccctggaactgggcttccggttggggctttttcccgaaccctagtttttcctattttttgttttattcaaggtgttagcatcctatttatcgatagggttattcttagttttgatcttaaatcaccgataagtgttttagagtgtctctcattaagttttgaacgttatgttttagggccttgtaaagcgtcgagctgcatttccactcaggctgactggcacacctgagcacggagcaaggtaagatagcatgaatattacatatatgtgaaagaatgcttgtttggatgtttacactactaacactattatgtatgtgttttaaagagtgttagcatagtgtaggatatcaatagggttacggtgttatcagcacgaaccaagggatacgtcgtgcatgtgatacaacacttagtaatctccgagagtacattaatggatctaccaacacaagtatggagttggtactttggtgcatttggtacagaggtcgtacttcccttaagaacgttcttatccatttagtgagcacaattattgagctcggggcagcttaaaaaataagccgatatcgcatggtttactgatatgtgtcttgcttatcttactga

SEQ ID NO: 337516 - DNA, 836 bp, Cannabis indica
ctcttcttctccttcacaggctggggaatgaaatccttcgagtaaagcccgtactcaataaagttgtcctcggaggttacaaaatgatgttccaggcatcactcggcagctgagtgagtttttgagctctatccctgagagcaagcgtgaggggtggatgattatatataggaatctgctggaaccgagtataggtggtgctcatgccttccaccatatagtatttgtcagcaaaattcctaattttgctaacacccttgtccgcagtgcccgtcaaccacttgaagtttggctgagaaaagtagaaatatcccaacctaccttgtttggaagtagacttcaagtcgaagaaccaactaacctcatgaggagaaggcatattctacttctgggtggcgtagagaacgaacagggcagacaggtacttgatgcccttaggagtgaattgggtcggacagagacagaagaagtctgtcaccttcctaaagtacgagtgcaaaggcagcagtgccccttgtttagcatgagcacctgaccaggcacacatccccttctcagggtttgtggctcggttgtttgaggcaagaatgtagcagtccaactcgcccaaatagccgccctagtcaagatcccgtaagcgtgcttagtgattttggacggagggctcacccacctgaaggcactttgcctcctttgaggaattgtagcagtaagttccttcgtgacgtaatccacgcccttaaccaggacggcgccatctgcatcgactgactccccagtctcattctaattgttcaatttctcgtaatggatttcatatatgtgttgctcacatg

SEQ ID NO: 337517 - DNA, 841 bp, Cannabis indica
aattgctcatccatcactttgataaaatatttcaccttctcaggtggctccaccgatccacgcattcccaaaggaattctggacataatgaacatgatgcaaagacgattggattgctcccatttttcacgcagtgcaatctcagcagcagtgctagtatcaatgatagcagctggttcgtctttccttattgcatagtccatgtcagtgcaagctaggtggagaagaactcattccttccagagtttgaagttgtcactgtaacgccctaatgctaaggcacgctacagtgttttttcaattacagtgcagtctttgctaatcaaagaatcttcttgaaaaaaaggtgtcaaattaaaacttttatattaaatattgaactttatactatatcaaaatatttacatgttccgggatcccattttcaaacttttaaccttaatacttcaaaatacatataatccaggtcgcacaacgactacgaaatatgaccccagatgtcctaagaccaaccactccaggttgcgctgctttgacatgtacaaccccatccttgctcaggttcactcctgttcagctttcgcctttcctttacctacacatggaagcagaactgtgagtcgacaaactcatcagtaagaaaagcatataacatatcatataatttccgacttgtaattaggctcccatacacttttttacaaggctcaacagatgagtaagaacgttcaatactagggtacaaccactataccacatacactacgtacctcattgtacgagtgctggtagggtttgtttcgtaccctgagtaccactgagtgatatgttgggttttgtg

SEQ ID NO: 337518 - DNA, 1183 bp, Cannabis indica
  modified_base (124)..(124): a, c, t, g, unknown or other
acgttgtggatttgattttatatggatataagatacatagtttactgcatccatcttaccaacttgtttatatctaaatcctatgtttggtatttttcttttcttttttttttttttttttttnttttttttttttgtgaataaaaactttataaccaaacgaagaaaaaagaaacacaagagtctaaagagtagtcacaaaggggactacctcccttaaaacaatcctcgtataaatgcgcttaattctagcgagataggctaatctgtctgcaactgtattttctgcacgaggcacaaaagcaaacttacaacgagaaaacatagatgaaaaagataaacattctttgaaaatcaggataagaaccccaagcaaagggtaattctctcgtgaataaagccttcactgctacagtcgaatcagactcaatattataagaatggagctacaattttcttcaactgcaacttgcagggccttatgaatggcaaccaattcaacttccaggacactacacacctcaacaaattgcatcaccgtgatggccacttcaccatcaacatcacattgaaccaatcctgtgctagccacaccatccaaaactgaggcatctactcttaacctcaagtcccatacatccgaagaggagaaatctgcatcaagataattcgttatagtatgctgcaaggggggtgggggagcattgagaaacataaaagaataataatatccccataattatgtagtcaccggatagatagatttagtgagtcaataaaatattaaaataatatctagcatccatcattcctcatttctaacttgtacatagctaatttaagtcatccaaaccattcactcaagcttaaatacagaatcagtttttcagtggaaagtttgataaataaaataagactaaactaataacgactttcttcctcaacggtcccatcctcttccactagcatcaaccgagttcctagaatgggttgaaaataggaggtgagcttataaagttcagtaggaaaacaactaatatcaaatgacccttggtttattaaaaactcttgcacggttaacttaaaaaaaataaaatatatcatcaccattgtcaaaatatataaacaaaatagagaaaatagagagaccacaaataatcacaaagtcaagcttcaaatgcat

SEQ ID NO: 337519 - DNA, 520 bp, Cannabis indica
agtagtaattaatccaactccctgtggttcgacctcacttgcgtgagtatactacttgattgcgtgcacttgcgtagtaattaataattttagcaacacaaatagggagagatagaaagcctgaaaagttacattcaacacttcaatgttgaagcagccaaggtttggagccaagaagcaagttatggaacaacatggtcaagagagaatttggtgatttggaggacttctatgaaagagccaataggtacattcaagtggaggatcgacatgagaatctagatgtggtaagaagttgctagcctaagacagcccctgctgatgagccactaaagaagagagagtacgatcactgaggagacaatcggtgcaaaaagttaagaaagagatggaacttaatgtggctacgctctgatcgtagcattcttaaggataatattctagttgatcttcaagccatcttgtattctgaatgctaaatttcaatgaagttgatattgaatttttcaaaaaaaaaaaa

SEQ ID NO: 337520 - DNA, 1090 bp, Cannabis indica
agactcagccaatgaaccaaatgatgcataccctgaaataagtgcattccaggagactccatcacgagctcgcatgcgattaaacatctttcgcatctcaggaagatgacctgtttaatttggaatatgcagaaaggatggtattccacaagaaagggttaacctatgaacacaacccctaagcctaacctatgaacaaacacaatttaataactactcgactatattctatctctcttttgcaaatcaaaagaaaaaaaaaattaaagaagactcatgtgatcaacataagtggaaaagaaaaagaaaatcaaaaaaatattttcatggcattcaaaagaagagttaagagataaaccttaattgtgcaggaactattgacgaaggtgttggcgaacggcggcgtggatgatcagtgacggagaagactcctgcgatcgaaggtgaggagccgtactacgatgtctctacctctgggttgatttatacgaatgagaaaaaaccctaagtaaaaggacaagttttttaatttgaatgaggataattgggtcaactaaaaaattcattaaactcaaatttcagcttcccataaaagctaaactctagaagttggtgtgggccaactttagctaagagctataattttaacttaaatttttaaaaaaactatttttttattttgccaaacactttttaagcaagagctttctcaaaaagcacttttaacttttctaaaagctacgccaaacggggccttagcctcttctcttcggctcctcctctcctctttttttgaatcacaaaacaatcttatctaaacaaagtctacttagccagctacccactgtgtgatgtccccacatacaaacttcagtgataatagtgcacctctagctgcttctcggttattctaggtcgagaattttaatctgctggctcaagtcctccaaagattactagctacaattagttatcttgtttttttaatcgaaatctaagtttttcagtttgaaacttaaagcttttttccttattcattatttatatgtttgttataattgaacaaaattaacatggacctttatatgtc

SEQ ID NO: 337521 - DNA, 1007 bp, Cannabis indica
tatatatatcattatctttgtctacataggttacttttatgttttattgcgaagttgaaagttgtgtcgtttttttttttttttttgagttaaaaaaagattgtgttgatagttagattgtgttgataacctatcattgattttaatgcctactcccttttttttttcttcatattttacactatgtttggtagggaggtgttcaaggagggagaggatttgatatgatagattgggcttatccattaatagtccatgtttagtgttacttttaatttttttattacaattttttggtcaaactccgtatttaaaaatacatgttagaatattttttttttcaatatgcttacaagttacaacatcatgcttataatttttttaaaaatttagaataatttatagtgtcgtaaatacgtttgaagttttttgtacatgcatagtaaactggaatatcaggaactctattttcagtactgtaaattattcgaaattttttaaaaatttaaagaaatgatattgtaactataacaaatacaaatatgaacaaaaattgaaaaaatttggcatgtaattttagaagtaaagattgactaagagattataattaacattccttatttagtattaaaaaaagaggattgagggaaggatggaggtatggattctaaatccatccaccaaaaatttggagggattgtataaaaatgttaacacacctttctttcctctcaatttaccaaacaacttctaaggatacatcaaatccatctattacttttttaggagtgtacattggtcggtttgatcgggttataatatatttttaccaatctagtataaattttgagttgcgaatatctagttgtaatcatctcaatcataaaaataaaaataaaaattaacctgtccaataattttatcagtttggtcgggttaacctgcccaaactgatctttattattatttattattattgttagttttggtgttcaaataattagatt

SEQ ID NO: 337522 - DNA, 1556 bp, Cannabis indica
gggcatcagcgccccttgctggacgtgggcccccgaccaggcgcaatccccttgtcagggtttgtggcacaattatcgtgggcgagaatgtagtagtccagctcgctcaggtactcggcctcatcaagtgttcgaaggtgcgcctccgtaatattggacggaggacttacccaggcgcccaaggcaccctgcctttcgtgaggaactgccgaagcaagctcctcactgacgtagtcaacgccctcgaccaagacatccccgtcagcatcgactggttgcctggcctcgttgtactcccaaaattttgggggttcaacctcttcctctccctccgcctcgaaaggactacccggatgagcatcgtccagctcctcaacctcgtggacctcagcgtccccctcacgatcctcctccatcgggatggccaaatcctgttcggcactcggcagagtggcaagccgagccacttgaggatcagtagtgttggccaaccgcgtggttttctttgtacgagccatcatcctatggctgggtacaaggtcagaagaatgtccttcactagaaggaggactagaacgaagacgaggatgatcctcgtgcagaagttgaagcaaatcctggtcgatctgatgcccgatttcccaagactcacctgagttcatctacaaaagacaacacagaagatgagtgttggacggaatatcaaacgataaacaagcaaatatgccgaccaggattactcaacagattaaagaacggctatgtctaaagaaaagttagaactcaagaagtcagaaggttttcttgagttagggcaaaaatgttcatgaagcttagaataagcaacatgaaaggcggacgcaatgcggttcaaagccaagctccatggctgtaagcccacatgaagacataataaagaagagtcgcagaagtttctaaccctagggtttcctaagcatttttctacagcattgtgaaagtttcattcaaagtgtaaacatgcaaagaaaagcataaaggaaatcaaaaacttactcaaagattcaagtgtctgggttcgagcaacgtcaagccaaccagcagttgtatgaaggcacttcggcaactttaaagccagaaaactttcttttcgctctggagtttacttagcgaagaagggtgataaaatgagtttatgtgccaatgctatgggtatttataggaaagtcacgaaaagaggtaactgcatcaaagaaacctcagacgcctcagcttcccgcctcaaaaatgaatatgggaaatcaaaagtaatcgagtgcaaccgtcggccgtgtagagagaaaatcggatttcgaaatattaattgtcagagcatttattagctgaaaactgaagggacgcccagtcagcttcacatcgagtctcgaacgatcatgctcaacacgtgtccccatccaaaggcagagccagctcggaagaagtctacatgcaacctcagaggtcccgtatagacttgggggcaaatgttatcccaaattttgcactctgacgtggcatcatgagaatggtgacacgtg

SEQ ID NO: 337523 - DNA, 410 bp, Cannabis indica
cctcctcgtattgactaggccgctctgagttccacccattacaacgaagatttcactctcgtttttttttttatttacagctaattatcttgtacttaagacaatttctatttacatagctgtttttattaaaggggagacaatatttaaggcctgtccccgggccctttgtatatatttttgacctgcccttagggctaggatttttatatatttatatatgatctttttttgtttgatgcacatatctttcttttggacctgccctttgagtcaggatgtttatacatatgcttctttatttttcttttttgttgcatacttctcttttgttttgacctaccctttggggtcaggatattttatttagctttttgacctgccctttgggtcaggatattttacttagc

SEQ ID NO: 337524 - DNA, 664 bp, Cannabis indica
aaataacccctacgctaaaggagatcatatatctattttgaaaaaacataactattaaaattctttaaagtttatccagataaaatccacttataattatttagttaaaaatatttaagttgtagtcacacttgttattattacatccttttataccttcataagtaaatttaaaacataaacttaaaactaaaaaatagaccaaaatgatatttactatattattttaaaattgtacgtattatcccagtcctttctataagaaacataatacttattaaattggaatgatttaccttgtagtggtttagataaggctgccttcatttgtttgtctgaggagaaaatgaccgctccaaaaccaatcacattttgaggggttgatatcgctgcgtccacatatagtttatagctaagaacttctgtctctgcattactttgctcactagtacacccagttgaaactccttttttagttttatttctttctcgacagatttcattataataggaagagatccatatcttgatttggtgtggagttcttatagttcttccatgacttttcttatttctttcaaaccatattgtccatgctgaaattaacactttctcaaaatcttctttttcaagtatttctgatgcatacagtagtactcctttg

SEQ ID NO: 337525 - DNA, 672 bp, Cannabis indica
cttcctgtcagggcctgtacttccttaggctttgtcggggatggcatgtttattaatgccttgattttttcaggatatgcctaaatacccctcgcgttaactatgaatcccaaaaactttcccgaggagactccaaaggaacatttttttgggtttagcttcatgttatacttttttaatattttgaagcattccgcgaggtttgaggtatgatccttactctttattgatttcaccaacatatcatcgacgtaaacctccatgttttgccctatttggcttgcaaacattttgtttactagtcgctgttcggttgccccagcgctctttagtctgaacgacattactttataacaataaagtcccatgttggttacgaagcttgtatgctcttgatctaggacgtacatttttatctggttatctctagaatatgcatccataaatgacataagctcgtgtccagcaggtgcatccactaactggtcaatccaggaagtgggaaacattcgtttggacacaccttattaatcaatacaagttctccaagttctgttaggtttcgcgacgagaaaaggcttggctatccatgagggataaaacacctcgcgtataaaatcgttgactaacaacttgtcaacttcctatttagtgccccttgcctctcggaat

SEQ ID NO: 337526 - DNA, 560 bp, Cannabis indica
tttctcaaaatcttctttttcaagtatttctgatgcatacagtagtactcctttgaaggtcaggtcctcttttgggcttgcaagaaaagggaaactcatttgcttccatataacttgtgagaaggagcaccagaaaattgcatgtgcattggtatcattcccgaaaccacatataggacaattactatgaggtgagctttgtcttcgaaatagaccactaaaagaaggtaaaatttcatgaaaacctttccatccaaaatgcaaaattttctttggaatttgtattgcccagtatgaactccaccaagctgccataacttcatttgatgatgaaggttgtaaattttctcctcctattgccagattatatccactcttaactgaatagtggccatggctagtaaaatgccataaccaatcatcatcatgttcaaacagggtaattggaattgataaaatgagttgtgagtcaggagtactaaaaacttggtgaatcagatctttattccattgtcctggttgctctattaattctgacaccatcataagatcaccaactt

SEQ ID NO: 337527 - DNA, 625 bp, Cannabis indica
agagatcaaggaaagactggtcatgaaagctagatgatgcactgtgggcttatagaacagcgtttaaaacacctatcaggatgtcactgtataggttggtgtacagaaaagcctgtcatctgccgatggaattagagcataaggcctattggactatgaagaccctcaacatggacttagcggctgcaggagagaaaagactgctgcaattgaatgagctggaagaatttagaaatgaggcctatgaaaacgcaaagatctacaaggagagaacagagaaatggcacgactaaagcttattcagtaaggagtttcaacttgggtagcaagttttactttttaattcaaggttgaaattgtttcttggtaagttgaagtcaagatggtctggaccgttcacggtggtcaaggcgtttccctatggagttgtagaattgaaaggtgaaagtccagaaacctttaaagttaatggacaacaattgaagctctacttgggggggtcaaattgaccaagccaagttcgatgttatattagcacctctttgacgaataacttagcgtccgactatatgacgataaagacagcactcttgggaggcaacccaagtgtttatctttatttttt

SEQ ID NO: 337528 - DNA, 793 bp, Cannabis indica
agctcgtctcaacttaccaccgtagtctttgttttagggtcaacgtaagaatcaaaacaccttgcaaacctgttcaaaacattgtaagaatgaatatcaatgacaataaacaatacccatctgaaatatcatatcatagccttatcaaaaaacaaaattcataccctctggcttattggagttctcctcattaatatcataaccaaacccaaaatatatttcgcatgaaacgttgtaaatcttcttcttagcttcctcaacactgaaaaaaccacaaaattagagtaaaaaaaagtttgtacatttatagccaaaacagaagtattgagaaattcataaaccaaatgtgccaaggccaagacaatatacgaatagggtcggtgggcgttgccggtagtggcggaggtgcgtcgctggtgagagagagacccgagtgggtgagatcgagagagagatcgagggagtgagtgagtgagatcgagagagatcgagggagtgagagagtgagatcgagagagatggaggcgcgaggaagtgagaaagtgagatcgagaaagagtgagattgagaagagtgatggtttgatgtctgaatgttttggtgagaggcacgagggttttaattttttagccctattcccgacagttttcaactgtagggcaaagtatgggccacagtttaaaaccgtggcccatactttgcccgacggttctaagccattgggaattgtttattattttttttaaaaaaaaaattctccgcacttttaaactgtcgcctaatctatacgagt

SEQ ID NO: 337529 - DNA, 1206 bp, Cannabis indica
tgtaattgaatgctcccaaaaattttaaacatccatgtataacgacacgtaacatagatataacagcagtttgttcatccatcccatcgtagcacatatattcgcagaacctacttcactatggtttaatatttgaagatattcaaaccctactaatcattaataattaatttataaaagatcatttttctacattattttataacaattaaatgagtaccaattaaattttatagcacattattagaatttaagcattacttaccacagcttcccgtacgttcaccattccactccgaccacttcgatgtctggattggattttcgaggaacgttcacgttgcaccttactcaattcctacaatgccaaaaaaatacattagatacatgtacttgtatttaagagtttatcttagtacaaatataattagcgtacctgaaattcaggagttagtcgactttcaacaaaagtgcaccaatcagcatggtcgatttcgggatgcttttcagggacttgtgtcagtcgtcccaaatccttctcttccacagcgggcattatgatgtcttttgtcatcctattcttgaagtctttcattaacttcccagctaggatgagacaatcatgtttgaaggaatccggcacaatgaaccccgtctagtttgaaggaaaacaaacacggttagagtgaacatttgaattaataaaaaaacaaatcaaaattctaacaaataactgcttacttgtatatctttccaaactttatttttcagagttgggttgacttctttccaatttttataggacaaccctatcgtctgccggcatctgactcctaaagttgatacgagcttggcatagcttttgccgcagtattgtcctttatcattaacctcgagggccaatcgtttgccttgatccattagtttggatatttaattcatttgtgtaggccctcgtgtaggtattactgttggacactctgcctctgggtctgaattagatcctgaacccgagttggccatatctacaaataaaatttaaagttagctatatatataacaagtaatgtatacgaaatattaaattcataaacaaattcttaagtattcagcataaacaaacacaatataaagtaagctatatatcaagttaccaattagacacgttttcttttctttttttgtttatgtttgcctgaatcacaa

SEQ ID NO: 337530 - DNA, 680 bp, Cannabis indica
cttttgactgatgtgactcttcacagtgtagccgtcaatagacttaaatgatcattacttcatagctgcagattgggggttgtgccgtcagactttattgcgtgtagcagtcccaacacgtttcctcccatggcattaaatgcgacttgattgctcaggggaagcctgacacctcgcggagatgccttagtattacttgggcttccgggagcgtatggggctccctatgtcttctccgggaggcatgtcccggatgctgccttattacataaagacttagcaaataattcaaatattaagctgtttgatccacgtgtctttatccggttggtccacgtatattgggtaaaatcagagacaacagttataattctaatttttgtatatcgttgttattattattattttatatttttttttgcaagaaatacctagttatttagagtgtcaaaaatagttaaaaaaatatagttttctatgcgtgtagtaaaaatagacacgcatgtaacggagtacttaagtactcgtatgtaaattattttaaaaaaattgcaaaatattataaatagatacagtatgcttcgtaaatacatttaattccaagtaaagatttttccagtatttttatatattaaaagtgtctatctaacggcaatttttggtttaacgattcttggttt

SEQ ID NO: 337531 - DNA, 779 bp, Cannabis indica
tgtggccttgcatcaacctcaatgcatctctcaaattttgtattttagtatcatccccaaccagcctttaagtatttaaggtggatgggattctagttccaggagtagtgtgctcaactgccatactagtgtttccagtttcttgcatgcctggggtgaacccagccagagaggaagtcactccatagcccactattggtggccgagtattaacctgtccaggggccatcttaggtggatctcttggattttcaggtgtctgcatgctcatatttgtcaccattggatcgactatatcagtttgattcccctttcgagtttgcacgaccatcttgtgtcctgtaaaagacttgagacaaaaaaaaaaaacttgggtgtctttgctctcaataaaagaaccaaaatattgacctcacttttagccaatgatagtgagtcttcattaaagcgataagaataattaaataatagaaagtaaagatcataaagtaaagaaataccaaattttatagaggttcatcctcttgtagttggtaatagcctactcttatttttgttgtactaacttgtgagaagagtgagtaagaatgctttgatctctctcaaaagcttttacaatgacctttgagtaattcactcttagatcgagattttactcttgagtgttttctctcggaattatttcgtgtccttaaatagtgatattaaactactatttatatgaagaatggtttctcttaatctataaaaaataaaaataggaaactagtttattccat

SEQ ID NO: 337532 - DNA, 702 bp, Cannabis indica
caataaacaagaacataaatgtgataagggttcggatgaatttataaatcaaataaataagtaaatgataacatgaaccaaatgacacacaaataagtgacgaaaatacttctgtttctttattgatattgaataatagagattacattgaaattgagttttatttagggcataaaacccaacacatgtatcataccaccatcctttcactttcccttgcagggaattcacctcactaagagtagcaatgatatcctcctcgatagcatttactttgggtcccttaaagtcttttctatgcttacaatccttagcatatttccaagtttgccacacacaaaacatggaccttttccacctttgaattggtttggtttagactttggacccaaggtattaccctttttggtctttcacttgttcttataaggaactttggaagttgcatttgctttggaaatctcttcattaaacccctccacaagcttatccttacatatcgattcctcttcgattcgaatatgtttttggattccttccaaagagtaatcctcatttttatgaaggattctcttcctataattcttccaagatggtggtaatttttaccactattgcaccaacttggaatgcctcgggaaattcaattttgagcactttcaatttattgacaataacttgcaactcatgaatttgaggtaa

SEQ ID NO: 337533 - DNA, 869 bp, Cannabis indica
gatcagatcccgatatgtatttgttgtgactagattataatcgagaataatgatatgtaattgttatgactcgaccgtgattaaggtgataataagggatgattattatcgtttgtgactcgagtataatcgagataatgatgagaaacgattattatcgtttgtgactcgattatgatcgagggaaggcacgattattaccgttattgtgaataaagaaagatacggtcattaccgttatgagtaattactcctgaaactgcggataggttttttacttatcgttcactgtatcacgcaatgatagtgacatacgtagctcgtggttaacgagtggtagaggtactttatgaagtacccagattgtgtgattacaatattatgaaattgatgaagcatgttattatgtgatgagtgataatcaaatatgttttgttatagtgtgactatacgaattttatactgcttatgaatttagtcacttttcttacagagtctcagtgactaacaggaggtaagaatacatgttataggaatgtaagattagagtgctttatgaagcactgagattatatggttatggtaatatatgaattagtgtgctttatgaagcactgaaagtgagtgtttataatgatgtatgattagggtgccttatgaaacactgagattgttgattatgaacagcaataaatattctttattatgtaataagtgtgctcgcataaacattaagttgtatatgtacattgaatatgtatgacctattggtatgaatactatattgtaatgaaatctgctagcactttccatgatgtctaattagtagcttttcttgctgagtcattgtgactcacgggtgctatgtg

SEQ ID NO: 337534 - DNA, 655 bp, Cannabis indica
tatatatatatatatatcatttggagcaaactttttgaagttgtaatgcaaaaagaacaaatattctagcaacatttttaattataagaattattgttagcaatttatgttttctgtgtaatatagattgacatattttactgtttaatttggacagtcacttatactataggaaacaatttttggcacaatcgccacattagcaattccttttagtattatggacagttttgtactgtcggttatattataattaacggtgcaaaactaaaaatttcaagttttatagtggcaattttcttcaatgttgttgttgcaaaaattatgctaggtaattgtagctaaatactaatcaattaaattgttatatttatttaacaatcgaatagataaattttaaaactgaataaaccaaacaaaattaaagaaaataaacaaataaaaagtttaacaatagatgtgatgacagtttataaattactttaattacctaatttttaatactaattaatcattcttcttattcctttgtgatgacagtttataaattaattcaaactcttttcaaatcataaaggttctaaatcgcatgtcaactatgtgacagtcagtagtcccgtgatccgtaaggggaaataccgggtaagctgtgcaa

SEQ ID NO: 337535 - DNA, 725 bp, Cannabis indica
ataggcactctgagtcaatcatgaacatctacgagtaatgctctttaacttgagtataactcaactaaaagagcgaggaacaaactgtagtggccaaaaattagtttaagcccaacgatcgaagtacttcccacttataagtcagaaacaaggaacccgtaagcccaatggctcacatgggccatgcccaatccatgccttttgggtcataccatattcgaatgtccaacccacaataaaacttgatcttaaagtataatgttaggattgacacgtggagaaagaagaatgttaagttttccaactaacccacaaaaatagcgatctttcctagcatagcggaacaagaatatcaaccctctaagtgatacgctaatgtgaggatgctcatccaacaatgaaccgaaaagataacgctcatctctgaagaagtggaggaagaccgtttctctagggatggaccaagtttcaagaggtagtcgttttcttaagataataaatagaccttcacagggacagaggtggaggatgaaaaagatatacgaatattcattctctttctatagatttatgactaaacttatcatttctctactatctgacgtactcttctcatttcggcgagcaaggtttgaccgtccatcatcgcataaccatagacagaggaagtatttatctacatttcttattttcttttctacttcgcactataaatttactgactt

SEQ ID NO: 337536 - DNA, 617 bp, Cannabis indica
tgagaacattcttgagaaaagcttaaccctgaaaaattccttgaacaccccaagcatagacattaacaaaaaatcacaatgtaatgaaaagatgaaaagtcatctcttaaaagataccatgaaaagttaactccctattgctagaactagagaagatgcaaacccccaattatgagaatattcttcagacaagctgaacctgaaattcgttgaacaccccaagcaaagaagaacaaaaaatcgatgtagtgaaagaaaaaaaagtcgacttttaaaagatattattacaagttaactcccttttgttgggactggagaagatgcaaacattaattatgagaatattcttacagaaaaggtgaaacctgaaaacaccccaagcaaagacatgaacaaaaaaccacaacgtagtgaaagagataaaacaattgtttattaaagatactatgcaaagttaactcctttgttgggactggagaagatgcaaatactaattatgagaaaattcttgagaaaagcttaaaccctgaaaatttgttgaacatccaaccaagacatgaacgaaaaatcacaatgtaataaaaataaaaaactcgtactactaaaaagcaactatg

SEQ ID NO: 337537 - DNA, 873 bp, Cannabis indica
agtacaaggagaaatcactggttttgtggactcagattttgcagcaaacctagacactagaaggagcctaacaggctttgtgttcactgctcttgggggctgcatcagctggaaatctaacctacaaaaactagtagccttgtcatcgacagaagctgaatacatggatgctacagaagccatcaaggaggctatatggcttaagggattgacagaggagttagatttcatatccacagtttattgtgacaatcaaagtgctttacatctcatgaaaaatccaatgtttcatgagaggtcaaagcacattgatatcaagttacacttcataagggatattgtgtcatccaagaaggtgcaagtgaagaaaataagcacacatgataaccctgcagatattttcactaaaagtgtaactagagacaagtttaggcactgtctaaacttgttgagcattcaggacatttaatgtcctcacttatttctttggatcagagattaagtgagtctaatcaggtggaattgttgggattaaactcacttaacctctcaagtcagtatgtccatctatttgcctatcagatgaatctgaagaaagctgctgcaatttataacagttggctttaataccaacttaaaggggacccaccagcaactatatataggggttcctctattctacaaagagaggtctgaggggagagttctgatctctaatctccaatgctcatactttagattcagtttagagaaagagtccaagatcatagtgagtgtgtgtggagggatgtaaaaagggagtatcactcttgaagtgatttccctcaatgtgaggcatttctttgtaattacttgctgtgttgagttgtaatc

SEQ ID NO: 337538 - DNA, 513 bp, Cannabis indica
ttttataataaaataaatgaaaaagttaaccgtttctaaatttaataaattgatcttgtatttgatgatgtagttatttttaaaagactatctatactttttttgcttaataaaaataaatagtttaactattttttattaaagtttttatattatgttttgtggtgtcgtttgaatattttctccacaaaggtgaatgtaatatgacagctacaaaaggagccgtcataacattacctatttaggaaaaaatattttagtttaaaaaattatttttaactcgaacacttagcaatatataaagtagaatttacgtggggtatggattttttaaaccttttatgataaatatggcataattgattatggacactttatatggcttttttatagtttaaccatagtttatgggattttaaagcccataccgttggaatttatttgtcaaaagcccatagtatgtgtattgtagtttatttaggttattttagtaattttagttcagtttttttt

SEQ ID NO: 337539 - DNA, 1230 bp, Cannabis indica
ctagggtttcctgtatgacaggtgtccggagggggcctctttccagcggttaggggacccccattccctttttcttggtttagggtttggtatggggcctaactgctggaatctttactctttttacagaatcgaaaaatgtctgcttctggctcaaaatcatctaagaagagcggtaagcgcctggctaccctcgaggaggtctccctgggtcctgttgcccaggaggggtacaagtctcgggcgaccggatgggaggcggccgagcttcactccactctaacctgtccccatcagttggagaacatcgtggaggtagctggaatcaagccttccacatcagggacctaccaccggccacctcgcgacgcggagacgcccaatcataactacggcggctttggggcctggagccagacgcatttgatggccggggccatgcttcctcttcaagattattttgttaatttcttagtttttgtcggccttgcgccataccaacttattccccaagcataccgcctgctttcaggcttatttattttttattccgcccggggatggggctctccccgcccggcggaaatattgtatttttacgaacttgtttccgtccccaagaagggggacaaacttaaggacggtttttacgggttccgggcccaccctgccaatgaaggggtggtcccgtataataggcaaactcatgttaaggagtatcgccatcgttttttcttctcctccgggttccgggcagtggaccatccggagctcctcactgagtgggtcaggattcctccttacgaacggactgcacctactcaggtctttcttcggagagcccaggcctttgcctcttatgaccgggctgatcttgacgtcgggggcctggtcactacggagaactgcaggaaggcaaaactcatccttccgcaccaatccgtggaggactctaacctttcccgggttatctgtcccaacgtgagggcgccggtcgcggagaagaccttccgggatgagatcatcgccactgccgagaagaagtaccaggagtatctctaccggaaggctcaggagaaggcatactctaaggcccaggcggcttccgggaggtcacttcgcgtggggagcccggtcgagagaaggagccaggcgatcgccgggaagccccttcacattggggactcagcggagagaagggctcccaggccacagcctttggctcaggag

SEQ ID NO: 337540 - DNA, 866 bp, Cannabis indica
tagctgagatctttatgggaaaaacctattccagctgtgttgatccattgcgatagtaccgcggctattgcaaaagtacagaaccgttattacaacggtaagagacaacaaatatgtcgtaagcacagcactgttagagagtttctctcaacaggagctgttagagtggatcatgtacgcactgatgataacttagctaatcctttgacgaaaggtttagctagagagaaagtccttaaaacatcgaaaggaatgggactgttgcccttagattgatgaatcactcataatggcaacccgacctatagactggagatcccaagaaataggttcaatgggtaataacaagttatgaagtgataaaagtaagttcatgctataatgatacgaaaagagaagcatgaattcctgaagcgatttaaggctgagttaatagaaactcttaatgagatctatactccaagtggactggagtacagagctacgggagtactcttgatagtctcacctatgtgaatgtgggagtagggccgctttttatgaaattttgggcaaaatttctagagtgttcactatactgggatagacgtgcatggccattaacgcacgggcttttgactacacccttcaaaaggttgttgcgtggtataatgttagagatagagttcaagactatgggtcactctagtaatgtaacaccctaactagcataggcgtattacgtaatttttaaacatgctgtgcagctcgttgctaatcaacgaggtttatggaaaacgtgattaattaaaatttttactttttaattaaacttgtaaaataattatacaaaagactcgggatcccgattacaaaaccatttacaa

SEQ ID NO: 337541 - DNA, 950 bp, Cannabis indica
caataccaagtaaaggtgcaagaaaaaggtgatttcacaatcaacatattggaaagaacatgcagctgcagaaggttccaactagatgagataccatgctcacatgcaatagctgtatttgcaaaaagaggattaagagcttatgactatgttgccgattattacaaaacagcaacaatgaaggcaacctatgaaagaactgtacatcctctaccaaatgaaagagaatggactatacctgagagcatggaaagaatagtgtggccaccaaaatcaagaaaaccagccgggagacctagaaagaaaagaataagatcaaaaggagaaccaaaagttgtcttgaaatgtacaaggtgcggaaaagttggccacaaccgaagaacgtgcaataacccacagctttacaaaccaccaaaacagaataacaaaagcaacgagtcaaagaagaatgaatgaacagctacaatagaaatagatattcattgacagttttataaaaactggtttctcagcattgaataaagtagaacattatataattttagtgattgacagtttctcaacattgaatagagttgaactgaatataattttttcaaaaggatacacacaacatttttacacttttgaaattttatctgtttacataatcattgttttaaagattttttcttaatatcatagattatttcaaaaaggtacatgaaaaattatatattttataaaaacaagaaaccagttactaataaataaaaacaattgccacttaccaataaataaaaacacatactaccattggtatcaccgacagaaaaaaacaaaacaaaaacaaaaatcagttaacagtacattcaaataaaaaaaacgaaattaatagtaaaaaagaaaccatttacaaaaaaaaaaaaaaaaaaaattaaagccatcaactaaaaacttataatacaaag

SEQ ID NO: 337542 - DNA, 1776 bp, Cannabis indica
tgactcttgcaagaacggactactgcttttcctccgtcgctatcactccacattataccgccgatcaacaccaacccccagctctcgactttcatgtaagtttgctggatactttgtgtctttactgtttatctgcatgctaggataaaactttttggttaagtgttggatttctgggagatagctttggctaagtctattatgcgatgtataggatctcctttatttgtgttcgttatgttccttccttccattttgcaaccgacccctctgtcgaaagattatttatggtatagggcaatttttcgttcccacattctgtgtttttcactttccctctactttcgctgcttttgagatttttgcaactgatgtttgctaaggaaagtattttgggtttccatctttggcaaacatccggatggggcctcttcccagcggttaggggacccccattccctcttttaactttagggtttggttctggattctttctttttttagaaccaaaatgtctactcctgcttctggaaccaaatcttctcggaagggggcagttactctggccaccctggaggaagtcatgaagggcccagttgcccaggagaactatacctgccgctccaacggctgggaggcgaatgagcttcgctccaccatgacctacgcccatcagttggagaaaattgtgattgtggctggcatcaagccatccgcgtctagggtcttccatcgcttgccttgggacgaagagacgcccaatcacaactacgggggttttggagcttggagccagacccatcttatgtccggagccatgcttccccttcatgactactttataaatttccttgtttttgttggccttgcgccttaccaacttattcctcaagcttactgcctgatctcaggcctgtttattttttatgtagcccgtggctgggcttcacctagcccggctgagattttatatttttatgaacttgtatcagtccccaagaagggggataagtttaaagacagttttttcactctccgggccaatcctactaatgagggtccggtcccttatagtttttagaaaaatgttaaggagtaccgccaccgcttcttcttctcttccaacttccaaaccgttgatcgctcagagcttctcacggagtgggtcaggatccctccgctgcatcgcactgctcctacccagcttttcctccagcatgctaaggttttctccacttatgataaaaatggtcttaatgtgggggacttggtcacaacggagaactgtcggaaggccaagctcatctcggggagccaatccgtggatgacttcaaactctctaaggtcatgtgccccaacattcggaccccgaacgctgaaaaggcactccgggaggacatcattgcctcgacggaggaccggtatcaaaagtacctctttaggagtaaacaggagttagcctatatcaaggcccaagctgttgctgggaggaccctccagatagaagcggggaaagaacgggcgccatctcggcctaagatgcttctcctggtccccaacactggggctcctgatgccagcacatccgaacctggtaagtctcccttaacggtccatcatgttccttctgctcaagattatttccggtgtaggcctatagaatttgacgaatgtctccttaaatttagaatgccccttactcggtggggtgatcatgccaagggcttttatttttccaacttaggtcatttctaggccagtcccggatggggtcc

SEQ ID NO: 337543 - DNA, 863 bp, Cannabis indica
agatcctggtaaaataaattccaacaagggtttcctaagcatttttctacagggcagtaaaatttgcatttgatatgtaaacatgcaaagataagcataaaggaaatcagaaacttactcaagattcaagtgtctgggttcaagcaacgtcaatccaaccagcagttgtatgaaggcacttcggcaactttgaagctacaaaactttcttttcgttctggagcttacttagcaaagaagggtgatgaaatgagtttatgtgccaatactgtgggtatttataggcaagtcacgaaaagaggtaactgtcttaaagaaacctcagacgcctcaacttcccgcctcaaaaacaaatatgggaaatcaaaagtaattgagtgcaactgtcagctgtggagagagaaaattgcatttcgaaatattaattgtcagagcattcattagccgaaaaccgaagggacacccagtcagcttcacatcgagtctcaaatggtcacgctcgacacgtgtccccatccaaaggcagaagaagctcggaagaagtctacacgcaaccttaggggtcccgtacagacttggggggcaaatgttatcctaaattttgcactctgacgtggcatcacgagaatggggacacgtggagtccacttggaacatctactcgggaagataggccgtgcagagcaatcaacacttggcgaatatagcttttgcatcatgagtcatcagcttaatccctataacttagggatcaatttacgtggatacgacatacacacgatcccactatcagtgtactcagcctcaataccacgatccttgcattcagcattgatcccacgatctttctgtttatgcgcattg

SEQ ID NO: 337544 - DNA, 685 bp, Cannabis indica
gcattgcgtctgtctgttttccattctactttttttcaagcttcatgaactttttttgccctaactcaagaaaaactttctgtcttcttgagcttagacttttctctgaacatgatcgttctttaatctgttgggtactcctggtcggcacatttgcttgttttttcacttgatactccatccaacactcatcttgcgtgttgtcttttgtagatgaacccaggtgagtcttggaagcccgagcatcaaattgaccaagagctacttcaacttctacacgaagtccatcctcgtctttgtgctactccttcttcagatgaaggatattcatctgattccgtacccagccatagaatgatggctcgtactaagaagactacgcgtctggctaacgcttctaacccctaggctactcggctggccactctacccgaccccaaacaggatttgccggtcccaatggaggaggaccgtgaggggggacgctgacgtccaagaagttggggagctggacgaggcgcgtccggtcagctctcccactgctgagggagaggaagagattgaaccccctaactatggggagtacaatgaggttgggcaaccagttgatgctgacggggaacgtcctggttgcgggcgttgattacgtcaccgaggagattgctgaggcggttcctcactagga

SEQ ID NO: 337545 - DNA, 923 bp, Cannabis indica
atcgcatgattataactcgtattatgtgagacaagagagtaactcgcatatatcgaactatgtgcgagtatcctctccatgtccttgtataaacctggagaccgactttctataaatgccagttgatcctaagaacccaacaaccttgataaactaatatagactcgcatgtctaggttctgtcagctcgtcatgcgatgtccacaaaggcgactatctaagaacgcagacatcctaaacgtaatgatagatctgcgagtttaccatcggaatatgaacagtcaactcgcagattcgaaagacgcatacgttgatgagcttagtaactgccgttcatttattaatgttaacgttatttagtttaattattgtaattcaatgtgtaaaaatggattgacaatgaatgcaatccttgtataactgatcagacacctgctttgtatataaaggggtgatccaccgtgaaatggaacctacggaactcttgctacagtggactaagcagaccgtgatctgactgaaccactataatcctctgtcttaattgttatttccagttttctgttaagcatttctcattcccagtttgagtactcgccactctaggttgaatactcgcagttgttcttcatatagttttctttctgttattaataatatcatatataattggtgtcgcgaaatttgctcgacaacaattagagatatgattgtggtcacataaatcatgattggtgggcccacgctttacaaaggtagtcctcaaatccattctctggaagccatctattatcaaaatggaagcgctacttatgaggtcgtaggctatcctcatcctaatgaagggaaatggttagaacgcggtggtcagatccaaaaaagtctccatggaggagatgggccttgggaaaagaagaaaccca

SEQ ID NO: 337546 - DNA, 523 bp, Cannabis indica
atctcaagagaagagaaaaaaaaaagaaataaaaaattaaatactattttaatctgagtattacatttcctcctttctctggtgccctaattaaattttaaaatgtttgaaggttgttgatcaactcgtgaaagtcaaaagtcaacttgttcatgacataatttgaagtaaagggcaaaaagctagagtaaaactattgaagatcaaactcacttgagtttcctaatcaatgatagctccatgattctcagcttcctagaagtaactagccattaggagtaggtgatcacacacattctgatgaggtttcatctatgtatttatgaagttcttagtcgcctcaaaatgagcttgatccgatgccattgcaaacagttcaaaaactggttcatgattttgcagtcgtgagagtgttggcaaaccttatctttaaggtatcaaccatgctagacaacatgaagcatcgagctttattgttagcattctgccaacgctcgaattttttcttgactgccttggttgc

SEQ ID NO: 337547 - DNA, 1264 bp, Cannabis indica
ctctgacgtggcatcactcgatggtgacacgtggaatcgactctgggtatctgctcgcaagacacaagctgagcagggaaactcatacattcgctcggatcaagtcctctagaccgaacagtgggaaatccgcgcagaacgccaacacttagccaattcagctttcgcatcgtgagtcattaaggaaatccttataactttgggatcaaattacaaagatatggcaagctttccaagtcccatgatgagtgtattatgtatttactatgcaatctttctacgtatatcaattgtaacgagaagggaaatacttcctctccaagcttatagctctataaatagtgattcatacacactgggcaaagggtcgaaagattttgtctaagaattcatattcagagatactgttgtaagagctctaagaaaaggaactattctccttgttcttaagtgaatacaaataacgaggattaggctattaccgaacagctcggggctgaacctctataaaattcttgtgtctttatttgctttacaatatttcgatcattttaaactacttgtcgcttataaaactagactcactgtcgttggctaaaagcgaagtcaacattcataataactgcctcattaaaaaccttgctagaaaatctaataggacaaaaactcagccaatgaaaaaagagtgcagtacgacttagccccttcttatttaggcattaatggaaatcttctaatggatgaattctaatcttgtgatctatcttcttaaatgttgatgttggcaatgactttatgaataagttagcaagattgacacttgattgaatatgttagacaccaacatgcattctcttcaaatgtctaaagaaaaatttggtgaaatgtgttttaattatatcttcttcggtataccctccttttagttgaaacgatccaagcagtagtatattcatagagaattgttggtgttgatacgtttttattgagtgtaatacatatattttctgaatatgttatgccatgatctcactccaatacattctctacttgctacataaagtgcatgtatttagcatgatttaaagttactcgtcaaaaactttatcaggaaaatccagtaggataaaacttgagccaaaggaaaaagagtgccatagatttatatatatatattcatatttatttataagttacatcgttaaaaaccttgctcctgtatgacaaaatctgaactaagagaaaaaaagtgcaacatgaatat

SEQ ID NO: 337548 - DNA, 765 bp, Cannabis indica
tgctctaaaaatcatgaggcaaggatattactagccaacattgtgagcagatgcagctagcttcgctaaaaaagatgcgacaaaagtcagcaaatagctacttatgtaaaaaggcaaccgagccaattaaattctatcactagtccctggccatttgcggtctggggcatagatttaattggcaaattgcgaaaaggaaaaggaggggtaaaatatgccgcagtcattgtcgattacttcacaaaatgggctgaagccaagcctcttgcgactttaatagccaccaaatcgcacgagtttgtctacaacgccatcatttgtaggtttggcatcccttataaattaatttctgacaatggtaaacaattcgattgtaaggagatgcaccaactatgcgatgaagtggggattcgaaaagctttttcagcgatcacatatcctcaaagtaatgggcaaacagaagcagttaacaagatcattaagcataccatcaaagggaagctcgaagaataaaagggtacatggccagagaaacttccccaagttctatggtcgtataatacaactcctcgatccatgactggtgaaacccccttctccctttcttatgggtgtgaagtcatgatgccaatcgaaagttggagcatgatctctaaggagagatgttttcaacatcaataataatatagaaatcagttattaccactcgatcttctagaagagaagtccgatcaggcacatttgaaaaatgcagcctatcagtaa

SEQ ID NO: 337549 - DNA, 650 bp, Cannabis indica
attaaaacactcacttttgaggacaacacttagtttcaattttaaatcctcgataactgttttagcgtgtctctcattgagttttgaatatcgtggtgtagggccctttaaagcatcgtgctgtatttccactcaggctgaccgacacacttgagcacggaacgaggtaagatagcataataatatatatgtgaatgtttgcttgtgttaaatttttacactactaacactaacagttatataatattaagagtgttagtacagtgtaggatatcagggtggttacagtgttaccaacacgagtacctgggagtacgtcatgcatgtgctacaacacttactaacttccgggagtacaataatggctctaccaaaacaagtacagagttgatactttagtgcatttggtacagtggtcgtacttcccttgagaacgttgttaatcatttgttgagctcggtttttggagctcaggacagcttaggcataaagccaatataagtattgtttatatatatgttatgcatatcctactgagtctgttgactcaccagtttgctacctagtgtaggtaaaggaaaagctaagttggaggaatagtgagatggagctcggtagtgattgtacatttcgcggcagtgcaaccttga

SEQ ID NO: 337550 - DNA, 1709 bp, Cannabis indica
tttaggaacaactttctttgaagaacaatagaaacattctcccccacacttattttctcatctccattcaactttttttcatttggacacaactcctaaaaaatgttagtacaatgaggctcttcattgattacctcaagacatggaatttttacctcaattttctaaagagtttcaggaatctccttgatggggctcctctttcttatattttttcaatctagttggaaaaggtgaaggagtgacataagttggtacaattggtttttatggctttttcagtgatagtggaccaactaaagtaggagattcaaactttggtaaagattactcttcaagggataaattgttgactcctttagatggaatcaactcattaacatctttgcttggtggtaattcaagctgtgtagcactttggatagtgatgccattgatattcttttggttactctctatttgtgtaggtaaagtatttgaattttgaatttcatatccactcatagatgttttcattggctctgcaagattctctaacttttgtaaagatttttgggtgttctacacaagtttgtgaaagctttgctaaattgcaagttattagcttctaacatttcaatcagcttagtagtagttggcttttcactatatggtgcaacatgagtaggttgttgaaattgtgaatgattctgttccatctaaatagtagaagcccccaaagtgttgagcagatcattaagaaaatgatcttgatcttgtggtgctataggaggatagtaagaagttggttgaatgtattgattgatcccactacaggaagtgctagaataatctccccattgttgattgtatgggtaagtatcgtagtaggaattatattgatacacttgtggcgagatataatatgaatcacagtattgttgattgtccatcatcatgtttttaaaggaagatccaaaagttaaaaccacaactagaagaacaagttagtaaagcaaaaattaaatatgaataataaaataaaacaatagtccccagcatcagcgcaaaaaatttgatatgtgtcgtaagccacaacaaatttactaatatttatttccaatacctccaattattttagtataactgtaagtaaggttcaatcccacgaagactatgtttatttaattactcaaaaattaatgacaaaagttagaaaaaggggttttgagaagtataatagcataaataaaaataaaaacaaattaaaagcgagactacaatatgagaaactagttaaaggttattcgctactctcaacaatcattcttaattcctattaatgaatgtaatttcaatttccaatcaaactattaatctcgtagataaagctgaagcagtcaattatctcaatctccctattacatttaatcaaggcgaagcacccaataattaactcttttacctaagcagtaaatccacgaaacatgtaatttatttaacgtaaattatgctttaagatttatggagatagactaatctaggcaacaaattaatgaagcatttaattcatttaatctaggttctattcttcatcacaattaaaaataccttggataaaattaaaaattgcaatttatcacaaacacttagaatcctagactattaggtgaatagtaatcctaagatgatgctagattaaagtaaaacctaatttagtggccatctaa

SEQ ID NO: 337551 - DNA, 673 bp, Cannabis indica
ccccctcaagcttggaattggtagagggaccaatgccaagcttgttcctaaacatagcaaatcgggcagtggaagtggccttcgttaagccatcagctatttgatcagctgcaggaacatgctgaatacaaaccagtttctgagtgagcttttctcgaacaaagtacaaatccagttctatatgcttagtccgagcatgaagaacaggattagcagttaaaagtatggtgctcaagttatcacaccagataacaggggtgcgaggaagctgaatgtgaagttcagtaaacagagagtgcatccatgtaagttcagagacaacttgagcaagacttctatattcagcttcggtactcgagcgagaaactgtatgttgcttcttacactgccatgccaccagatttgaaccaaagaagatggagaaaccagaagtcgatcttcgatcgtcaggatcactggcccagtcagcgtcacaaaaagcagtgacatcaagttcagttggtttctgcagagtgagaccatgagaaacagtaccactcaagtatctaagaattctcttcactgcattccagtgatgatgaagaggattagccataaattgacacaccttgttgacactatatgaaatctctggtctagtaatagtaaggtattggagagctccaacaataga

SEQ ID NO: 337552 - DNA, 2210 bp, Cannabis indica
gcacctatacctgtacaaagcatttggtaaagataaaacaggcacaattgcacgatgattaaaaacagagaatgaaatccattaaagataacaaaagcacgtaatatcggggttaaaattttcctgggcagcccgttgtctgtaaaatgaaaaataattccaagtttgaagaccgcttggcgggtcataatgtcttaaaaaaaggccttatggctgaataagatatataaaaaaaagaaggataaaagaagaagtatttaaacagctggagtcccagcctctcggttcggatcttccgggccggtaggagctggaggatttgttgttttaacgggaggtacatcagcattttgatcggaggtagaagcagccgcctcagtgtcaccataaaccacttgggaagcacagaactcgagatacatatctttggcttcaccaaagtaatcaaagtttgcctaagggttaaccttccagaagtcataaaagagctcgagaccggctgtctctaaggcatggactttctctcccagcctcgtcacctcagccgtaagctcctcctccttagacttcttctcctcgtccagccgacgaaggaccgctcgaagggatgtcctttcatcttgaaggttgttcacttctgcagataaggtctcgatggtctcttcaagttggtcagaagcctcgagatccttagtcaactcggttattttcttctgagcagtaaaaagcttactgttcacttcacccagctccatccgaacaactccaagtttgaccctggcgtcatcagcgtccttcctggccaagtccacctccgccctcatggtgttggacatagctgcattcttggaagcagcagacttagcccaggagtatgtataagccaacttcagaccagcctgtgcagaggaaaaactttagaatccgagccaaataaagaggattaacggaaactgtcaagaaaagcttacccttgtcaattccttcaagaatcctcccatcagcagctccaaagaagagtcgttgtcagcactagccaattgctcactaaccttacgaacaaaccggttaatatagtgggcgagcatctccttccctttcttggcctctggaagcactggcaaatgaggagtaggagcccgcatttgctcagacccacccttgatcagctcggctccaccttttggttgcttaggtctaacttcgtcctcgagaatccttgtactgagcaattttcggagtggaggggttcgcaacagttagttcctcaaaaatgtcgataacctccccggtaggcgccttttccttggaaggggtcccctcaccgcctctggatttcttggccggaggagatccgctcgagcctcctctaactctcttctttagagcataaagaatcttctgagacatgtgtgcatggaacaaaaaccacatggttagagaaaacagacatcagaagaataaagcataatagtccagaagcttaaaaacaagacggagtagtctgcagaacgattgcccgagcaagactcgaaagttcgtcatcacctgacaagcctcttatctcagacataacagctttcccttttccgagcacgggagaaggcgagcaggcaaactgggctccctaatgccaattgcatgttcaataggcctggattgtggcagaagcttcttcctccttttgagcggagtcaactgctcctcctatgcctcatcttcaagattcaagggctcctgagcatattgcttggcccttgcacctcccttcaacttagcctcgcgctttagttgaatcagctcatcctcctgatgagctcactcagcccgtcccgcaccagatttcctcttcctccccttcactggcttaggaatgaaatcctttggatatatcccgtacttcacaaagttgtcctcgaaggtcaactggatgatatttcggtcatcccccagcagctgagcaaactcttgagctctatccctaagagtaagagtgaggggagggtggttatatgttgggatctgttggaaccgagtgtgggtgatgcccgcgccatcaaccataaagtactcatcaacaaaatgcccaattttgctgatgcccgaatccccggtgcccgtcaaccacttgaagtctggttgagagaaatagaagtaccccgacctgccttgcttaagggtggacttcaaataaaaaaaccagctaacct

SEQ ID NO: 337553 - DNA, 542 bp, Cannabis indica
ctgacatctgtattttggagtatgttgtttaaaaacgggatcccgacttgtatatatatttatgtaaagattacaaagtttaatatttaatataaaagttttaatttgatacgattttcgagaaagttctttgattagcaaagatagcactataattgaaaaatcactgtacttagcattagggcattacacctgacccgaacccaggacccgccccgagacccgaccattaagctcaactaagatcccgggtcgggtcaggggttggtattgggtcaatttatggtaaaaagagtatgattttacacaatctattatataagtcaataccaaacataatattgtactacatattaattaacaattttgcccctgaactttcgacactacctcatcatgtctctttaaatctatggcttgttaaaaattacccctggactttttcatttacaaaaatttagtccttatgttagattctatctcactatcccgtttaaatgctgacatgtctttgtaaattgacaatattacctctaaatttt

SEQ ID NO: 337554 - DNA, 645 bp, Cannabis indica
caacactctttgatagcgacaataagtatggtttcggaattgttgcccgaaaccatcttggtcaccttgttgcagcacaggccggttgccatggcggaagatatggagctgaagtcattgaagccatgaggattaaagaagctctcagttgggtaaagactaataattggcaacatgttcaaattgagacggacagtcttgtttcagtacaagctattcgaagcaaccaagcaatgaggcccactttcggccttttaatcaaagactgccaacttttgttatctactcttccaaatattaatttatttttcattagacgatcagcaaaccgagtagcacattatgttgctagatattctcgatatcaatctaatcgtagcatttctgatatttttaattctggtgaactcttacatcctttgtattcagaatgctaaattattcaatgaagttgatatttcatctcaaaaagaaaattgtaattttaaaaatcactataaaaaaacatatatattttagaatgaaaatgaaaaaccgtgtttttgcaaatgtcagttgtatataagaaaatataaaaactgtaagcgtctgcagcagcagaaagtaattctgctacaacaaaactgaacaggcagaatataaaat

SEQ ID NO: 337555 - DNA, 541 bp, Cannabis indica
taaaagataacaagcgtaaaaatgttccaaacacgattaaaactcaattaaaaatatactaaactttatctaaaatgaatactaaaaataacctaacatctgtcaagtatttggaacggttgttcctcataagataaatctggctgtagttctaatgcttcataactcaagatatgggacgaatctgagacatacttctgaagcattgaaacatggaacacattatgtacatctgccagcgctgggggcatagccaacctgtacgctacttgccctatcctcttgaggatttcaaaaggtccaatgaacctcgggctaagcctccctttcttaccaaagctataatgcctttcattggcaatattaggagaaataccatgtccctgttttgaaaatcaataccccgacgctttgggtctggataactcttctgtctgctctgattcgcgagcattcacgctctgattttatcaactgcctcacttgtcctctgaacagcctcgggacccaagaactttttttcacccacttcatcccagtg

SEQ ID NO: 337556 - DNA, 749 bp, Cannabis indica
tcaactagagaagccgaattgctcgatgtaattccggtagacgtattggctcacccaactataaatcaagaagtgatcatggaaatagataccattcaagaagtcacctggatgactccaatagtcgcatacctggaaaagggtgttttacctgatgacaaggtggaagcaagaaagctgcgacagcgagccgcccgatatgtcatgtacgataaaaggttatatcgcagaagttttagtcaaccgctactcaaatgcatcgacggtgaagattgcgactacatactacgtgaggtacatgggggaatttgtggcaatcatacagggggtaactcccttgcattaaaaatcatgcgacaagggtattactggccaaccttgcgacaggatgctttcgcttttgcgaagaaatgcgacaagtgtcagcgaatagccacatatacccaccaacctccgagtaacctacattctatcacaagtccatggcctttcgcagtatgggggatcgacttaataggcgagctacccaaaggaaaaggcggagtcaaatatgcagtagtcgcagtagactattttacaaaatgggccgaagccaaagcactcgcaaccattacagcgactaagttgcgcgagtttgtctacaactccataatttgtcgatttggtatcccttacaaactcatctcagacaatggaaagcagtttgattgtaaagagatgcgacaattatgtgacgatctgggaattaa

SEQ ID NO: 337557 - DNA, 761 bp, Cannabis indica
catttttttgcttaattataaacaagctctactgacatttttttgcttaatgcttgtaggacatatttattatagcgaaatagtatccttccataattgattttgcgaagattttctctcttctttctcctcgtcaacaagcttaataagtgttacaagccagtaatgctcctccttctcgactgcatggagaagcttttgaatggtgacatgttgttccttttgaatgtcgatcacttctttcaaatttcgctttgggatgcatcgcgattcaaaaagttggttaagcttaatccttctaactcgtaggtcacttaagctttgattaatttcttgcctctttttggagaacttttctgttatagatatttcttcatccttacgagatgtgtcgtcccgtactaaatcaattaccttattcaagaagaaggtagaccattatcatcagccgtaactatttctttttggccatttgcgtcttcctcttgtgagttgtcttccaattttctcttaccttttcggtcctggactggattctcttgatcgatttctacttttatttatttgatgttgctcaccacttcaatctgccgattttcagccattttttttttgattggtttgtaagatgagtgtgacaatatagaataaactttgcatatatagatgacaagcaaccttgattcctgtattctttaaatactcagcttatgaataaaaaaataatgaacacggttatatatatatgagataaataatta

SEQ ID NO: 337558 - DNA, 682 bp, Cannabis indica
aattttgagaaaataaaaaaggttaatgaaataaaatgtagagtgccacctaacctctctaatgctttcctttatatatagatatagatagagttacattttgttgttaaaccgaatgagagattgcatataattattattaaatataaaaaagaagtgatgcatacaaattcttgtcatactataggtttactttcatgattgaagatgaggctgaaaaggcgacaagtctccttaaagggcaattgggggcatggagaatcagcaaatcttccctgagaaattaaaattggggtggtaagaataaatcttaatagtgttcagaatgacaccaaaactgttgtgaacaagcttcatcatcatcatatatggtagacatacatactagccagccatcatcaattttctaatattgttagttagcaactaactagtacttccttttcaaaaaaaactaactagtacttgtggcctttgcttttggaaacactttgcaacactcattttcaagcttttatattcccttttcttgtcaagactttttcatcttttcccatcttgttttgtgtttttaaacatctaattgatgtatcacttacaatcgttcaattggtgttatttcactactacaaaacaccctttagaggcggtttttaagccctttaggcgtcggttttcgcga

SEQ ID NO: 337559 - DNA, 814 bp, Cannabis indica
agtaactattggtgcatcagtttctctttaagaacttgaaacgcttttaaatagtcatctccaaactcgaagggtacaccattaacaagtaggctggacaatggcttagagatctttgagaagtctttaatgaatcgtcgatagaaaccagcatgtcctaggaaactccttactccttttacagaaatgggaggtggtaaattctctattgttgaaactttagccttatccacctcaattcctgctttcgaaattttgtgcccaagaacaattccttctgtaaccataaagtggcacttctcccagtttagcaccaagttagacttctcgcacctagttagcactttttccaaattttccaaacaatgatcgaaggaggaaccaaagaccaagaaatcatccataaaaatttcaatacaggattcaatcaaatctgaaaagatagccatcatacacctttgaaaagtagcaggggcattacacaaaccgaatggcattcttctgaaagcaaaggtaccgtagggacatgtgaaagtcgtcttctcctgatcttcaggtgctatagctatctggtggtatccagagtagccatcaagaaagcagtaatattcttgccccgccaatctgtctagcatttgatcaatgaagggcaaaagaaagtgatcttttcgtgttgctttgttgagtttctttaatcgatgcagatcctccaaccagtgactgttcttgtaggaatcaactcattcttttcattcttgatcacagtcattccacctttctttggaaccacttgcaccgggctaacccacttact

SEQ ID NO: 337560 - DNA, 1467 bp, Cannabis indica
aaaagatttaactattagggtctgtttggtacgcatgactggattggataacacatattaatttgtctaatccagtggttgggaatgttagaagtctggataactattacaactaatctaatatgtctggtattatttatcccatctagcagggtgcggtaaataattccatctaatcttgtccagtccaatctaatcgtacgtacaaaactgacccttaaatgttaagtgtattttttaaaattgtaaaaataaaatataagtggataaggaaaaaaatgatttggagtatgaatctgttttggagcagagcataaaaaattaaactagcatggtggttagtcaatcttatcttagtgaaaataaactcagatattgattgttcatggaaaagagagcagaaaaagtcagtattgatttagtaagaaacagagagaaagagagagttttcaaacacagtaaataattacagattaccaatcgtaattgtgatttggtgtaatgttttgacctttgaaggtctataataaaaacgagcaatctgaggcgagctcgaagaggatgtacccaacaataattttttggggaacctctataaaattggtgcactccttcctttattttcttttcttcatttcaaataattgcttgcggtgctgtatttttctaggtatttttatgttggtgttcttcgtgttcttcagagaagaaccacggagaagaaggttcggtttaaaggggtttgttcgaactgggattgggttgttttttggatttaatttctggtttttctgggctgatattggtgctgatgtcttcgtgttcttcagagttgaacatcgaagacgagggcatctctagggttttctgctagggtttttaaagtggaggctgtctgtttgaatgaaaagaaacttatatatgtctaaaggtgttttagggtttctgaataataaataaacgacttgtagctcatagaagggagctgtcgttttttttggggttataatatcagaaagtcaaaagctttctttgactgggtaaattgtcagatttgaccttggggatttgattaatcactttgttgtgtgtagggcaaagaaagaataaaattcctacaatatcactggcttcttatccaccacactttcatctactgctcccactgtaggcacttctatctcagaaagattcatgttcagtggcaagccttcagcatttgggagaaggtcctcttgcatggctgacaagttatgggacattggtttcaattttcagagaaaaaggggtagttttggatgtgagagataacaatttttttagtagaaagtgtttctgtaggagattaagcaaatcacaagctatatttatacagttttacttgtgactaagacaatgtaaacagattaatacaatttttttaacttgttcaccttttggattaaaggtcctccattggctgttttt

SEQ ID NO: 337561 - DNA, 933 bp, Cannabis indica
tgattgcaacaaaataatatgactcattccgccctctaaccctcgttcctttctatcgcagagtattatcaagatatgagcctagatctctttctctccttcaggttggttaccaccgtcttcggcactatgattgagtacttgacttgctatgtgtgggcatgactctataactattggccgaataggtgaagaacaataaaggagggttctgtatagaaggtgtctctcatctactagttgacagagaataaaaattaagtttggtttggttgaagtcaatagttggatgagatgagagcatcatgttccttttatagtattttaactagcgcttaggtttgaattatatggattaaaaaagaataaaatattgggcaaaaatcaccacaaatggtcggtcacttaagggaccattctccagttacaattttggcactttatttcaaccacttattcttctttcaataataccatattttccaattcaatcctatgaatgccaaaattatttatttaataattataattgattatcaaataaaattattatttatattatatattaattacgtcatacaaagtatcttcattaataaattaaccctaaaacttcttttcttcacaattaagcccttgcttattgaaaattcataaataagacacagtctaattttagaattataattgattaattaaaactaattaactgagtctgctagcaatattatctcaactagtgaggggaccataggcctatataatcgagcttccaacaagtagatctagaatttaccaagtaaattctctaacttattaatttctccttacgctactttagattcagaattgcactctcaattatataggatgctctatatgtaacaagatatagatacattatgattatccattgttacaatcctaatagtc

SEQ ID NO: 337562 - DNA, 750 bp, Cannabis indica
gaaaactcgatcaggggaaggtactttacccatgatccctcaaagtcaagcacacatgcccgtagcatgtcctctaaaatctgaatggtcctctcggattgcccatccgtctgaggatgaaaagctgtgctgaactttaactgagttcccatagctcgatgcagactttcccagaatcttgatgtaaacttcggatctctatccgacacaatggactttgggacaccatgcagacgaacaatttctctgacatacaactcagcatactggtcaatggagaaattcgtccgaacaggtaaaaagtgagcagactttgtaaacctgtccactatgacccacacagagtcaaattgtcccgtggttctaggcatacctaccacgaagtccatagcaatatcttcccatttccattctggtatattcagtggttgcagcaaccctgcaggtcgctggtgctcagctttcacttgctgacacgtaaggcactttgcaacatattcagcgatgtcgtttttcatgcctggccaccagaacatggctttcaggtcttggtacatctttgtcgaccctggatgaactgaataaggagtcgtgtgagactcatccatgatctctttcttgatgttctcatccatgggcacacaaattcgattcccaaatctcaacattcccgtttcatctactgagaaatcactagccttcccagccaaaacctagctcgggttttatcaattccgaatcttgcttttg

SEQ ID NO: 337563 - DNA, 873 bp, Cannabis indica
ttaactgagacaggaaaattgggagcaaaaccttgtaatgctccaatgaatccagctgtgcatcttacacgtgatgggaaaccatttgaagatcctgagaaatatcgcaggttagttggaaagttgaattatttaactgtgactcgtccagatattgcattcccggttagtgttatcagtcagttcatgtcttctccaacaattcatcattgggcagcattagaacaaattttatgttacttaaaaggagcaccaggacgaggtatagtttacaaggatcatggacatacccagattgagtgtttttctgatgcagattgggcaggctccaaggtagatagacgatccacttcaggatattgtgtatttgttgggggcaatctggtctcttggaagagtaagaaacaaaatgttgtatctagatccagtgctgaatcagaatatagagctatggcccagtctgtgtgtgaggtaatatggatttatcagcttttgactgaattcgggtttaagacttctattccagcaaaattatggtgtgataatcaagctgctcttcatattgcctcgaatcccgtattccacgagcgaactaagcacattgagattgattgtcattttgttcgtgagaaaattcaacaaggtctgatctccacaggatatgtgaagaccggagaacaactaggagatatttttacaaaggctttgaatggggtgcgggttgattatctttgtaacaagctgggcatgattaacatctatgctccagcttgagggggagtgttagatattagatgtatattagctgtaaaagaattagggtaacttgtatttagtagtttcctattttgtaattagtagtttcccatttag

SEQ ID NO: 337564 - DNA, 719 bp, Cannabis indica
tatactcataccacatgatataaataatgttgaactgttgaagtacattttgctacatctttatgtgttttggtatttaaaatattttttagtttattttcttttagaaaatttttaataatttagtaatttatagtgtcgaaataaaatttcaaataggtgtctatcatattcataggcattaaaaaaaaagttatggaagcaataaaatagttgaatattaattttgatattataaattatttaaaattttataaaaatttacattgatgccaaaacaaataagatgtacccagatgatcactaatgtatgcactataaaattactcattttatgtgagagttttttttttttaccaaaaaatttcattaaagttaataatatataagatcatgtatgaatttattatatgtttttttttggatgtttatatgtatgagtttcctttagtaatactaattaatatgtacagaaaaattcattttttttcacagccatttcattttcgccaagaactcatttaactagggaattacaaaaatattagaaaataggaaaaaatttacaaaaataccgagacataaaattttatacatttttactctactaagttgcaaaaatattgtattaaaatttcaaaattacaaaaatactgtatttcaataaaattaaaaaaaataactcaaaaataatcttaaaacaacttaacaaaaacatg

SEQ ID NO: 337565 - DNA, 954 bp, Cannabis indica
aatcacgtaatacgcctatgttagttagggtgttacatagtgatttgtagtaactaatttatattttctatttaattaagtagaaaaatatatttaagttgaaaattgatttatttattagttatagaccagcttaaattaagatatttttcttagaacttaaaattagaattgataattaagtcgattttaatcaagatacttaattatttgtttctatttcttgaaatttaattaaataagaaaaatatatttaagttaaaaattaatttattaattaattttacaccaacttaaattagaatatttttcttagatattaaattagaattaataattaagttgattttattctaggcacttagttatttctattctaatgaatttaattaaatcaaaaattatatttcagccggattcctttttaatttcatatcaacttaaattagaatgattttcagaatatattttattttattttaataatcattttcccacctaatttcgaattgcatttacttgtttaaaatttttaattttgaaaattagatcaactaaaatcaagtaatttttgttaatgattaattaaaataaaaagactaaaatatattatattttaattagaaaataaataattagtttataaatcatgtatatagatattttctaggtagacttttggtatttttctagatatatttaattaagtaagaaaattaatatttaatttgattttattcaagacatttaaatatttgattttcttcttaagatatttaattaaataggaaaattaatttaattttagatcaacataaattaggataatttttccagttttattttattatttttgatgaattttgaaaatgttttttttatacattggatttcaaattctgtcatatatatatatatatatatatatatttatagaaaattaaatttgagttg

SEQ ID NO: 337566 - DNA, 831 bp, Cannabis indica
gcgattcctcatagaaggcaaggtgccttgggcgccaggtgggtaagccctccgtccagggttactgaggcgcgccttcagactctcgaccagggcggatacctgggcgaattggattgctacattcccgcccacaacaatcgtgccacaaaccctgaaagggggatgtgcgcctggtcgggtgcccatgcccagcaaggggcattgatgcctttgcatcaatacttcaagaatgtggcggacttcttcggcctttgcccggcccagttcactcctaagggcattaaatatctgtctgccctcttcgtcctctacgcttcccagaagtggggtatgccttctcctcacgaagtcagctggttttttgatttgaagtccacccctaagcaaggcaggtcggggtacttctatttctctcaaccagacttcaagtggttgacgggcaccgatgattcggccatcagcaaaattgggcgttttgctgatgagtacttcatggtagacggcacgggcatcactcacactcagtttagcagattccgacatatcaccgccctcccctcactcttgctctcccaaggacttcattcctaaagaagtgaagggtagaaagaggaaatctgatgctggaggggttgaacgagctcatcaggaggatgagttgattcaactgaagcgcgaggctaagttgaagggaggtgcaagggccaagcaatatgctcagtagcccttaaatcctgaagatgaggttgaggaagagcaggtgactccgctcaagaggaggaagaaacttccggccccgcccaggcctattgaacatgcaatttgcat

SEQ ID NO: 337567 - DNA, 665 bp, Cannabis indica
ataaaaaaaaaattaccttttaaaagttgtatattggatcaacttttgagaaatttaaggagctcaagcatttagaaaaatatgtagtttgcagtaatattttaattctttttcttttgtacatagaaaactttagtatagagagagaaaataaaatgaattttgatggaaagaaagataggttagtggtgatactattattgtttgtttatagacaatagttaaaaacattacaaaaggaatcacatcattctaaattacaatggaactcttcatacctctttgttatgaaaatttataaatgtagctctgctctccttctaacgacaatgtaaccattaagaaaagaaatgatgaggagaagaagatataggtaatggaattttttaaatgtttatttggctttgatccaaaagattggatttagctatttacaccaaattacaaagataattgaaccgaaaagatcttgcggttgaatcgacacgggaagatatataatctatatgtatatatatatgtgtgtgtttgattttagagaagaatatttttccatgtacgtgactcgagttgattgagtggcagggagattgacagttctttcctgcgcgagagatagaatgaagagagatgcaggcgatataagaaatatataagaaaaaaga

SEQ ID NO: 337568 - DNA, 538 bp, Cannabis indica
gtctacttggaaccaaaagagaggagaggaaggtagtggagaacagtatactcagcaatggccctgtactatcctcaactcaagctgattacttgctacaggaattcacaaaggatgagataaaaaaggtagtattcagcatacctgcaaacaagtccccgggtccagatggcttttctagtagcttctaccaagataattgggagctcattggagaggacatatgtgctgctgtgcgttcttttctgaattcaggtaacatcttgaaagaaataaactctaccataattacattggtgcctaaggtgaaatgtcctaactctgttaaagactttagacctaaagcttgctgcaatgtgatttacaagattgcaaccaagctattaagttctacaatcaataacatccttccttcaataatatcacagactcaaggtggttttattaaagggagatttgtaggacataatatcttgatatgtcaagatttggtgaggcactatggtagaaaggcaaataagcctagctgcatgattaa

SEQ ID NO: 337569 - DNA, 879 bp, Cannabis indica
gtctgctggagtcaaacaccacttctagaaatcctacacatccactgtgtagtagatccctagcccttaacactgaaataactgggatccgagacccctgaactgatccgacatagacaaattgatcttcaccttctagctaaaaagtcaccattttctgcttacagtctatactggcctaatacttggacagaaaatccatcccaattatgatgtcaaactctgttagttccagctctataaggtcagcactcaactccctatcctcgatcctaactggcatagacctaaagcgcctattagagataaccaattccccgctaggcattagggttccaaaccctctttctaaaatatcacaaggcctacccaaaagatcaattattctcgtagccacatatgaacgtgtaactcccaaatcaaataatacagtatacaaggagtcattgataggaagctgacctatcaccacagaaggattggctacagcatctgctttggtgatagcaaacacccgagcagttacaggttttgcctttgctttcggctcttccttcttggcctgagggcaatctttcttgaaatgccccaccatgcaacacaaaaagcatgtcttccagttgtactctcccggatgatgtttcttgcaacatgggcactcaggataagagtaaccctggcgcccacctctgccttggttcccacggaaccgcttgctctaccccgaaccaccagaggctggggtaactttccttttctgatctgtggtgtagtcaccaccatccctaccatatgcaggagtaggaaaagtgggggttccaccgatattcagagtcactcggggctcctgaaggaattttaccgcaccctcagctcgca

SEQ ID NO: 337570 - DNA, 504 bp, Cannabis indica
atcttattcagatttctaattttgtttttttagggcctctcttgtataagatttttcgtcccttttttgagcttgtctgccactatttataattacatagtggacagttaattacaaagttgaccagaatatgtttacaacaatcatccctaagatcatgggatttgaattacatatcatgtagtgtaaatgcaatttatgatttgaaaatcgtatagctgtgattttcccagttttaatgggttaagactatcgtgtattaaatatgtctttaattattgtgtatggagatgtcttgacagaaacttggttacagctatcccaatagcgagttgggccattctttcttccgaggtcgacgatttaggtctggtgtcgatcgcggttcttacttgcaaagacttcttccgatttgctagggttgtaagtcgtgttactgttagttgtataaagatacaggaggtcttcccatagcgagacagtcacctcgcttacttgctcttg

SEQ ID NO: 337571 - DNA, 661 bp, Cannabis indica
aaaaaaaaataataaacttaatgaaaattactatcataacatgaaagtggaggaagaaaattaattgaggttattaattgatttatttcctcatgggggggaaagcctgtccagaaaaatatgataaaaaaggtaaagtgtctatgtgtgtaggtcaaaaatggcttggtgttagattgattcttacaaaaaaggaaagaaagatgaaatgattgtagaataatcagaatgtgacgttaatttgttaatttattttagggttcagaagtcatggctagctgatggcacatcattttagtgtgattagtagtattataatttatatatatagacctacctagctaccccatccaatcaccaaccatttagtagtgcatttgctttagtactacccatgtgccctcctctaccaaattaattaccaatatccaaatatgaaaagtttccttttatgatgtcacactcaatatattattatattaaagtgtttattgttgtaattacagaagacatttcaaattgtttaaaaaaaaattagaataacttaagatattaaattccaaaaaaactaaaatgtcttaatattaggatatttttaacttattatttatgttatttttagagttgttataaaataatataaaataatataaagtagatg

SEQ ID NO: 337572 - DNA, 550 bp, Cannabis indica
cacccattgaatctcctccttcccaaagaaaatctctcatcattttttctaacgagagtaaaaccgcttttggagctttaaagagagagataataaatcggaagagatgaaagaactgattgaaccaaggtaagtctaccacccctggataaaaatgaggatttccatccatcaagccttttagcacatttttccaaaatcggtgcccaaaacaactttttcctaggcgagccacctaaaggcattccaagatatgacataggccaattccctacttcacatccaatctgattagcacacaaggccaccacactttcttgcatagcgatccccaacacttggcttttactcatagggtggtggtcagtagatatgttagggttgataatctctgggactctaagaaaggaagtcgtctatctcctaaaggtccgtggagagatatctcagatttgtatgacgagtttctgggtttggtacattttaaaataggaagaggggatagaattcggttttgggaagaagtctggattgacgattatcctttggt

SEQ ID NO: 337573 - DNA, 677 bp, Cannabis indica
ttgtcttccgaagatcgtcacggcatgtacaatcatcatcagcagttatctcgttctacggtgcagtaagcttttattgctttagtagcttatttaatttttatgaaataagaaaagcctgataggaagcatgttagtagcctgatagtagaataggtgcatgttttgttttaattttccaaattaagtggcattagtaagctctctgtgatcatgacgtgatgtgccaactcttggtttcgcaggctgttaagacaagatggatgccaggcgaaataccaggagccagggtaactcagtagggtcaaatcagggtcacggagcccagtttcccctgcatgctaggggccgtggtagaggtcccaggggcacagctcgtggtcgcggtgatgataacccgccacaggctgcccaagccgattaggcagcccagaattgggaaactaggtttgctgaaatgcaagccaggatagaggaacaagatcttgagatgcagagattgaggcagcagggggatcctgcagtgcctgtgccagaagttcctgtggcacctgcccctgctgctcatgccgagattgtggtagcggcaaacagaatggaacccctgtatgaaaggttccggaagcaagcacctccagtttttctgggaggtcgagatgttatgaaagccgaacagt

SEQ ID NO: 337574 - DNA, 592 bp, Cannabis indica
aacctacactaaaccattttctcagttcgctacttttttccggtgacatttttgtagctccgcccctttccgacgactttccggtgacatcatgtaccgttttgaaaaacggttggcatgaatgtgatttactcgttgaggtagtcgttttgatatacactactcctattttcggcgacatttccggtacaccaatttttaccgccaccgattgttaatgtgcaccgcttaggtgaggtttcggaaccccaaattttaaagatagtcatattatatgtcgctggagttggttttgaatgtagaatgtgatgatgataattatttaatcatttgatggtatatgtgagagtaatatgtaagattggactaaacaattggagctcgggacttgagagcttaagattatcttttggataaagtttaacgactcgggagaggtaaggactcaacttgattatattggacttgatttttatatgtgttgtataacattagacatattccaatgtttatgatttacaaaattgtttgaaaaattgaaaacttaatctccatatttttctagactgttctggggcactaagtgccaaat

SEQ ID NO: 337575 - DNA, 821 bp, Cannabis indica
agtgaaatacaaagatgtaaaagcggtacttgatatagctgctataaggtgtatttataatctatatacaccttattgacagctcatacacgatctgaacaagaccacaactcactagaccattccctaaaatagatctttaatcagccaaggacgttccatttctgtacctatagcatcatgagcagtaagtggaactttttttttttatagaaaaggaaagtcttgctttggttttttcctcaaaaaatctgatcaaacatattaggaaactgacacaagatcagattaatacagctggatagatagagaaaggatgagttatcaaacttactatttataccttattttctataaatagaaaaactagacaactttccttccaaatataaaagttaaatatacaaaatatgaaaaccaaataaatatcacaactgaaattaattaataaattataaaatattttgtcaaattaaagatgccaaaaatagaagtaacaatctctccctttagcactttgattgacaaaatattttataagaaaaaaacctacatcaagtgttagaaacaaaaaataaaaagtatagaaaatactccccttgtatgaaagtatactaacacataaaataaataactttttaaacggaagagttcacataaaaactccccctaaaataacggtccagagttgtaaccaacaaaaaataaataccactccccctttttgtcgatcaaggagccaaagataacaaacaaaatagacaaagtcataatagttcaacaaaaacatagataaagagcaaaagataaaaaatggacca

SEQ ID NO: 337576 - DNA, 684 bp, Cannabis indica
aaaataatttccaacaggttggtgtttgggctcactatcagggaaatcccatggaatctcatatttcttctgagaaaagaaccatttgctatgaaaatagtactgttaattttggttaattttgggatttgtttttttaaagacactgatgctaatctggtttgttttagtgatgttgattggacaggtaatgcaaatgatagaacaagcactagtggtggatgtttctatcttggaaacaatcttgtttcatggcacaacaagaagcaaaactcaatctctctgtccactgcagaggctgagtacattgcaatgggtagttgttgtaccaacttgttatggatgaaacaaatgttggcagattatgggtttgatttgaaaactttaactattgtctgtgataatactagtgctatcaatttttcaaaaaatcctgttcaacactcccgcacaaagcacatagacatccgtcatcactttattagagagcttgtggaaaataaaactcttgtcttagaatatgttgaaactagcaagcaaatagcagatatttttactaaagctcgtgactcggtccagtttatctctctaaggaaatccttaggggtttgtactgtttaatgtttgtgttcttcatgattcgttattttttttttaacttagagttcataatgtcttgtcctt

SEQ ID NO: 337577 - DNA, 551 bp, Cannabis indica
atatacagaggatataaaaccctaggttctaaacaacgactaggagtgataaagtctctgcgaaacctaaagtaagcaggtatgcgagtatttgaagtgttcatccggatacccgcgtgtattcaagaaataaacaagtaggaaaggtgcgattattcaaacattcttcctaaagttcacggttatgcaaatttcaggtgtattttcttctgggattacccagttctacacagaaaaatatagccctatgtatacgaacatgtattttcaaacctctcaaagcataaaaacccagaaaatgcagctttccttttcaatcagaaaccaaaaatgcaagtagattcaaaactaacctttagttttgatggttctcccagcggctggtttcgatcacttctgaaactgaagagattcaagaggaagaagcagaaatctggacagagtatgggaatttcttcaaatctcagttaaagagagaaaaggaagataagaacgagaggaaaaatgaggaagttatttcgtatcaatgagtttaaatactcatatccctc

SEQ ID NO: 337578 - DNA, 909 bp, Cannabis indica
aacaaataaataaacccaataattaaacccaaaaaattaaacaatctttttcaaaattaaaaaaaatatcttactcacatatctctctaacaaacaatttttgaaatttttttattcattcaaatatctctctaacaaattacacggcttcattccaatttcaaaaaataaacataattaaagttaacttattaatcgtgttaaattttaaaataaataataatataataatagtagtcatttttctataattcagaacatcccaatattcttaaatccaaaattccttttttttagagaaattatactgagagattcacagtaattctcagcgaaagataaagagattgttcaactcttcaaatctatggagttgcgtatggagcagcgtttcgatcttgttcatccgcggaacagggtacgtttataaattcatcgtggaagccagggccaaggtcagacacgagaccttcatcttggtccgtgaatgcacgctgtccaatctggacaaggccaagatcatcgatgccttctaatctctaggagtgaaaatcgtccacgacgatttcttcgaccaccatagtctggtaagtgcgattaagttggtcgacgttctgatttcaaccgtttgcatgctcagttggccgatcagattaagttcatcacggccattaaagaagctggcaacatcaaggtacgtttcaaaagaattaaaactttattctattaacaaaaataataatattttttataattatatattattttaatcagctatatatatggaaggtggagcttttcctcatcttaagaagttgacgattgaaagttgtcgttacctccggttcttaccaaaagaactacccacttctctttctgaactacacattttcaattgtccattgctaa

SEQ ID NO: 337579 - DNA, 1966 bp, Cannabis indica
gatatggtatccgacatcgaacttctttaccatatcatccccagagtaatggccaagctagaaatttctaatcgggaggtaaagatgattctagagaaaacagtgcagagatcaaggaaagattggtcaagaaagttagatgacgcattgtgggcatatagaacagcttttaaaacaccgatttccatgtcaccatatcggttggtatttggaaaggcttgtcatctgccggtggaattagaacataaagctttcagggccatgaagactctcaacatggaattaaaagctgtaggagagaaaagactactgcaattgaaagaactagaggagttttgtaatgaggcctatgagaatgcaaaattctacaaggagagaactaagaagtggcatgaccaaggcttagtaaggaaggagtttcaacctgggcagcaagtgttactattcaaatcaaggttgaagttgtttcccgaaaagttgaagtcaaggtggtcaggacgatttaccgtggtcaaggtatttccctatggagctgtggaattaaaaggtgaaagtccagcaactttcaaagttaacggacagcatttaaagctctacttgggaggtcaatttgaccaagccaagtctgccattattctggcacctctctagacacagctcagcgtccggctatatgacgataaagacagcactcttgggaggcaacccaagtgtttctttcatttttcagactttttggctatgtttctagtttatgttttaagtatttcttgtattttaaatttttagttaagtaccagacattagtttttctagttgaatcgtgaaaaacgtgaaaaaaaataaaaaaaattgttttttcgggaccgggacccagtggtcacgaccacaaggttcctgggtcgcgacctggggttttaacagaaacactttcaattttcgtgactagggtcaatgctggtcgcaaccctttttccaagttgccaccccagtcgcgactaccccttttctagaaacctcaaaaatttgaatgtaagctagtcgcgaccagccttagggcaagtcacgactagctcacgaatttttctataaaatcccaatttttccccccattcaaccctacacaaaaaattcaaatccttcctcctctcagccgaccctaacctctcccattcaaaaatttcaaaattttcattcactaatcttcaattctctcatcttttcttcaatttctcaaacccaatccattcaaaaacccaatttcactcatcaatctacacataccatcaaaaacaatcccaaaaatcactcatattatcccaaatccgaaaataccattgtcttcatcttcaacctcaagctttcaaggacattcaacaatggaggtggagtaaagcttctttgggtttgtgttatagtgagatttttcttacctagaaactcgagaccagacccctatttagaggacacgtatattcaggtttcccaaagaaagctgagatgtccctgagggactcctcgaagttttaaacctcgcttacgatagaatcagggagaggtagcgagcatgaccgaagtctaatcgcatccgagacaagagagtagctcgcatatatcgaactatatgcgagtatcctccccgtgtccgtgtataaaccaggcgaatggctctctataaatgcgagttggtcctaagaaccctgcagcctttataaagtaatatagactttcatgtcctatcagcccgtcatgtgatgtccacaaaaggcgactacctaaggacgcagacatcctaaacataaacgataaacccgcgagtttatcaccagaatatgaacagtcaactcgcagatttggaagacgcatacgttgacaaacttagtaacttccgttcatttattaatgttaacgttgtttagttaattattgtaattcaatgtgtaaaaatggattgacaatgaatgca

SEQ ID NO: 337580 - DNA, 1010 bp, Cannabis indica
acctgttcgacattttggccaatctgagttacatcagaatctttctgagcgggaatttgagcacgggttccgggctgcatgattggcgtgtcaagctgatcgtccactcctctcctcctattcagattgtttctaagatcatgagtcctccctaacctatcgaatacggaaacgcctggctgtctcagtgactgtttggtttggctaacgtgctaaccgacacccttaacctggttggaattgttgggtattacttctcccaatgaattactagacaaggtccgcccacctaccacttggcccacaggtggaacctgtaaccgaggatttggtggctgaccatttatagtctgaaagtattcattgctggatcttcgtctgtttcacccaaggggatgacattcgggggttgctgcccagcagattgataggcttttcgtatcagcacagtggcttgccgactatgattatcaatgactacatgatgagcccctaacgcctccatctctttgtccctccattcggcaaacatgcgcctctattcttcaaacgcgagatttaccacagcacggagttcctcctgatcatgatgtagggtgttggtatgaccttgcaagagtccaagggtagcacggaggttctggctctcagtgtcatctccaatggttgtttgagcatgggtagcgggcggaataactgtgttatgaatgccctggtcaactactgaactggtattctcagtctcttacacaccaggcctgatctcatctacaggagtcattacaccgtgacccgcagttgatggctgtccgggacttacggctggcggaacccttgtgtttcctgggttctatagtacaggatccaccatctgtggattttccagatcaaccacgcccctacgagtctgtactaccatcgtacttgtgattaaatttgcaataaagagcaatttttgagttcaactctcaatgaaagcaccaaaagtttgacctcacttttagccaatg

SEQ ID NO: 337581 - DNA, 993 bp, Cannabis indica
gtactgcgaaaatgttaaacattaattatccccgcgaggatatgaatttgtccaaaataaattgcaaatatgtctaagtacagagtgtgagtacccctgtaccgcataaaaaactaactagcaaattcaaaagaaaaatagttcaaacatagaagagaaaaatcaagcgttgggagcagcaggaacagattcatccgcgcctttattggccacctcgttctcgacctcctccacctccgcgacttcagtctcctcgagaatgttccctccaccaccttgagttggtgtgggtgacataccgcgaaaagcctcggccatttctgcggcttctgctccaagaatcgagaagtcaaagtctggaatcttggaaagagtagtatagatgtagtctaaaaccgcctggtcgtactgtttcttgccgttctccttctaagtttccaggtcgcgagacatctcttcaatcttcgccttggcttcaagctcgacctgctccttggccttacgaagttcctctagttccttggctttggaagacgcatcctgcttcagcttcttaacgtcttcttgaagctgagcaatatgcttcttcgcgatttcaacttctttgggccctacagcaaaagcctttgcaaacgtagccatgaactgcgaagctaactccgcagcacgaggaagcaactcttctgaagatgatttgtcaatcttcgacaaaaactcatcgctgacaaacctctcctgaaggtacagcacatgacgagctcgagccgctggatcgatcacgaccttcttccctttgtcttgaacacccttagcaggcctcttggaggaatctgcggcaggagtgacaaccacatcgcttttcctcttctgggatgtaatcggagaggtcgatgctgtcccaggtttcaatttgcggttgagcataggagcggactttaggaaggtcatttctgcgattacaaaaaacaacaagggttaatataactagggata

SEQ ID NO: 337582 - DNA, 508 bp, Cannabis indica
gtaggtatgggcaaggccaaggttgagcagccgtgagagcgagtagatgaagattgtacatgggacatcagggcatattttgtacagtcgctaggcgacaaagttttgtatatgtatagtaaaacttttgtataaacttttgtaaacgggatcccagtttaatataagtatattattccagtgtttataattaattaagtaaaagtttaattcatcatgattttcaataaactcgttgattagcaatgagctgcacagttaagttaaaaatcacgttaacacgcctaaactagtagggtgttacacaaaggctacaatcaataacaaggtatggatttttttgacacatatgctcctatagcaaagttcaatacattgaaattattattttcacttgtttccatcaaaaataggcatctacaccacatgaacattaacaatgcttttctccatggtgaattacacactactacaaaaaccccctttagaggcagtttttaagctcttt

SEQ ID NO: 337583 - DNA, 1082 bp, Cannabis indica
gtcatttctgcgattacaaaaacaacaagggttaatataactagggataaaattccaacaccttaagtttgcgtatgcgataaaatacctgatgatggtcgcggagtttgcttagaaaggcgtttatcaattcgctcttgctgcttttcagaaggttccttatacaccggctctctccaaagactcgcgttctcagggatcagtttatgttcgcgaagcttagcagtcgtacataataatcgccagtcgcgatcttgtacaggaaggcttccaagaatttctgctgtttctctgcgagtcgcgtcgagtgtgggacgagacggtctatctgcgaaaaccaaaagaaaagagcaagtcagattaaaacctcaaagcaacttagaaaaatgtctaagtcagaaaacatgcgacgtactaggtctacggttaaaatcagttctaatccctgggactttgaagatgtagaaccacttcgatttccaatctcccatgttagataccattccttctaccccgttaatttcagaagtcgcccatttgctaaagcagtagaaaccattgtgaaggcctacgctttttatatcgtagaagtagctgaactcttctaccgagggagccctatgaacgtactccatatacatcgcgtaaaaagccagggtggtgcgataactattgggagttagctggaaaggtgatacatcatatcgcttgaggatagccgcgataaaaggatggaaagggactgataccccacatcggagaatgggtattgagattaccacatcctctgtggggataatcgcaggatttgtaaaaggaaggtgcgccctctgagttggcttaggacgtaaagacgcaagtcgcagtaggttcagcctcgtaaaggtggtaaggtctgatttggtaaccctcgaaaccaaatcctcgcacgagaaaggctcgttcagctgggtgtcatcgaccgagtcagtaccgctcccttctgcctcttcctcttcatcgcctgattcgcgagctggggccgtccagtcgtcgtctgtctcctcgacctcgacatcaggcgcatgcctcgaatgaataag

SEQ ID NO: 337584 - DNA, 1069 bp, Cannabis indica
accatgacaaggacctgaacccagtcccaaacccaaaagtagacccaaacccgtaacctatgaccctaaatttgaaccaaaagtggaattttaccgggactggaactaggactttgacttggaatcataacagaaattggacctagatccaaaaccgtaaccagacctagacccgcactccaaatcagacctagaccgatatagggagccggacccgaatctcaacccaaaccttgagttgggacccgaacccgaacctgaacttagacccaaacatggaaacagactagggacacagaactcgggtccagaccatgaaccgccccccagtcaggatcccgaaccacaactcagaaatgggacctgggacctaaaccagaattagaccgagactcgtgacaatgatccagatcttgactcgggattcgggtaacggggccttgaacagactagtagtcggtgtctagatctgggactcagactacgagcagaacccagacgaagaacaaaacccgaaccctgaccaagacctgggacacaaaattagaacctgaacaagaatcgccgaactaggaccctagaacaacactaggaccgtgaccaggacccgaacctagacctagaaccgaacacagacctaggcttagacccaaactgagactggaactcgggcccgaacacggtcgtgtaccaagaccggaggtgagacccggacctagacctaaatctgggacccgatcccaaacacagacttggacctagataggaatcctgatacgaacctgtactcggaccaagaaccagactgggatcgaaatgctggacctagatctggaccgagatcctaacccagacccaaacttggaccagcactagggagccgaacttggacttggaccctaacctagacacagatcggggtccagccctggacacaaacccacacacagactcgcacaagaactcaaacacccacaccgagaatcagaccaaaagctagaccagaaccgggacacaaactcgaaccctgaccaagatcaaaaccaaggacttagacaaagaactgaat

SEQ ID NO: 337585 - DNA, 606 bp, Cannabis indica
tgcctgcaaagaaataaatatcaatgatgacggtcataaatgcaacccatgcgcctagggcacgtgccactgtatttataaaagagaccgtaggtcgcgtacaagcctcatttaccatttactaaatgagacttgggggtaaatgtttcctcaaatttatcccgaaatacgtggcaatggctgcatatggcacgtggatttcaagaacacctcacccacgaaaaattggctaagtcatgaatagacaggaaagtgcatctcaaggagtgagcccccggagaggagcataaggcacacctttattctccagaagctagaaatataacaacgcatctccgggagtagaagatcccgtttgagcagtcatttcacatttaatgcggcatgggggaaacgtatcagaacccatataaaaggatttgacagatggtgtaagcctcttttacgacgattacacgataatcaacgagtctagtgacgactccgttatgaagaatcacatcaatcaaggaaggataaagattactttcacctaatccctaagatacctgctgcattggtcatgtatgtcctattgtatatctgctaggaatttgtgtccctaag

SEQ ID NO: 337586 - DNA, 645 bp, Cannabis indica
cacaaagttagctcattttctactagtaaagattacttatatagttgatcagtatgttgaactgtatgtgaaggagattgttcctctccatggaactcctaaatccattgttttagacaggatccaaagttaacatcaaaattttgggtaagtcttcaaagagctatgggtaccaagctaaatttcagtacaacttttcaccctcaaactgatgggtaatcgtagagaactattcagatactagaggatttattacgagcttgtgccatggactttgagggttcatggaataagtacttgcctttaatcgaattcttctacaataatagctaccaaagtacgatggggatggcttattatgagatgttgtatggtaggaaatgtcgctcccctatccattgggaggaaaatggagaaagaaagtgcttgggtcccaggttagtttaaaagaccaatgaagctatagacaagatcaaggctaagatgcttgcttcgcagagtaggtagaaaagttatgctgatccgaagcgcaaagacgttacatttcaagcaaggaacatgtttttatgggttttatgccctaaataaaactcatttcaatataatcagatttacttatatagatcagaaataacatttaatgtt

SEQ ID NO: 337587 - DNA, 1007 bp, Cannabis indica
tcattggaccttttgaaatcccttgagaggatagggcaagtagcgtacaggttggctatgcccccagcgctggcagctgtacaagttgtgttccacatttcaaagcttcaaaagtatgtctcaaactcgtcccatgttctgagttatgaagcattggaactccagccagacttgtcataagaggaactaccggtgcagacactcgatagaagagagaaagtcttgagaagcaagactgtgacactggtgaaagtattgtggaggaaaagtaaagtggaagagacaacctaggaactctagacggatatgcagcagaaatatccgtagttgttcaggtaaatttccggacaaaacttctataaggaaggggtaattgtaatgccttagaattaagagaatggattagaaaaatcctaactagtaaattatgtattattgtggaattatactattatataatttaatatgtgagaatttatatgatttataacatggtaagacctcgttggtgagccaggggcattttagtaattatgacctgagaagggtaaaatattgaaattaatatatttacgtgcttatgggactatattattatatagtgtgcatgtgctgtctttttcaggtgtgttctgacaagttggcgcggtatagtcacaaccgggtatttcgtgccgaacagagttcggggccgaaatacaagtttgggatgatttattggcattttatttatatgtgattaatctgaaattaattagagaatatttgtaatgagattgacaaaatttcccttaaatgtttttatgtgtgtaatttggcccttgggggtattttggtaaattggcatattagtgtatttgtaataaagtgaattgtttgcaaaaatgaaaaataatttatgcttttgttctcagcccttgtaaccgaccccctccctctctcaaactcatcttttcaagttttgatttttgttgagaaatatcttggattcaagcttgaggtgtgat

SEQ ID NO: 337588 - DNA, 562 bp, Cannabis indica
aacatacttgtgagtagatctaagatcctggtaaaataaattccaacaggatgaacatatcgtacgagatgtgattattgcttctaaacagccgggggttgctcgagcttatgctcagacaattgaattggccctagtttttgagggtgcagaagctcggatacggaagaaaaatattgctagaagggattcatggaagccaacatcaagtgctgattccggtgatcgtaagaaaagatctagtgaattatcagctacaggcccaaataaaaggttccagggtaaccaaggttttcgtcctggtgggaacgaaaactggcggacttttcctgaatgaccgagatgtaaaacgcgccaccagggggagtgtcaggccagggcctgtttccactatggggtggtgggtcacatgaagaggaattgtccacagctgctacgactagagcaaaagagggatggtacacccgctcctgctcgagtgtttgccctgactcaggctgaggctgatactggtccttctactgtaacaggtcagctttctgttgctggtactttattgact

SEQ ID NO: 337589 - DNA, 735 bp, Cannabis indica
acattcgagtacagaccatctacttttagttaagtaagatcatatatgctaaaatatcgtaagtgcattaataaccctttaaaacgagttcaaccctaacataggttaggtagcccaattatttatttatcatttactatttaaccataggttaatcatgtaatctcataatatatcaatcaaccaagttgtcggggtaaggatactatatacataattggcaaatcatgccgaacagaccttactctgttcatcgttactatacctcctacaccccacttgtatctgatttgctactagagactcactttttataattatttagccagggctctttgactcgtacttcctaaactaccttaaaaaataagtccatacttcacttaagcatcttcattccatatatgaatgcaatcatatacatccatttctctttccttataagttcctcacttccaattagataaactttagttattttccaaacaatggctattgtcttattccatcttagtatgttcctctaggatattgctccattactagccctctgggtcgagaaagtttcaaatatttgtctgaattcttagctcttgacaactttaacttttggcagatctgatgtcattctttcctttaacactatatagcatagaaatgccacctctcttgaccaacattaacacttttgtaagttttttttttatttgcttctattcacttaaacatactcat

SEQ ID NO: 337590 - DNA, 701 bp, Cannabis indica
catatgttatttattttgttataatattttttcatggatatacatgtaggttactatgattttgtacgaagttttaaggctttatccgcctgtaattttgctggttcgaagagtgcacaagcagacacaacttgggagtttgacattaccagcaggagtacaagtgtcattaccaactatccttgttcactatgataccgagttatggggagaagatgccaaggagttcaagccagagaggtttgcagaaggagtttccaaggccaccaagggccaagtctcattttttccctttgcttgggggcctcggatttgcataggtcaaaattttgccttgaatgaagccaaaatggccatggccttgattctacaacgcttcacttttgagctttcaccctcttatgctcatgctcctgcaactgttattactcttcagccacaatatggtgctcacttaattatacataaacgtaattaatattgtagtactcgtataaatatatatatatatatatatttatgaaggaagtttcaatggttactgtaagccttaagttcttgtctaacctatgtttttcatatatagattaattttatcttgatatttaagcttgaatataaaaagaacaaaatcaaagattcaacactagaattttacaagcttcacctgccctagaaactcattctaggcggctagtgct

SEQ ID NO: 337591 - DNA, 2051 bp, Cannabis indica
agggtcgatgggaatgaccgagtgaagtgtgcatcatacatgttgaggaaagatgctcgtatctggtgggaggtggtggaacaaacaaaggatgtaaataccatgaactgggatgatttcaaaagggtctttaatgagaaatattataactcagcagtgttagcagcaaaggttgatgaatttactggattagcccaagggagccttactgttacagagtatgcacaaaaatttgatagactggcaaaatttgctccagatttggtacctactgatagagtgcgagcacatcgatttgtggaaggcctgaaaccaatgattgctcgggatgtagagattgtgtcaaggggtcaattcagttatgctcaagttgtcgaaatggctcttacggctgagcgaagtgaaaacaaaatttggaaggaaaatgctgctaggagggaatctaagaaaggtgcagccaattctaatgaccacaagaaaaggggacaagatcagcccggacagtcaagtcaagacaagaggtacaaaactgataacgaccaccgatctaatggaaacaatggacgcaatgttccagaatgtcctaaatgtaccaaacgtcatctcggagagtgtagggcaaatgcatgttacaaatgcggaaaggaaggtcacattaaacgtaattgtccattgtggggacaaactgagaacaaagaagattcaaaggaagacgataaatatgttccaacaagggtcttcgctataaaagaagtaggacatatgacaagtgctgaggtataagacattgagtcttcactttccaaaaaaaaaagtcgagtagaatttcgggacgaaatttctttttaggaggggataattgtaatatacgctttcttgggtaattaagttttttttatacttttagtttattttgtttatcaatggggataatttattattttgaatatttatgagattagtggagtatgcaatttattaattttttttagtgacaataaaatttattattatttttagggtatgtataatgctagataaataattaaattaatatagtaaatatattatagcatattgtttagtttattattattattattattattattattaatatcagtattattattattattattatcattattattactattattaatttattattattattattattaatttattattgttattattattattattattattattattattattagaattagtattatcgtacagtatgtatatatacatatatattatattttaaaattttaagttgttgatttagggttatgttagggttaggactatatataagatatttatatgattgtttagggttgagagggtttagaaacgtggtgagacaacgaaagagagatgccgtgggacgaacgaaaccgagccgtgaaaaaagtaagattttgggttgttgagtttgaaagtttttgggctgccctagattatttcattgagttttatttcatccaagaagagttttaaatgcgattagaaggtctgtaatcgcacctctcgacagacaccattgtttacgttcgaaaatacgattcttgaaatggacccggatttgaacgtgtttaagttgtttcggagatcaaaggaggttgggtttaagtttatgggaccccaaagatcagttttaacgtgaagaatcgaagcttgaaagtctgaaacaaaaattttcatttttgactccattaacaacggtacactggagttggagaagacgactccgatctgacgcatgggggttgttatcttgggtagttcttgatcgttttgaggtcctaagcactttgggaagctttcccaatcgaaaggacacgtcaagagcaatcggggacaaagtcacatcgtgccggcgacggaactgacgtgaacgccggcggccgcgttctgggcatatctgaggatcttgttctcaacaaggaaatttattgaggtgcttggagtagcaagaaggtgttcttaacaactgaggtaagaagagtggacatctgtgcacagggtgt

SEQ ID NO: 337592 - DNA, 788 bp, Cannabis indica
ttgataaagtcagtcgctcaagctttgcccagctatgctatgagtgtctttcttttgactcatgagatttgctcaagccttgaaggtatgatggcgcgcttttggtggaaatctcagtctaactcaagtaaaggagtaagttgggtgagttggaagcgtctctgtcaacataagaattttggtggtctaggatttcgagatcttagggattataacttgtcatttttgggaaaacaagggtggcgcttgctcaccatgggagacactcttgtgggacaaatctacaaagctaggtactttcctaatggttcttttcttgatgctgagttaggaagtaatcctagttttatttggcggagtatatgggctgctcaagacttagtgaagaagggtgcaagaagatcaattgctagtggagtctcggttagcattctaaatgacccgtggctgcccaatgataataacccttatgtaatcactactcatccgggtttggttgataagcaggttgttaatttgcttagtattggtgagaggtcttgggacttggagattctaaatgatatgtttgaggagagggatattagcttaatcagaaatattcagctaagtgattctcgagatgtggatagttggtattggaatatggagtcttcgggtttttattcagtcaagagtgcttataagtttcttcaatcgtcaagtggaaattggctttttactcaagatgacaatggttggaaaaaattgtggcaactttcagtgcctcccaaggttcaacatttctt

SEQ ID NO: 337593 - DNA, 568 bp, Cannabis indica
tttttttttgtcaaaaaaaaaatgattgatttgttgtatcttaatgaattgtaaaaaaattgtattttttattttcttaatcataaaatattcttttaatatttattttttttaacaattatttaaaaaaacatttattatttttttatttttttatgtttttaagaagaagaatgattcaatagaggaattagttaagtttacttaaaattttagatttatttattgaaagctcggttacataggtctatggtctcgtcactagttgagataatactgtttgcagattcaattaattgattttaattaatcaattataattttaaaattagactatgtgtttatttatgaatttttactaagtaacgacttaattgtgaagaaaagagattttggggactacctgttaattaagagactttgtatggtctaattaataaataatataaatggcaaatttatttgataattacttataattattaaatgaatagttttgacatttataggattgaaattgaaaaatatggtattattgaaagaaaaataagtggttaaaataagtggc

SEQ ID NO: 337594 - DNA, 870 bp, Cannabis indica
agcagctgatccggtttaaccagttttacagggcctgtaaaattggttaaccggtttacaacaaaaaaccccaaaaaatttgaatacctaaccaaatcgactctaaaccttaccaaaccttccagacctgcatattacaccccaataaacatattccaagtaacatttcaacatagcatgctcaaaatcaaaaattaccattaaagagccaagcttgaattctaaattcaaagcttgctcaatcaacactacagccactcaaactagctcaaaacaacatatctaaccataattaaacctcagaaacacaattcaaacaacaacagcaactatagaactcataaactcaaatcatgcataatttcttaactttaaacccaagaaatcataaggaggagtgctagaaacttaaccttgggttgagatcactaaaaactagctgaaaatcataagaattgctgaacaaaactcagaaccctagctggttctatggtgttcgaaaaagagagagaaagtgtttttcaagaattttctaatttttgtaaaatgaatgaaataaaaatgattttattaaacaaatattaacctaaaaattagaattaaaaacctactttaaagttcactaaaagacaaaaaagttaattaggcaaaatgaccattttgccctaccaccctaaaagtcataaaaattcacttagaggtattttagtcaattctaaaatctcgactgttctcgacattcccaatgcctaactatattgccccgctatactaaaaatactaagatgtgattctaatagccaaacaccgcgttctaatgttgttaagcacaaaacatgcaaaaatatgaaattccatatatggcatata

SEQ ID NO: 337595 - DNA, 1460 bp, Cannabis indica
aggtatttaattgttgaatggtctgtgtggactttcaccttatttccaattagataggggcggaacttatcacaagcaaacacaattgccagcatctctttctccatcgtgacataattgagttgagcatcattcagggttctgctagcatagtagattgtatgaaacaccctatcaaccctttgacccaagaccgctccgattgcgtagtcacttgcatcacacatcaactcgaagggcaactcccaatttggtgaagtgactattagtgctgaaattaatttctccttaagaacttggaatgccttcaaacattcttctccaaactcaaaaagaacgccattaacaagtagattggacaacggtttagagatctttgagaagtccgtaataaatcttcggcagaaactagcatgacccaagaaactccttactccttcacagaaactggaggaggaaaattctctattgttgacaccttagctttgtccaccttaatacctgcttttgagatcttgtgtcccaaaactatcccttctgttaccataaagtgacacttctcccagtttaggactaagtttgacttttcgcatctgattaacaccttttccaaattctctaggcaacgatcgaatgaggaaccaaagactgagaaatcatccataaagatctcaatgcatgattctattaagtctgaaaagatagccatcatacaactttgatttgttccaggagcgttacatagtccaaatggcattcttctaaatgcaaaaattccataaggacatgtaaaagtagtcttctcttactcttcaggtgctatggctatttgatgatacccaaattcgccatataagaaatagtaatattcttgccccgtcaaccagtctagcatctgatcaatgaagggtaagggaaagtggtcttttcgggttgctttgttgagttttctgtaataaatacaaatcctccagccagtaactgttcttgtggggatcaattcgttcttctcatttttgattactgtcatcccccctttctttggtactactagcaccaggctaacccatttactatctgaaattgggtaggccactccagcatctaaccacttgaccacctcctttctgacaacttatttcataggtggattaagtcttcgttgtgcatcaattgttggtttagcgttttcttccatcaaattcgatgcatcactgttgagggactgattcccttaacatctcccaatgtccatgcaatagccttattgtgcgactgaagtactctaagcaacctatcagtctccacatcacaaagtgaagctgacactatcactggaagcttcttatcttctcccaagaatgattgggacgttgttatcttcttccatgtccagaacaataaaatcagttgggaagatgaacttgtcaaccttgcctaacacatcctcaatgactccc

SEQ ID NO: 337596 - DNA, 518 bp, Cannabis indica
agttttaggagctaaaaattcatgagttatacctgtagacttatatttatcatcatatactgagttctcaaactccttaccatgatcactccgaattcaaacaattttaccaatgttatatcctttttcaattcttaatctcaaacaaagtgttttaaaatcatcaaatgtgtcagctttttcttgtaaaaaatctacccaggtaaagtgagggaaatcatcaacacacaaaaatatatcgcttaccattcatactttcaacttgaattggacccataagatccatgtgaagcaattccaatacttttgtagtattaatatctgaaatactttcgtgagtgattttcaattgcttaccaagttgataaagttcacactaaccaacactttctttacccagtttgggtagtccacgaataacacctatattggacaatttttttcttcaaatttttataattaatatgtataagttttgcatgccacaaatcagtgttgttgatagctgaatgacaagt

SEQ ID NO: 337597 - DNA, 692 bp, Cannabis indica
gaataacacctatattggacaatttttttcttcaaatttttataattaatatgtataagttttgcatgccacaaatcagtgttgttgatagctgaatgacaagtgaacacagggtttagggtataaaaaatatcattagatcgaaatccttacaagacacattgattatcatcattaagtacataacaatgatcactatcaaaagagaaagtatacccttggtcacatatttgacgaacgctaagtaaattagcccttagtccctcaaccaacatcacatttttcaatttgagcaacccttaaaaattgagagtttccattccaatgacatttctagctaagtcattcccaaatgtgacttcgccacactacattggcatgatgtttatcaaaaaaattttgtcacctgtcatatgtctagagaaaccactgtcaaataccaaatttgtgaagcaaaacttttatcagaaaaaccagctacacatttttatttttcaatccatttctgtttgataacactatgcttcttttgaaaatttttcaaattatcaaaatgatttgttttgtacatattctccatggtaaaacatttaggcctaatatgtctcttcctgccacaaaaatgacaaatatggacaaatatacttacctgagatcttactctttttgtaattactggagattttgcttct

SEQ ID NO: 337598 - DNA, 1922 bp, Cannabis indica
ctggtcatagtcctagtcttgttagaaggtcttggtctgccggttcttgttcaggttcaagtttcgggttctaggtttagttcagggtccgagtttgggtcctggtctgagtctcagatctggatccctatcacgtgtcccagtcttgttctggttcaggtcctgggtccaaggtccgagtttggtttcggggccttgattggggtgcagttctaggtcccggacccagttctgtgtcttgagtctggttcaatgtttgggtctgagttcgggtcccgagtctaggtttgggttgggatcctggttagggtctaggtctaggttggagttcgagtcctggtccatttacggttctgggtctaggtccaggtccggctacggttccttgtctaactccaagtcctagttccgctcccgttctcgggtcctagtctacttccagtttcggttccaatttcaggtcacaaggtccgggttcaggtccaagttttggtctgggactgggttcgggtggaggtgtaggtttgggtctgattctgggccttgggctaagttcgagctccctgtttgggttcgggttcgtgttcgggttttgtcctggtgtgggtgcgggtttaggttactaacctggtttgggtcctgggaaggtttcgggtttaggttactgtccttggtccaggtcaggtcgtagttcgggttctagtcctggattcagatctgggtctggattttggggtctaggttccctatccatgtcccgttcctaggtcctagtcggggggtccagattcgggtttggatcctgagtcttggttttagtgcatgtcccagtccggatttgggtccaagtctcgatctcagtcttggttcgggttcggggtcgggtccttgtcagggtatggatcctggtttgggtcgcgggtctcagctctcggtggtttaggaccaagtcaggtcccagtctcggtttaagtctggatccaaggtctcaggtcccagtcctagtcaagatctcagtctaggttctggtctgagttagggttacggtttgggttcggttctggtcttaggttcgggtcctagtcatagttccagtgctaattttgggtctgagtttggttctgggttcgggtctgggtcaaggttggggtcagggtttgggtcttagttcgagttcgggtacgggtttttcggatcccagtctgggtccaagttagagttcgggtccaagttcaggtcctaggtatgggtcttaggttcagatcagggtctgcatttgggtccgggtccaagtcccgtgtttcgattccggtctgcgtctgggtcggtattcgggtccgggtctaggttcatgtccatgtcaaggtctaaatcccagtttaggtcaggggatttgtctgggtgcgggatcaagtcccgagttcgggtttgggttcacgttcgagtttcagtcctactctcggtctggaaccgggtccaggactaggtttgagccttagttccgtggttgggttctggtctaggtcgttctcccggtcccgatcctgttatatggtcttggtcacgttctggttcaagtttcggtttagggttcaaggcttaaggtttaggggtatgtataaagagtttaggatttagggtttaaggtttagggttcgggtcacagggtacgatttaaggttcgggtgtgggtctgggtctgagtcttggtctgtgtctaggtccgtgtttgtgttcaggtccgagtaatgttcccaaatccaaacaccagccacatgtcgagtcttattcgagttctggtacaagttcagtttctgattcgggtctaggtctgggtctaggtccaattcaatgatttagacattgactatgggtcgggtccgagcctcgggtcttgggtcccatgttggaaattattttac

SEQ ID NO: 337599 - DNA, 1200 bp, Cannabis indica
aatttttacatgtcgacctaagcaataaaaccgagaatacaaaaatgcaacagatggtagacccaacctgcgtggtctagtatggcccgaacatgtacaatccatcgccaaggcctcaaactcatggctgatcacaaagaactttaccctttcctgcacagtagagcacccgtgagccaaacccagcaagacaatataaataataataaataatatattctcaatgcaaataaatattgatgccaccgcatttactgtctaattaacatagacctacgtgttgctttcacacgtctatttacaataaggccttagattagtttatctcggtttcgattaccgagtctaacctaattgtaccttacccacataattctttattcaatatacatagcatggaattacattcaaaattatttaatcactagagtaataaccctagaccatatataaccgctcactttagggtaacaaccctaatcccgattcctcatttaatcaaaagcataatattaaacatgagcgccaccgcgcttaactctatgtgctaactactgtcttacctggtgttctaaatatatagagattccaaatcccaaggtgctcctcaacaagtgccaataattctagtcataatctttgggattttacaaatagggttaatcccaaaatttactttcacataatcatataattggcatttcaatcacaaataagcatataaaactcgaaacgagctttccaacgatattcgaaacgtcccaaacggagttcagattcaaaagttataaacaaaataagttaaacacccaatctgcccagaaaaccccaggctggccacgacactcacaagccatgctgcgacatctgggtaacaaacccagaaattccaacctagcgggtcgcgacatgcaaaacctatgccgcgactaggggtgcacacgggtcagatttttgggttttcagatggtcgggttcgggttttcggatttcgaatattaaaaatatgcaaccgatcgaacccgattttcgggcggtcgggttcggcggttctcgggtcgggtatgccgggtttgctgtagtcggattcagattaacacccgaatcaatacttgcataaaagaattgtgtagtgtacaatttaatttatttctggagcactgtaaaagaaaataaagcaaatagttctctacatatttt

SEQ ID NO: 337600 - DNA, 526 bp, Cannabis indica
ttttctcccttatttaatcaagtccccccctttttaaatttaatgaattaatggcacgtttactaaactgtaattggaattagaataattaatgggacaaatgaatcggtttaaaatagaaaataatcgaaaataatattttattatgctatttactaaattgtctagaaagaaaattagatcatattattttatttacataactaggaaaagtaatcagaatactttactttgacaaaattgccattattagagcatgtaattattttctgtttataaattttaaagggtatatttgtcttttcatttttaataaaattagaagtaaaataaattaagttaggaaaggaaaatgtattccctataaaaatggatggagaatatttccctttgttttctccctaatttgtatgggtcccactactttctccatttctaaaagggaattttgcggcaaaagtcctcaagaagttcagtttgataccataagtcctcaaacctcgaaaaatagcggtaatagtgttgg

SEQ ID NO: 337601 - DNA, 583 bp, Cannabis indica
cttgggaatgttttttcccttgtgtgggctctggctagaggatatttccttcttagccttggccactgcaaggttgtaacattcccgagtagattgctgattccctctaagacaccctaccccattcttggttgggaacttcaggcacgagtgaaatattgatgtgacagcttttaagtcatacaaggctggtcgaccaagaattacgttaaaggttgaaggaacatccaatatcaggaactgtgccatgatagttatgctcgtcggagcttgtccaacagtgaggggtagctggatttgtcctagaggtgcaactccttgatggaagaaccatagacaggctggaggcatggagttagatccttgagttggagccgcatcttctcgtaagcagtcttgaacagaatatttaaagaagctccattagagatcatggttctagccaccatttcgttcactatctggacttccatgaccagcgggtcgttgtgtggaaatctaatcttgacagcatcttcatcgttgaaagttatggttggctctcctgctcgtggaactttgggcttcctttcttccacggcca

SEQ ID NO: 337602 - DNA, 591 bp, Cannabis indica
aaccttgaccctaaaaactaatatgaaagacaatgtgcaaagagagagagaaaaaatgatgagagaaaaaataatataagaaaataataaagaaaaaaaatattgttagataaagtggaaaaaaaatattaacaaaagataaattgtttttaaaataaaaaataatattttgttgttcccaaaatttttgtttttttttaacttttttttttaaaaaataattgtaatctgaaaagacacgtttaattgtactaaaaaattatttcattaactttgttctacatcatgtatgagtaaaaaatggagacaaatataattttataaccatgttccaatacatatacaaattaacttagcaaattaacaaatatatttaacgcacacaacccccttgctcgagataatttctttattttatatgtttcctacaaaataagatacactttggacaggaacctagggcaccctcacacacacactcatctatcgaactacttgacccaaccttgagagggcagagcgttgcttcaaaagtgaatgttcaaaaatcgactcaattggtcaatcaacacatttaatcagagagaaaaa

SEQ ID NO: 337603 - DNA, 839 bp, Cannabis indica
atatattcttacgctatcttacctcgttccgtgctcaagtgtgccgatcagcctgagtgtgcagctcgacgctttacagggccctaaatcataatattgaaaactcgatgagagacacgctaaaacacttatcggggatgtaaaatccaaactaagattaaccctatcgataattaggatgataataccctaaattacgcaaaaacgggaaaaactaaggctcgggaaaaaaagccccaaccagcagaccggttgccaaccggaagtccggttcctggcaccaaccggtcgaccggttgcagcaggcccccaggaaccggaattccggttctgagtatggaacccaaaaattcttccccttaaatcaaatcaatcccaaatcttcccaaaacttgcagaatacctgtatgcattatactaaaccaatcccaagcaacaaatcacaacaaaccactcaaattctaaaaacaccattaaagacctaactaatgttttctaagctttaacttgaacaattcacaacccaaggcttaatcccaacttaaaatggtaagaataaacattacacaacttcaaaattaaacaacatactaatccaatacacacagccatcaaaaatcacaaaactcataccaaaacctaatttaaactacaagaattcaaaaagaaagaaagtaggaaggttaccttgatcaaagctctcaattaccactaaaattccttgattcaaacttaaaatctcaactcccagctactgcccaagagaatcgaaagagagagagagaattgaagagagggacaactattttcttccaatttccttctttttccttcaagct

SEQ ID NO: 337604 - DNA, 1274 bp, Cannabis indica
ggagtctaggatagttgactccagatatccttattcctatccaagaagaccctttagcgtgtgcttcggttcttaatccgagaagcatacgctttatccagaagtactttgtcttttactggcgtagagatattacgaggagtttgttaagttgtaagtaacttaacaacttagcacttgcagccaccgactttaggatatatatcctggatctataaataccaccaacacttaatatttttggagagaacaagatcagacgagtttttgagaggtgattttgagagagaatgattgagaggtatagagagagaggtacggagaaaagagagagattgggtttagattttgtatgaagagtcttctgtagatgaagaagattcttgggtaagagtgtaagagatatacactttgagagaatccaacaaggtgtcaatctcgactgtattgtaccatgttcttacccaattaataaagaggatttcagtggtgttccaaaactgaagtagagccatagaccacatcaatctataggacttgaacaagtacacatcttggtgttgactttattattttattgctttaattgtttctagtttttagatacttcgttcatccctattttgatctctgataactgtgttaattgtaaatcttatcattgctaattgtctattgtctaaagttttatttgatttgattttgcatattagttgtaattttcccacaaatcgagcttggtaatcgatcaagaaggtagaataaagattctttctgctataattcttgaagaacacaattaacagtgtcaacagcaagattcaaattggagaagttcgatggaatctaaaactttgcgctatggagagaaagtttgaaaggaatcctagtgcacaagaaagtctccaaaattcttggagattagaaattactggttgagaagaaacgagaagagaaagtagaaatggaggagatggcttattacatgatcaacatgtatctgtccaacagtgtgagaagagagcttgtcatagaaaagacagctaaagggatttggaacaagcttgaaaaattatatatgaggccatgatcatttgctagcaaaattaatttgctagaaagataatatagttttagaatgattttttctctttcttttgatgataatattgacatgtttgatgatattattgtaggattggctagtataaatcataaggttgatgaagaaagccagaccattattttgtggagatctctcccaatcacatatc

SEQ ID NO: 337605 - DNA, 285 bp, Cannabis indica
agatgtataatttgcatagaaaaatattagaattgatgtatataataatcttaacaacaatataaatcaaaataattaaaattaaaaattaatttagatcagccatgaacaccaagctaatatatatatatatatatatgcatacacttatataaactcaaatgaatcaagataaagatataaaattcgctctcctatacccactgatagaaattttatatgtaaaatgaaacatgtgcatataaaatgtgagataaatgaacatatatactgttggatatttat

SEQ ID NO: 337606 - DNA, 850 bp, Cannabis indica
gtgagaagagagaaataatttcattaaaaaaaaaagcttggtccatggttacactttacctccggagcagagcagcgtttgcttgaagtccaccggagcttgagaatggttgcgtctgggagggagagtcaatcggactgggttagggctggctgttaggggccgtttggtatgcaagtttcaattcatgggaataggtttaatagtgtttggggaagaaagtagcatgcccaaatatgtgtgtaaagcccaaattattttacttttttataaagggctgggtcaggctcggattgggttgattgggttaatatttggggtttcttacacaatttctcacttttttcttttttcctttggggcagaattttttttttaaatattatattttttaaataaatattgtgtattttttatactgtgtactgtgttaagttttcattgttgttttttagttgttacactgttgtttttaattattctgttttgttattttggttgttttataaaaagataatatttttgtaaaaatttgtgtctggcaataaaattgtaaatttttacctaaaatcctatatatattttttttttgttgtaaaaacccattaatatttagcctggttaaagacctattttcgggtcaggttggcagtctgatttgctcattttcgagtcaaatgtcgagttccatcatattactgtcacattcaatcatttgtttgtacacatgcttaaggggaaattttataaatatgagaatttaagttgtagtttacttttttatggaaaaaaaaagtaattagaaaaaatatgggaatagaaaatatttaatgatcaaaatgtggaaaat

SEQ ID NO: 337607 - DNA, 1168 bp, Cannabis indica
ggtaaatcatgtatccggagagtacgaggcttgaggggaaaagacgatagcctatgtgagcaaaatacacgatctgcttgcatagttcaaaagctatgctctcaagcaaattccaagggaagagaacacgacttttgatgcattagctcgacttgcgagcaacaatgtaaatgataaagcatgattcctatccagtttctcaaaaaacccagtatcaccagcaaagaagaggttgaaattattgatacatccccaaactggatgatgccaatagaggcctacctcaacaatagataactcccagaaacgaagcttagaaaatgaggagaaaggttgcacggtacatcgtggtagagggagttatgtatagaagaggattttccatgccattacttagatgtgtcacacaagaagaagctgcacaacttttgtcagaagtatatgacggattttgtggcaaccacacagccgggtagagtttatccaagaaaattctaaggcaagattatatctgaccgaaatatggaagactccaaggcctacgttaagaaatgtaataaatgccagagattttaaaagatacctcgggcaccgcccaactaactgactcgcatgcaaagttcgtggccttttgccatttggggaatcgacctgatcagacagttgcccaaagacaaaggcggagtgcagtacacagtggttgcagttgattactttaccaagtggacggaggccgagccattgtcaaccatcacgtccaaaaaagtgcaggacttcattgtgaaaaacataatttgtcggttcagattaccatacaagatagtattggacaatggcaaacaatttgacagtcaatccttcactgatttctgtgcgaaccatggattcataaaaaatttctccgcggtggcgcatccccaagcgaatggtcaagttgaagcagtcaacaagacattgaaggacaccctaaagaagaaacttgaagatactaaaggaaattggtcggaggaacttcctaaatttctatggtcatatcgcacaactgagaaaacagcaactggacagactccatttgccatgacatatggatatgaagctatgctgcccgtagaactcgaaccaccgttccacagaagattaacatatagccaagaggccaatcatgtac

SEQ ID NO: 337608 - DNA, 951 bp, Cannabis indica
aaacacagtaaaaacacatgttgttgttgccttatatgcaccttcctttcccaaagaatttcaagcaaacatcaaaagccccatcaaccactgctgctgataaagattcaagaccttctgaattcacacatgcaccaagatggacagccccacccccaggaagactcaaactcaacattgatgctgcaatagacacttctaataattatttgcattggggcggttttaagaaactctgaaggttcagttgttgcagcattgtccaaaccattacgaggcaacttcagagcagaagaaatggaagtgttgggacttgccttcagtctacaatgtctactatcgaacaatctttcagtggacctcatagaaacagattctcttttggttgttcaaggactgaaatcctcttacttatttatttctgtttttcatgctatacttaaagatgtaaagtattatctagtatcctatttcccacgagcacagatctctcatgcatcacgatctgctaatacttatacccacactttaactaagttcgctcttatggtagatactgattgttcttagttggagacattttcatctccactattaactcttctgtaatttattcaaattaatataatagtttttttttactttttaaaaaactttttaattttaaaaaaaaaaaacgtccaaccgctacactatttactttaccgtttgtctgtaggtataaattggtagaaaggatttcgaatcatacacattaaagcgaagccacgtggagtgctgtatagatcttgcgttaaaatcatgttctcaaaaataaaatgaattggtttttttagtttttttcaaatgaaaagttattatataggtaagtttaggaagaaaataaaccgtggcgtggcgtattataattagaataatttttttttaaaaaaaaaaaacaacgtgggaatg

SEQ ID NO: 337609 - DNA, 729 bp, Cannabis indica
aatgttggacctgtggaggaattagaagagatcgagatcgatccagctatcccggccagaaagctaaaaattggaaagggtttgttgctcgaagtaaaatcaaaattgatagaatttttgagagcaaacctagatgtttttgcctagtcacatgcggatatggtcgggattgatccttctattattttgcatgtcctgaatatcgatcctaacatccggccagttcagcaaaaacgaagagtgctggataaagaacgagcagtagccctgaaagatgaagttgaaaagctgcgcaacaacaacttcatcattgaagccttttacccggcttgggtcgcgaaccccgtactcgtgcctaagccgaacaagaaatggcgagtctgtattgactttacagacctcaacaaagcgtgccctaaagactgtttcccacttccaagaatcgatcagctcgttgatgcaacagccgggcacgaaatattaagcttcatggatgcttattcgggctacaatcaaatcaagatgcatccaccagaccaagaacatacaagtttccggacagatatgggtctctactgctataaagtcatgccgtttggtctttaaaatgccagagctacataccagagattggtcgatcagatgggtagaaaatatggaagtgtacgtagacgacatgctcgtcaaatccagaaaggctgggggagcacatagacgacctggatgaat

SEQ ID NO: 337610 - DNA, 1127 bp, Cannabis indica
tagtaaagtattatcaaattaatcacaaatcattacgaatcactaccctagtacatcggttaggtaatttctacgaagcaggaggagcggcacaaggcgcccatagaggaggagcgagaccaggcatcggcaactaatggtggcgcccgacttatgacacgtggtcatccgttcatgattgggggagtgtccatggatgttgggggaagtcgtggagacaacagtgggactcgcaacaaccaggtgaccccacgatgggatattaggcctcattggattgaactttctacgtttgacggtgacaactcagacggatggctattgaaagctggacggtatttttccattcatcgtatgacaaatcaagactgtttggaaactgttgtaattagcttggagggagaggctttgatttggtttcaatgagaacatcgtcgacgaccatttttgaattgggaggacttgaagatgcggatgaattggaggttttgacctctgccgttgaattaatgtatcgagaattccttgtcctcaaacaagaaggtattttacgtgaatatcgtaagagttttgagttgcttgcttcttctttagaagggatttcagaaaaaatattagaatattcttttattaatgggctaaattcaaaaatagggtatgaagtaaccgtaatgggcccaagtgggctagaacaagttatgaaattagtctaaaatgtaaaattgaagttgttggcccaacaaaagtaaaaaatctgttatacgaagctctatttcaagattccggggagagctgactggaagtggtgtgagtagcttcgttccatgttcaacaaattttaaagatgaaggtcggccagctgggaatggattttgacggctcaaggagactgaaattcagcataagaaggcttagggattatgtttcaaatgtgatgaaaaaatttcccctggtcatcggtgcaaaaaaaaaaaaactgaactccaggtcattattgttcaagaattcagtaaacaaagagaaggaaacatagatgacttggacgaggttgttgaagaagaagacaccaagttggaaaatcatgtcgtagaggtttcccttaattctgttattggtttgacatcctc

SEQ ID NO: 337611 - DNA, 757 bp, Cannabis indica
tagaattaggattctatttatagtggtattaggaaatatctcactaaaaagaaaagataactcatcttttgaaaaaaagataaaaaaaatcgcaactctacttgaaaagctatctttattttcgctatctttttttcagaattttttttgctgcgacgactgatagtatttttctctcgatattactcggaattgaacgattcaagatgttctgaaaagctcggaacgagatctaaaactttaatgttgagctctaagtccaattctgcatctaagttcgtccgaatttgcaattaagttctgccttgtacaatcgagcttgccgacttccactattttccaccaaaatatgttaaaatccttccaaaagactcaaaatgcatgaatagtctttaaaatagcttaacaaataaaaatcacactaatcaataatttaaagaatcaatttaagaatattaataaataaattaatcatatttataagataaatatggactcatcaccacacgtgtcactgaaaccttcactactacaaatttaccttttagtgacactctttagtgacacgctcattcgcgtgagtcactaaaagattaggagtaatttttagtgacatgcacaattagtccctaaaattcgatgttagtgtcttataatttgcgtcactaaaaatgtgaagtgtcactaaagactaatacccataattttatgaattttttttttataaaaaatgttcacatatagagtcacgccaaaa

SEQ ID NO: 337612 - DNA, 775 bp, Cannabis indica
acttgattgctcaggagaaacctgacaccttgcggagatgccttagcgttactcgagctttcgggagcatatggggttccatatgccttctccgagagctacgtcctggacgctgccttgcggcataatgacttagcaaatattgtaaattgcttgatccacgtgtccttgtctggttggtccacgtacattgggcaaaatcaggggcaacaattattattttatgattaaattttatattattattattattattattattattattattattattattattatatgtttttaataaagtattagatgagaattaaatgacatattaaattttgtatcaagatttacaattatacttggagcatgataataaaagtggattcaaaaatatcacaaaactatattttgtgccaaatatagatcaatttcatctccgatcttagagagctaattttattaaaaatgctaatttcatattgtccaattgcaacactgtgttcaatggagatttacaggggtttattgggagcctagaagagagcttcgatttaacacttggaatctctttcgctctattaaagatgcaagcactctcccttggtgtctcatgggagacacgaacaacttaagttctaatgatagaaaaaagaggaggcaggccatacccggaccgactcatcgatggatttttagaagcgttggacgaatgcaacttaaccgaatttcctctgatgggttacccttttacttgggagaaaggaaggaatggtgataa

SEQ ID NO: 337613 - DNA, 716 bp, Cannabis indica
ttaaaatattatcattattataaaagaatcttaacaacttggagcactttaaaatttataatttaccaaacactcagctcagcttttttccacagttacaactactttttcttacaacacagttacagctgctttttcccgcagcacaactgtgctaaactggccctaattaagtgtagtgtggttgtcgtcaagtgagtctcaagtgaaaggttttagaaaaagatccaagagagtccaaaagaagaactgtctctaggaaggttgcaaaagtttcaaaagtcgaaaaaagtccctttctcagcctcctacttctcattatataggatgtagggtttgttagtgatccccacatgtcggggtatctcattaacaaatcctgtataacactcactactagaaaagcgggttttagtgacacacattgagtaactctaaaactgtttagtgacacttcaacgcgtgtcactaatgagggtgactggaaagacagtttttagtgacacttcacacgtgtcacttaaaccttttacattcactttttgcgcgtcactataggtgtgtagagtcaggttttgtcagactgaaaaggtaacaaccacacacatgaagtgttactatatccctttttttttattttttattttattttttattaacattttcggagctatattggcacacaaaaatagtcactatacttattcatttattta

SEQ ID NO: 337614 - DNA, 611 bp, Cannabis indica
agtattatctcaactagtgaggggaccatgggcctatataaccgagctttcaagaagtagatatagaattcaccaagtaaatttcttaacttattaattctgccttgcgccactatagatttggaattgaatttcactctcaattatatagaacgctctatatgtaccacgatatagatacgttattattatccatttttacaatcctaatagtcaaagatcctctttagatgatctacactgaatagggataaattaactgttctacccttcaatgtattgtatccttcaaacactgagctacctataaatgatacttcagtaaactaatattattactgaaataataaagcctcaaaaatttatctctattcaaccaagctctatggaaatcatcgttttacttctaaatacttatagaagctatagattccatatttatctttagcgctcccactcaattgaactatcatgttcccaagacgtaaatatctgccatatgcattggtttgcttccacaaacaacttgaagaacataaataatacaactaacttgaacctaaccatatcaggattaagatctatagacctaagatcaaccattgatattg

SEQ ID NO: 337615 - DNA, 780 bp, Cannabis indica
tcaacactaggaacacaaactcgagctttgtataacaacattccactgtttgagaatgaaaaccctctaggccgaccacccataactttgtctcgaaccgtaactagctcaggatcttctaattgtgccgttctgattctctccaacagatcagactggagtgtcaaattgtgcaatttcccaactacaaactcaatccctgccctgaccatttcagaggctagttgaggggctatcaaagtcgtggtgcaaacctgcccgggaccttttatgcttaaagcatcgaccacaacattggccttcccggggtgatatagaatttcacagtcgtagtccttaactaattccaaccaccttctctgcctcatattcaaatccttttgggtgaaaaagtatttgagacttttatgatcagtataaatctcgcacttctcaccgtaaagataatgtcgccatatctttagagcaaaaaccacagcagcaagctctaagtcatgagttggatagcgttgctcataatctttcagttgacgagaggcataagctatgactctgtcagcttgcatcagaacacatcctagaccttgtctggatgcatcacaataaaccacgaatttctcttgatctgatggcaaagctaacactggagctgttatcaaacgttgcttcaactcctggaagcttgtttcacacttgtctgaccacacaaatttctgatttttcttggtcaattgagttaggggcatagaaattttaaagaatccctcgacaaaatgtcga

SEQ ID NO: 337616 - DNA, 530 bp, Cannabis indica
tcttccaactcattaatgttgttacacaagactttattatctttaaccagggaacgattttcagcacatgtttccaaccacttaccaaacattaccttgtaagattcagccatagaattctcatcaatttctgactcatctgattcggatctagattcttccttgttgtcatcgatcaagatattattcatgcaaatggtctttcctttttcctgcaaatttcttgacaaaacacttgttagagcaaccttttctttttcatcttcactactctcagaatcatcactccaagtaacatttaatccctttttatttttctttaaggtattggcacattcggattgagtgtgaccaaatccttcacactctctgcatttaataccttttttaatgttagatgaaaaaggtttagagggattattacctgaaatgttaccttttgagctctttgaaaagttctttttatttccaacagatttcatgtatttttggaaattttttgccaatagaaccatttcatcatcattttc

SEQ ID NO: 337617 - DNA, 1283 bp, Cannabis indica
tttgaaaacacagtctttccctaaagctgatcaaacaaatcatcaatttttggaaatggatacttgttgttaattgtcatattgttcagttcccgataatcaatacacattttgagagaaccatccttctttgttcacaaatagaaccggagactccccagggaattacactaggtcggataaaccctaaatcaagcatctcctgaagctgtaattttagctccttgagtttcgcttgagccattctatacggagcctttgaaacaggtttaattccaggtgctaaggcaatcacaaaatctatttcttgttgtggcggtaatcacggcaactccttgggaaatacgtcgagaaaatctctaacaactctgactacttcaggcccaaatgtttcaggtctactggagtcaatcacaaccgcaaaaaatcctacacatccattgtgtattagatctctagcccttaacagtgaaatagtccggactcgacacccctgaaccgatccaacataaacaaatggatcctcaccctctggctgaaaaattacaattttctgcttgcagtcaatgctggccaaatacttggacaaaaaatccatcccaattatgatgtcaaattctgttaattccagctctttaaggtcagcactcaactccctatatttgaccataactaacttagacctaactcgcctattggagataactaactccccaataggaaatagggttccaaaccctcttccaataaaatcacatggcctacccaaaagatcaattatctgtgtcgccacatatgagtgtgtagctcctgagtcaaataacaaagtattaaaggagttgttgacaaaaagctgacatgtcaccagagaaggactgactatagcgtcggcttgagtgatgggaaacacccgagcaggtacgggtttcgcctctggcttttattcttctctctttgtctgatggcaatctttcttgaaatgccccaccatgccgcactaaaagtatgtcttccggttgcactctccgcgatgatttcttacaacatgggcactcagggtaagagtaaccctcgtgtccacctatgctctggttcccacggaactgcttgctctggcttgagccgcgagatgtcgggttagcaccaaatctgtaaattatttctgcttagcactgcagactacctcattgtaatacttagcgttgaataaattttggaactcctcccaagtcataacaatgaactcccaggtgaggcaaaacaattcccaccacactagagcg

SEQ ID NO: 337618 - DNA, 521 bp, Cannabis indica
tgcagttattcactttttgcaggcgtcgattcgtttcttgtccatttattgatacggtgcattaatcggtgtcagacgggtactcaaacgtttctactgccttgatgatgattcaatttggccgttggatctatagaatgtgaatcgattgctttcccagccattcgatggtggctgatcacagctgtctcacgcatgctttggcctataaaagccaaccttcttacttcatttggttactttcaggatttcaccaaattttctcaagttttccagagagaaaagaaacctttaaacaccatagatttcttactccttttccttcgtcattgccaatcgactttctaccagcgatcaacaccaacacccaattcccaagctttatgtaagttcttcgcatcttggactttagtttgtcgtttacatagcatgctttactattcatctgctttctctgggttggatgttgagttttctgggaatttctattttgagtttctgtgtaacgcgttagattcctc

SEQ ID NO: 337619 - DNA, 916 bp, Cannabis indica
ttacctcaattctgaattcaggtgtgtcggtcaacctgagtggaacgaacagcacggcgatttacaggctcctaaaccataacaatcacaacactaaataagtgatacgctaaatcacttcatggggatttaaactagaaactaaaagtttgcctatcgataaaaagcatggcaataccctaaaccacatcaaaatgggaaaaactagggttccaaaaaatccccaaccggtagaccagttctgcaaccggaattccgattctgcacaaccggaattcggttccacacaagaaacacaccaaattccataactcattcaagtcaaacctaattcataccaaaccttccagacctgttctaaatactcgaaagaacatttctaaagcatcaaaacaacccagaaaacacagatactaaaaatgccattaaagctccaagctttgagttcaaaactcaaacttggttaaatctaataaacatgcactaaaacctgctcaaatcatcatgtttcaccataaaataaccccagaaaacaacattaaacaatagctacaactacagcaacgaaaatcaacatattacattgaaaatcatagttttgagctaaaaactctacacaaggttaaaacccaaaaactaacaacatatcaagcatgaattcactcaaataaacacttcaaaacctctgaaacaacaacaacaaactgcagcaaacatagcccaaaaactaaacatgcaatcattttctttttccttaaaaaccaacaaaacctaagggcaagattcaagagcttaccaacaacttgaattacacttatattggttgaaaatgcttgaaaaatcaaggagaactcccagccctagcaatccacaccaagccgagagagagagagacagagagagagagaaagagaga

SEQ ID NO: 337620 - DNA, 804 bp, Cannabis indica
cttaggttgtttcctttttctttaaaagataaagccaaagcttggttaaactcacttccaaccggaaccataacaacttgggatcaactttttaataaatttcttgccaaatttttccccatgtccaaaactgataatttaagaagagaaatctccgaattttatcaaaaagataatgaagaattttatgaatgttgggaaagatttaaagatttattattaaaatgcccccaccatggttttgaaaaatggagacttgtaaaatatttttatgatggtttaaccccttcaaaccgacaaatgattcaatctatgcataccggaaaatttttgaaattacaagggcaagaggcttgggaagctcttgaagaattatctgttaattcacaacaatggaattattctgagcctaggtctagagcaaataattcacctaaaagaggaggaaaatatgaaattaaagaagaaactgatttgagaacatcttttgaaaaattagcaagaaaagtagaagccttagtcataagtcaaactatgaattctcatgttcaacctaaaaaagatgtttgtgctagtacttgtcataatgatcaatcatgtccttcttttcttgaaacattttccgaagaggctaatgcattacattcatatggtaaaccaaatgatagcccattttctaacacatacaatcctaattggagaaaccatcccaatttttcatggagacaaaaccaaccacaaatgaaccaaggaaaccaattcaacatgccaaatccgaatcatgcccaaccaagtcaaccttac

SEQ ID NO: 337621 - DNA, 600 bp, Cannabis indica
ttttcaatgtaaaaatttctaaatcatatatataattgttttaataaataataaaaagttgaaaaaagaaacaatagaaagggtaaaaaaagaagaaaaaaaatattattattattaatttaaaagagaaagataataaaaaaaaaatatatattgttgaataataataataaaatgtattataaatggtgtgaataataatgataataataaaaagtgtaataaatgatgtgagttataaaaatgaggagacactataatttaatgatctatacaaaaatatgtagtttgtataattaaaatgagagaaataaaacaaaaaaaaaataagagaagaaagattaggaagaaaagatcatttaagatgccacatgaaatattttaaaccttcctttatattgatatattgattcttatttaaataatgctatcttttcattttcataactcacaatataacaaaaataattacaccacataaattatatttgatgttactattgaaagtataaaatgattgttggattccttacattttatcttttcttttctaatctctttttgtgtttggaaaatgcagaattgagattgaatatgttg

SEQ ID NO: 337622 - DNA, 1500 bp, Cannabis indica
aagcactggcaaaggaggagtagaagctcgcatctgctcgcatccacccttgatcagctcggatccacctctttgttgctcatgcctatccaaacttcctcctcagaaaggtcaataacctccctggcaggcgctttttcctagaagaggtcccctcacttcctcaagatttcttggccgaaggagatgcgctggagcttcctccgattctcttcttcagagcattaagcatctctaagacatgtctacaaggaacaaaaacaacatggttagagaaaacagacatcagaagcataaagcataacagtcaagaagcttaaaaacaagacaaagtagtatgcaagatgactgcccgaacaagactcgaaagtccatcatcacctgacaagcttcttatctcaggcataacaactttcccttttccgagcacgtgagaaggcggccaagcaggaaaactgggctccctaatgcaaattgcatgttcaataggtttgggcttggctagaagtttcttcctccttttaagcggagtcacctgctcttcctcagcttcatcttcaggattcaagggctccttaccatatttcttggcccttgcacctcttttcaacttagcctcgcgcttcagttgaatcagctcattctctggatgagctcgttcagcccgtccagcactagatttcctcttcctccccttcactggcttagaaatgaaatccttcgcatacagcccgtacttcacaaggttatcctcggaggtaaactggatgatattccagtcttcccctagcagctgagcaagctcttgagctctatccctaagagtaagagtgaggggagggcgctgatatgttggaatctactggaaccgagtatgggtgatgcccgagccatccaccatgaagtactcatcaacaaaatgcccaattttgctgatggccgaatccctggtgcccgtgaaccacttgaagtctggttgagagaaataaaagtaccccaatctgcgttacttaggggtggacttcaaatcaatgaaccagctaacatcgtggggagaaggcatatcccacttcttggacgcgtaaaggacgaagagggcagaaaaatacttaatgcccttgggggtgaactgggccaggcagaggtggaagaagtatgccacattcttaaagtactggtgcaaaggcaacaatgccccttgctgggcatgagcacccgaccaggcacacatccccatttcaaggtttgtgtctcggttattgtgggcgggaatgtaacagtccaatttgccagggtagccaccccggtcgagagccgcaggcgcgcctcagtaaccttgcacctcacacacctggcagccaaggtaccttgccttctgtgaggaaccgcagaagtaaattcctcactaacgtagtccacgccctcaaccaggacgtctccatcaacatcgacttgctccccagcctcattgtatcccccatagttttggggtgcaacctc

SEQ ID NO: 337623 - DNA, 821 bp, Cannabis indica
ttgagcaagcttgagttttgaaactccagctttggtcattaatggcataagttgatttagtgactttttctaagaatttttggttggattatattgtatatgcattgtacatgtatacaggaaagtttggcaaagtttgtgttgattttgaggtcatgggggcatttttcgggttcccagcacaaaactgaaattctgattctgggggacctgtagcaaccggtcgacaggttggtcccagaaaccggacttccagttgggtactggtctgccaattggggcagtttttggaaccctagtttttcccatttttgaaatatttagggtatttccatgttatttattgatagggaaactcttagtttcaaagtttaagtcccaggaaagtggtttagcgtgtcactcacctatgttgtgattaatgtgatttgggcatccatctagcacgagacttttcgttcaggtcggccagcacacttgaattcggaaagaaggtaagaactgtatataatgtatgatatgggtatctgagtgcatatatatgttatgtgtatatgcatgcttaaaatgttaattgcactaccaacacttatacagttatggtattgagtgcattggtataatgagtgttttctgagagtaccataataccagcataagtacggagaagtactgggagtgcgttgtatatcactgagtggtactcagggtatgaaacaaaccctaccaacactcgtacattgaggtacgtagtgtatgtggtatagtggctataccctagtgtggaacattcgtactcatttgttaagccttgtaaatag

SEQ ID NO: 337624 - DNA, 1543 bp, Cannabis indica
ttaataattacagaggtcatttttgttaatatttcttcttgaaaaaatgcatctgttgattctggcggttgtacggtttcgagggtcattatgaattgtcttcatattctgcccttctcccaaccgttggatttctcaatacttagctttcttgtcactggactttgtgtataaaagggcagctcaagcatgtcatttttcataaacctctggctctttagtgagatccattttcataatggatcatctctttcttgctagaatgtcctctctgaattcagaagtccatcctcccaaactcaaaataccaagatgcaccaatcattatccatttgttcccaaatgcttcaagccttaattggagccagaaacgatggattccagggctgaggagcttccgaccaatccaaattaggggaaccccgaagcttgccatgggcgatcctcacttgtgatccttgagggcacagatcttgtgagcgatcttgaaggtcctcctctggctgataaagaatcccagaggaaagttgttgttgtttcaggtgaatctaggaaggaagttggcgttgtttctatcagagaatccaaccaacccaagaactaaacctgtgccagaaaacctttgcgccaacctccttctggtatcgaggaatttcctgaggttgggaaagagatctcggcttcaggaaatgggatcttctgatgatgaggagaatgaggtatgtgctgagatcaaggttctctacatgtagccagtctttcccaagctatgtgtagtcggtgtttgtccaagctacgtgtagatggtctttctcaggctatatgaagacggtctttctcgagtttatcagcttctcctctcatcctttgtttaggaagatgacttaatagtttgcccctagtggcatttttgtaaagacaagtttgtaacccgatttagggtttttcttatcttaaatgccttgtactattttcatttgaacttgatacaattgtgtttgcttacgtttttattcacgatgtaaacaactatatttttatcaaatgtacagtacttttaggtttttccattgctcatactcatcttgtttaagtagttggtgatctactaaactttttgattttcgagcagttgttaattctgcctcgctatagcagttacaatctgccttaagcaaacataaatatactttaatagttttatcagtttgtatatttttaattttcctgtattaatagttatattatctatccattttttaggtttaagtacttttatcaaagcgtcgtgatgcctcattttatatgcgagttataactttcgattttcctttcctgtcagataggttaaaataaaaaattatagtcgtttgattccttcttcgtcaaaaaggtttgatcaaggtgttataactattcgacccctctcgtgtcaaaaaggtttggtcagggagttataacagttcaactccacttttgtcaaagaggtttagtcgagaacctttgaatttcaaaaaaataaattgaaatggcgggtttgcat

SEQ ID NO: 337625 - DNA, 507 bp, Cannabis indica
taaagtacagtttcttatttctgcaatttgttttatttcatgttaagctaaaagatcagattggatcaaatagctctgatgtaagttactgcggtaacaaacacatttttcgatcaataaatgaataaagatagttatttcaaaattcaaattgagtcaaaattatcagcatgtttctaatttaccatccagtgcgtacaaaaggtttggtcgaacccaaaacaccgaacagataaaaagtacactagtaaagaacaagtgaccaagagtcgtacgtctgctcggtcacttggggggcacctatacctgtgaacgtctgctcggtcacttggggggcacctatacctgtacaaagcatttggtaaaaataaaacaatcacatttgcacgatgattataaatagagaatgaaattcattaaaggtaacaaaagcatatactatcgggattaaaagctgtcctgccagcccgttgtctataaaatgaaaaataattccaagtttaaaga

SEQ ID NO: 337626 - DNA, 916 bp, Cannabis indica
tccacaaggtggattcggtccttgtctttttggattaacggttgttagttgactgccaatctaattgagttacaattatctgactttgacataattctgggaatggattttttatctaagtatggagcgatgattgactgtgaacggaagatggtagtgtttgagccagatagtgttaacccagcggtgttcgtgggtaaggttcaggggggcacacattaccgagaatattactgttgaaagctaaggacctgatgggtagaggttgtttggggttcatagtcactgtagtggataccagccaacctgtgacattaggccctgaaaatacgagattggtatgcgagttccttgatgtctttctagaagacttgccgggattgccactcacttgggaaattgaatttgttattgcattgcttccgggagtggatccagtatctaaggcactgtactgaatggctttagctgagttgaaggaattgaagttacaattgcaagaattactgaatctacgatttattagactgagctactcacctctaggtgctccggttttatttgtgtagaagaaagtgttggaaataattttaccaggatcttagatctaatcacaagtatgttgattaacaccctaaatataacttctaaaacgattataaaataaacacatataaagtatgagaaaccttacatggggtgtagcggaacaaaatgtctccttccgttcagatctcttacccttgtatcctttctgtcgcagagtattatcaagatctgaacctggatctctttctctcctttctttagtgctgaaactccttcttgttgaatatctttcttcacgatcttcctcactatgattcaggtatcacatgctgtgtgtgggcactactctaacactaagaggttcgaa

SEQ ID NO: 337627 - DNA, 688 bp, Cannabis indica
aatggagtcttcaagaagccaccccctatcaggggaaaccgcaacaaaagagaccccacaaagttctgtaagtacgagaaagatattggtcacactactttggaatgtttggtcttgtaggatgaaatcgaggagctgattcgaagaggaaagttcgacaaatacaaaaagaatgaggaaggtcatccctgagcggatgacaaagaagaaaatcagaacgcgagtggtttgagagcacctcgcaacatattaacgatcattggagggccccatatcgcaggagactcccgcaaatctcaagagcgatatgccaaggaagctaaagggaagccgctcaccaatgtaaacagtctcaaagaacagccagagaaattatttaaaagagaatgcgatgtcatcacctttatggaaagtgatgcgagatgggtccatcacccgcattacgacgcactagtcattgtcgccaatattggcggagacaatgtccaccgtatagtggtggacaacggaagttcagtaaatctcttgaatttccaagcttttaaccaaatggggttgcatgagaaggatttgcaacctgtgacatcgagtatatacggttttaccggcgatgtcatcgcactaaaagggattattaaactcccgattactttaggaaccgccccgtaacagccaagtcgatggctga

SEQ ID NO: 337628 - DNA, 414 bp, Cannabis indica
taatatgtcaaaataaactaatagatttattagcatatacgatgataggttacacgaaaaaattaaacaaataatgaaaatttgtttcaatatgccaaaatacactaataagtttatttgacatatatgagtataaacatatctaattataagatatttggtatgatcatcatctttttattttaaatttgatgattttatcaaagtaaccaattagtatcttatggaaatcataactaattggtccaaaaaaatatcatatttataatgatttaaaaatttgtaacttcattttttatttatctaatcaaaatacatatattagtttacatttaaaaaatatgtttgacttaaacatttatgatatatttttttttaaattacaatttactaaaatggtaacttactggatga

SEQ ID NO: 337629 - DNA, 1272 bp, Cannabis indica
tatgtgtttatttcgttgttttagaattcatattaggatgttaatgaaacatacttggtagtaaatctagatcctggtaaaatatttccaacagttctcccgtctcgagattagcctatttttatataatataaaaaattaaaaaatatattattcaaaaaatatgaatttttagacaaatatgctgacaacattacaccccgctcatgatgtggccgactatggtcttagacccccatccacctttaatttcatctgccctcagtttttcacattttgttcggctcttgcatgtaatttaaagtaaatttattgttagcaaaatgagagaaaaatcataagttaatggatattcaattttacgtctttcattttatacatgttattttgggtctttccagtatgcgataacctctgcccacacttccagtgtgaccacatctgagtgtgatctcctactcgcttttacctctccatatttcttaatatttccatttcatgcctctttcgtgtctgctctccagtcacgtaggccttttgacattgatttaaaaaatgtaattctggaagataggattgtcagtgagaattcaaacttggactaagaaaaataaacattaaagttatatatagttttgtataatagtattgtttgatctattacaataaaaatttaaatgtcaccaatattctgtctcaaatagtttgaacaattgtttcctcaacgttctcaaactcaaacttgttcaaagaaatggtattgtgaacaagaaacttgatataattgttaaacttgttgccatagtcgtctatcgaagtctcaattcccttataaaatctaaatttcaatttatgtcccgcagtgtaacaccctactagtttaggcgtgttatcgtgatcttaacttaattgtgcagctcgttgctaatcaatgagtttttagaaaatcgtgattatttaaaactttatttaattacaaataaataaaaaataataacatatatacaaaatcgggatcccgtttacaaaagatttataaaagcttcatagtgcatagtacaaaagttgtcgcctagcgactaaacaaaatacgctcagttgtcccaaagaccgtacggtccaggcctaaccgccccgacatgtacaatcttcattcgctcgctctcacggctgctcaacccaagtcttgcccttacctacacatgcaagcaataattgtaagtcgacaaactcagtaagaaaagtataatcataaacataaacatatattta

SEQ ID NO: 337630 - DNA, 795 bp, Cannabis indica
acacaacctagaccaagacccaggactcgaaaaccgatccgaactcaaacccaaactcgaattatgaatcgcaaatggaactagaactgaactaggagtaggaccaggaaaaggaccaaaacccaaacccaaacccagatcaaaacgtagacagagatttaaaccagaaccgagactaggactcaaacccgaacttagaccagcacccaaacccacaccataaccgggacctagacccagaatcagtatagggacctttgaaacagaactaggacttggacctagtacccgacccagaccttaacttgacgtaggacccagctcgtgactcggcacaagaaatcgaaccagactgggacccgagatgggaatccagatctggacccagggcttggacaaaactcatagtcaatgtcagggttagggaccagccctggacccgaaccctgacaaggaccgaaacccacaccctgagttaaacctagtccaaaacccaaaaatggactcgaacccgtaacctgtgacccaaacttagaaccaaaagtggaagttgaccggcactagaactaggacttaaacttggaatcataattttaattggacatagatccagaaccgtaataggaccaagacccatactccaaatcatatctagacccgaattgggacacggactcgaatcccaacccaatcctggactcgggacgcgaacccaaacttgaactcagacccaaacatggaaccagactagggacacaaaacaagggtcgggacctagaaccgcaccctagtctc

SEQ ID NO: 337631 - DNA, 541 bp, Cannabis indica
aaataaataaataaaagagaattaaataatttataatactaaaaataaaatttaaaataaataattgtaatttgtacgcatataaaaataaaatagaacatctgtttttgacacacaaattatctactataacttataactacaatgtatagtggtgtataccatcatataaaaacaatagattataatatttgaggttttggctgtattttgtaaaaggtattaattagaccatctgttttattaaataacaaaatagatattgtatttttcaaaatagtacaaatgagactctaaattaattttttgtcaaataaaatttaataataatccgatctaaatgtgttataacaaaactatttgtattttctgtatctgttcgtattaggaattgttttcaagttagttatgttaagaaaaaaaagttgtccaaaattaaactcattgtcttatttttactattttggaataaaaatgatccattttgtcatttaacaaaacagaaagtttaactaatctaatttttacaaaacacaaaatt

SEQ ID NO: 337632 - DNA, 739 bp, Cannabis indica
atattttttatgataaataagtctcaagtaaaacttttaagtcctagttatgactacatataaaaaaaaaaaaagcaaaaagtgaaaagtgaaacaacaccacttataaagagaacctaataaagtacttcgatcagtatttgatcattaaaagcactattatatattgtgctaaaattgttatcatcagtatttttgtgcatattcaagtaggtactactgtttgataaaaaaacttaatatattatatttcacaagttacccccttatttgatattttatcatttcatatttattttcatcatcatctttatattaagctattcatctctctcccgtgttcattgcaacaccttaactattttaggcatgttaacgtgatttttaacttactgtggagctcgttgctaatcaacgaagttatcgaaaatcgtgattaattaaaattttagtcatttaattaaaaacataaaataggttacatatataatttcgggatcccgtttacaaaagtgtttataaatgtttcactgtacatatataaaagtctgtcgcctagcgactatacaaaataagtctgatgtcccaaagatcgtacgctccaagcctaactgtcccgacatgtacaatctccatctgctcgctctcatggttgctcagctttagccttgcccttacctacacatggaaatagcaactttgagtcaacagactcagtaagaaaaaatataaaacataa

SEQ ID NO: 337633 - DNA, 1133 bp, Cannabis indica
aatagagacccaccagctgcggtggtatatcctgctgcagaggctagacacgagatgttagcagagaggtttcgaaaacaacacccacccgagtttgagggaggcatagacccagtggtggctgaagagtggatgagtcgcatagaaaatattttgcagatgctaagggtcaatgggaatgaccgagtgaagtgtgcatcatacatgttgaggaaagatgctcgtatctggtgggaggtggtggaacaaacaaaggatgtaaataccatgaactgggatgatttcaaaagggtctttaatgagaaatattataacacagcagtgttagcagcaaaggttgatgaatttactggattagcccaagggagccttactgttacagagtatgcacaaaaatttgatagactggcaaaatttgctccagatttggtacctactgatagagtgcgagcacatcgatttgtggaaggcctgaaaccaatgattgctcgggatgtagagattgtgtcaaggggtcaattcagttatgctcaagttgtcgaaatggctcttacggctgagcgaagtgaaaacaaaatttggaaagaaaatgctgctaggagggaatctaagaaaggtgcagccaattctaatgaccacaagaaaaggggacaagatcagcccggacaatcaagtcaagacaagaggtacaaaactgataacgaccaccgatctaatggaaacaatggacgcaatgttccagaatgtcctaaatgtactaaacgtcatctcggagagtgtagggcaaatgcatgttacaaatgcggaaaagaaggtcatattaaacgtaattgtccattgtggggacaaactgagaacaaggaagattcaaaggaagacgataaatatgttccagcgagggtcttcgctataaaagaagcaggacagagtgatgacaagtgctgaggtataagacattgagtcttcgctttcaaaaaaaaaaaaaagtcgagtagaatttcgggacgaaatttctttttaggaggggataattgtaatatacgctttcttgggtaattaattttttttttatacttttagtttattttgtttgtcaatggggataatttattattttgaatatttatgagttt

SEQ ID NO: 337634 - DNA, 653 bp, Cannabis indica
ttcgaatcaaaaatcccccattttccctcattttctttaactcccttaacttccttgttccctctcttttcagagaatccatcaaaaactcccataaattgcccagatttttgcttttctttgtgggttgttttttttctcgattctccagtgctgtcgagggcaatcgtgggaacagattactagaactaaaggttagttttcaaaacccactgcattttgttttctgtttgagaggaaacactgtttttctgggttttaacatgtatgagagggtttacgaataaatgtttgtagggaatacgtatgaagctacgttttttaggtaagaaattgggtaatttcagaaaaaaaaatgacctaaaattggcataactgtgtattgtatagaaaatgcttgaacaaacactacttcatgttttgaatacacgcgggtattcggacgaacacttcgaatactcgcatgcctgtgagacttaattacttctgattgtcgattagatctttaggattttgtattctgtaaatctggttgtgagaacattggctaagtctttcaaatggtggatgtatcacagtattctaatggtcatatgtgcggttatatgttccttgagatactgagatacccccagccatttgcgacatgcgct

SEQ ID NO: 337635 - DNA, 943 bp, Cannabis indica
actggctacacatagacgagaaagaccgtctgcatgtagagagccttgatctctgcacagaccctattctcctcatcatcagatcccatttcctgaggtcgagacctatctcccagcctcaagaaatctctcaacactgaagaggatgacgcaaagatcttgtggcacaggatggggtcttaagttggttggtttctctggtagaaaccacgccaacttcctccccaaatttacctgaaaccatgccgatcttcctttggaattctccatcagcctgaggaggatctttgagatcgctcacaagatctataccctctaggatcacttgtgagaatcgaccatggtaggtcacggggttctcctagtttggattggtcagaagctcctcagccttggaatccattgtttctggctctagttgagacttgaagtttgtaggaacaaatggaaattggttggtgcatctgggtaatatgatcctggaaagataaacttctgatcttagaagggacattttgacaggaaggaagtaatccattatgaaaatggatttcaagccagaaggtttatgaaaaatgacaagcttgagctgcccttttatacacgaagtacagtgacaagagagccaaagattaagaaatctaacggctaggaattgtgtagaatatgaataggcaattcataatgatcttcgaaaccatacaaccgccaaaatcaaaggaggcgtcctttccaagaaaggattttgatgaaaatgccctctgtaattattaaaaagctctttttactagaaaaggactttttaaggggcaatggttaaacccaaaattcagcttgaggacacgtgtcaagataaagagaatgtaaatcggtgccgtatctttttatggaataactcattaattgagtaagtactagactatatttgcaacctgctgactgt

SEQ ID NO: 337636 - DNA, 589 bp, Cannabis indica
accttttagtagcctctttggaaagatcatgatttgtgtccagtatgaatgaattacaattaacactgaattaattaatgtcactctttccatataggacaagtttcttaaactccatgttttgatcctgcttgtcattttctcaagcatactatctcattcagctatggatatctttttagaacatatgggaatgccaagatatttaaaaggcaaatagcttcgagaaaaacctgaaacttcaagtactctctatactattgcatctggcatattggcacaatagactgctgtcttcacttcattcggttggagacccgatgatgaggagaagagcttaagacctctgagcataagcaggatagagatgtagtatccattacagaataaaagtagatcatcaacgaaacacatatggtttaatttcagcactgagcatctatcatgatacttgaacccatctaggttccccactgtaccataatccgagacaagtattccattcctaacacaaacaatagaggggacatgggatcaccctgccgtaagtctctcttggcattaaaaaaaccatctagagaccagaacc

SEQ ID NO: 337637 - DNA, 693 bp, Cannabis indica
atgaagaagaagatgtggttgaagagatttttttaagagattatacacttctgagaagacaagagggagaagtattgaaggaattgagtggttaaaaattttggatttcttggagggacaactagaaaggccttttgaagaagatgaagttaaaagtacgatctttagttgtgaaggtagtaaggctctaggtcctgatggttttagtattacagtctttcaaactagctgggaagttattaaagaggatttgacggatgtcttcaaatcttttgagaaagatggaatgactcaccataaccattgatgcaacaacttggttatatggaacaatggaatggacacggaattatgcactgtaatggttatatggaacaatggaatggacacaggaatatgcaaaagtatgcactgtcatgactttcatagtccgaatggacatgcaaggatctctaagaatttgctagccctactatctggtggaagaaacctatccttaaaatccactggttttggatatataaatcgtttaggtgttgatagttgttgagcacaacataaggtgtttatgctcaccttaacaaagcatggatgattgatcacaatatgcgaaagtactagattgatcggctacgagatcgccatgaccattgatgcaacaacttggttatatggaacaatggaatggactcg

SEQ ID NO: 337638 - DNA, 1912 bp, Cannabis indica
attacaatttgttgtgactaaatgtgcttttagtcataatatatttgttgtgactaaaattaaattagtgacaacttgtaactaaatattatgttttagtcacaagtaacttttcattaagactaaaagtcacatttaatcacaaaaaatttatgttatgactaaaatgttgtcactacaagtaacaattttttgtagtgtaaaaaagttacttaccaaaagaaatgatgtatgtttcttcttcatgatgatacttttctatctacttttacaatactcatttaaaatgtgggaaataagatagggtactagtaggtgaagcttacaactatataagttggctatatatactagtagttttatcaacaagttcatcaataacaaagtgtctctattataaatattttgtagtagagtgaactaaaaactaatatatagaagatcaatatggaaggcaaaactagggctattgtgagtttctgttagtgagccttgttttgggacaaattcaagttgaggcaaagacttgttgtccaacaaccgctgctttgaatttctacaatgcatgtcgtattctaggatcatccaaaaaaacttgtgcatcactcggcggatgcaaaatcatttctggaaatacatgttccaagaattatatatatgagactctcggaaacaatggtaattaaaataaataaactcatttaattattattgtttgcacttataataattattcattattaattacttaacatctgactcgtttacctaaggtggtgatgctgtcaatgaatactgcaagttggggtgtacatcctctatgtgcgatcccttaaccactctccaagactctagtaattaaaccttaattattatatttctttcttactattattttaagggtaaatatcattttgaactctgtattttgtaaaagttactaattggattttcagctttgttaaattataaaatagaccccgtattttctaaaatagtacaaataagaccctgaactgattttttgtcaaaataaaatttaataataatctaatttaaatgtgttatgacaaaaatattttacattttctgtatctattcgtgttaggaattatcttcaagttggttatattaaaaaaaaattgtcgaaaattaagctcagagtcctatttttaccattttggaaaatacatggtccattttgttctttaacaaaatagagagttcaatctctaactttgcaaaacacaaggtccaaaatgatatttacctaaggtcatactaattatatgcaacttattaattgttttggtgactaactagatgcaagtgaagttgtgaatgaagctgttgaaaaatgtaccaaggcatgttttgctatttgcactaagggacgttctattaccgctactactactccagttgaaattgcctaaacaactatgtaataataaataagggatgtcgtcttttcttggctttaaataattgtcatatataatgtgacaaaaatatgctagactagtctaatgctatctagctacgtacatgtatttaagtatgtatgtatgtgtcgtagaagattgtcgatcctagattgtatattcttctacttgttgttattcaaattaataaagactcattaataagtgtcttttttttatcttcttctcaattattttggtttctatttatattctacacgttgtataaatttcactctcatcttatttaatttcaaaatcttttcctaccacattagatttggcctcaagaatgataccactgtgtgacccactcatcaaagtggttattaattttgaaatgttggaagaatatatattttttttttatgattgactggaagcaaaaaagaaaaaattaatttattgacaaattagttattgaactt

SEQ ID NO: 337639 - DNA, 802 bp, Cannabis indica
ttcgatttattcgacattttatacataaacatacattgctagaggtattttaatcctttattcataatggatatatatccaatttattctggttttcataatcatacgtgcttcatattttatgtaaaatgtctaacatatattaaataagaaattttcttactcccccaatctagcttgtcactaagtattgtatttgtattcgagttgttttaactaattttttttttattttaataataactacctattgaaagatttcaaaaatatattgatgttatcaagtattaaatcaggagatgctcaaaaaaaatctcctgcacatagtttatttcattaatttaattatatcagaagtcatgtaatcgaatttttatcttgaaattctttttaattcttgtttagaagagaatgaagattacatctattaatacttctcaatataattatcctaaattaattataactatccgcaagatcacaagatatatgttcattctacaatattataattaattaaagaaaatattgtagggagcgaacccactcgtgcggacaggccactcacgctctataaataaacaattagttgaaaaaatattattttattttgtacactaataatataattttattaattaatattaattatttggtttgtaagcactgctttttattattttatatatactaactataattaaaatgatgagtgagaaatgaggtaagaacaaatgtaatacaaaaaggccccaaaagaagaggatttcgtgtaaagccaccagaaagcagatttttctcg

SEQ ID NO: 337640 - DNA, 848 bp, Cannabis indica
tcacaagtgtctcccaagtcataacagggtgagttctttaaaaccctcctactatgacaaggtaccatgactttttgtctaggaacattaatggtattatcctcgtcggttgtgtcaagacaacagagatagtgggaccatcttatgtagaataagatgatagaacactatagaattgaaaatatctcctctactttgctacttagttttcagatttagtcaagttctcagaaaagtattatttgttgaaacaaacactttcttatcctaatgaccataggatggtacacccctaatcactttagactagctattaaacttgaaaaccttagttagtagttctagcttttcttaagttcatgattaggacatccatgaatctagtaatggtgtgtactaagtatataaccattccatcattctgaagttttccaatcactagggtatttccctagaaggacttaggcaactgctagtaactaatcatagacctttcattttaatcaatatgtaatccgaatttctagggaagtaagtttggataaaattcaaagttcaacttaatgatctttgaactgcataaccaatctctacccctatcagttcgcaagatctttaaccacttacctttaatggttttcaccattgctaaaaattcatgaaatttctcaaccatttaaaatttctttgcataaggtatatctagagtgactgttataagaatttaacgataactcatatgagtcatatccacccctcaacgtacatctatatatttgaatacaaatgatcctactttcaagtagatattggcatattttttctttgcagagactaatcttgtcaaa

SEQ ID NO: 337641 - DNA, 591 bp, Cannabis indica
atcaacaaatattagattaccgaaggaaaattgtaagcttcaaactcaaggtcagctactttgtgaggagacaataaagtaaaatgcgcatggtttcgataaagacaatttcaaaggaggaagaaaaagaagatttagacacggctaacaatttgggtacaacatgaatgagaggcaacacagaggacaactatacagaacaattcaaactggacaacttggagatcatagatatagcttcgtaaaggatgaaaaaaaaaataaacaactatagaaagtagatcataaattcaagacttgaggaagaggggaaattaatattcaagggtgacatccctagattctaaatacccatcgatacaacaacggtgtagatcataactcaaggagaagaggttaggaaagcctcactcaaaggcaagagacaagtgagacacaactaggactaaagtgatacatctagaagaatttcatggaacgacaaggaccatacgagtttttgtgaagtgttgggattataaaatgatcaagcaacataaaagcacagagtatgcaaatgatactacaatccactcatgatttgctttgtgg

SEQ ID NO: 337642 - DNA, 735 bp, Cannabis indica
tttcattctctttcccctttttcaacatttagacttttcccagatttttgcgtttttttgttcattctgctttgtgtaattttagggtttcattttgaacatttcgttttatgttgtttaattttttaggtctttattgttggttttgagcaatttattttgttcttttctgggtttggtttttaaatttgattttgttttctttattttcagtgtttgtttgtgctttaggttctgtattttgttttcgtttttagtgtgtacaatcagttgtatgtagtttcttattagtttttttatagtttaatgttgttatgtttgatgtgtttttcgattttcattaggtctagttgtttgctgttagtttttaggtttcaaaacgatttcagatctttgctgtttatttttgtatagttgtatttgtttggtagtttgtttttggtttgttgatagttttattgtagttgtcatactgtattattcacgattaataatttattgtggccattttggttattttgcaggtttgggactacaaatttagtccttctgattactatagatctaagtgtgtttgcactagtcttttttctgtcatagataatattaagaaaactttgtctgttaatttgctgtctatgtttcgtgaaactcagtttggccattttctagatatgcctgagtttgtttttcatccgcaagttgtccatagtttattactgagggaagttttcc

SEQ ID NO: 337643 - DNA, 584 bp, Cannabis indica
tattttaatctagatattacattgtaccctccttaaaagaaatttcgtcctcaaaatttaacttactaaacactcggggtattgagtcttcatgtctttcaccacttagtgcattgtctcctaatctatcatatggacccaaaaacatgtatttaacttatatcttatcgatcaatctacaacacgtataatataaacagattaattaagtattattatttctctacatattacttaaataccaaaacatactccatcataataactgacatatacatgttttaaatacataagttttgcaacagcatgttcgtaatattataaaagtttttcttctcttatgaacatccttacatgccattaagagtgaaaatatttattcttctatgaacatccttacatgccattaagagaaactatttattctccaaatgaacttccttatatgtcacttgagaacacattatacaatacaaaaataccaaacaacaaagagtagggtagaagaccttatgcaatttctttttaattattctcattctttcattgaatgttaatacatacaaaaatcttacttttctact

SEQ ID NO: 337644 - DNA, 1545 bp, Cannabis indica
tagtattcccagaattatgtagaggagctggcggtcccggattggttgggttatcaccccgctctacagactcaccctgtgatctacttggttcttagggttccttctttcaaataatcctgaaatcaacaatcctagtgagtcaggcaccaattccacacttacacacgtcatgccaaaaccctaattaacacacacaattctctttcccaaatataacaattattatttacatttaataatcatgcttttcattatataaatatatcttctagatgctcatatgttgcctattactaatagtagtaaacatttattcacataagcagataagtatttactctcaacacttactgtaccatgagtcgagcttattttttacgatgattgtacatgttcagccggtcttcaagaattttaaaaaccttggtactctgatacaaaattgtaaatgtcctactcagaagaatgccacgtgtcgtgattacaagctactattctcattaatcggggtctataagccaggtgatttaaaacaaatataaaacttggttaaataaataaattgcaataaacatcgacgtcttagtataaactaaaataatttaaagtgacatactcgggatcccgtaaaaatttatttttcaaatattacaagttatttattacatgccgacctaagcgacaaaatggaatttctatactattcctgtttgacccaaacctcgtggtctagcatagctagaacatgtacaagtcatcctcaaagtcctcgatctcatggttgacccaacattgctttactcttgcctggacagtagagcacccctgagcctaggcctagcaagacaaaaaaaaaaagacaatatgataattataataataattatacttcatacagtacgccactgcgtatatatactaagccatcacactttatatgaaattattctatataataatgtcattataataaatgcctatgtcatatagacctacgtgttacactcacacgtctttttacatttaaggccttacaagagtttgtctcggttataatcactgagtctaacatggttatgtcttacctgcataactctatatatgtaacgcccctgtattttgccttattttataaaatactaattttgatacattaattaaaaagattctaacggtttggaaatacataatggattttacaataaatttgcaaaaaggcaaatgatcattcatattaaaacaaaataagtagttgagtgcatttttcaaaataaatttgcaacatcccactaagttcagattcttttactatttaaaaataaaactaaaggctccaccggcgttctagatcgtttgctcgtccatacgcccctcacagtatacataccagaactaacccagttcatcaaacttacattcaatgttccctgcctatttcatgtagggtaaaagtaaagggggtgagctaatagtccagtaaggaaacgcttaacatacaatagcattcaatataccatacatatcttaaaattcacaacaata

SEQ ID NO: 337645 - DNA, 645 bp, Cannabis indica
agtgcaattctaaatctatagcggagtcgggagaaattaataagctagagaatttacttgataaattctataactaattattaagagcttaattatatagactcatggtcctcacactacctgagatcttattgccttgaagactcaattagttggtgttagttaatcaattaggattctaaataattctatgttttatttatgaattttaccatgtaagggaaattttaagaagaaaaaggaaatctagagtttaggtattaattaagagacttgggagaatctaactaataattatgttaaattgtaattttatttgataattaaatataattattaaatagaaaaaattaacattaaagggcttagaatagaaaaatagtatgtttgtaaagagataagcctagaattaaaatgtcatttataaaagggctattttcaaaaatatgggaaaaattattaaggttatgataaatatggcataaaaagtaagtgtcattaaatatggtattatctaaccaatcaaactaaaaatatggctttttttctaaaaaaaaaccatataaaacattaaaaagaaatatgaatttaaaattcataaaaaataaaaacttaattaaattactataaaaaaatattaaaatt

SEQ ID NO: 337646 - DNA, 482 bp, Cannabis indica
ttttactaactctggatcagtcatctgagcgactttaattcgttctaacagatcagattgcagcgtcaagttgtgaagcttgcctacaacaaactcaatgctagatttgaccatgtcctctgctaactgaggtgaaatctgaatcatactagctacctgcctgggacccttcctgctcagggcatcgaccactacattggccttcccagggtgataaaggatctcacaatcgtaatcctttactaactccaaccatcgcctctgtctcatattcaaatctttctgagtaaagaaatatttgagacttttatggtcggtataaatttcacatttttctccataaagataatgccgccaaatttttaaagcaaacactactgcggccaattctaggtcatgagtcggatatcgctgttcataatcttttaactgacgagaagcataagcgataacccaatcgacttgcatcagcacgcatccca

SEQ ID NO: 337647 - DNA, 769 bp, Cannabis indica
atcaaataaataatagatttgttaaaaaaaaagttttaaataaacaaacaatacatgtaacaaattgtaaagtgagatacttatttattatataattaaattattcttcaaataaccaactattttgaaaatttaaggttatggaaacaaccttttataatttaaaattcaaactaattttaaaatatataggtttcatttaaattattttatcatattaaattaaatatctaataagataaatgatatgaaaataaccaactagatatttttcatatccatttttgattttataatttaataaaattaaaagggtaaataccattttgaaccctatgttttgcaaaagttaccaattagaccatctgttttgttaaatgacaaaatggatcatgtatttcccaaaatagtaaaactaggaccctgagcttaatttttgacaactttttttaatataaccaacttgaagacaattcctaacacgaacaaatatacaaaatgtaaacagttatgtcataacacctttagatcagattattattaaattttattttgacaaaaaatcagttcagggtcatatttgtaccattttagaacatataaggtccattttatcatttaacaaaataaatggtcaaattgataaactttgcaaaacacaaggtccaaaatggtatttgcccaaattaaaataatcaaatgaacttttaaaatagatatggttatctattaaaaaaaaatagatttggttatgcaattattattttaa

SEQ ID NO: 337648 - DNA, 654 bp, Cannabis indica
gtaaaggcaacttgaatcgaattattggtaattttttattacccttcaaataatgttcaactagcatattcttatcctatttgaactgaaaaatatcaaactcaatgtggcaatctagacttgtgactaaggaaaattcttctacactaaatttaagaaatttcccagcaacagatatgtagaattccatctcattaggtttttgaacttcccatgcaagacttggaaatcaataatgcactctagaattcgaaggaagtgaccaaaaacagtttaggaaaagattttcaactgggttggggttagaatagttttaatatcgttaataattgaataataacaagaagttattacttaattagaatgataatgttgtaaacgcttatatttacatgtccagtcttgagtaaataaatatgcaaatctatttcaaaataactcaaaaataataccaaaacaactaggaaataaaaaaataaataattgaaaaaaagtctacacacttcaacaacaatatcatcaaaaggctcttcaaattccaatttagtaggaatatttagaatagggaatttccccttcccatacaaaaaaataaagtaaaagaaagagaagaatacaactgctatagaaagtataaatcaactcaaaaaaaaa

SEQ ID NO: 337649 - DNA, 606 bp, Cannabis indica
aaaaaaatagggatcaattatatatgagacaaaaaaattagttccgtaaagcaactaagataaaaactcacgcacaaaaatcaattaaataaaataattcaaacaaaaatatttattcaacatgctccaacctaccaaattattacactcataccatatccaccccgaaaatattcatttattatgttatataaccaattctactttagttataatcggtttgagttatttcctattatttgtttttattcattataacactgttatagaaccgattttatttcaattataactggtttaagttattttgtgttatttatttttattcgttatgttacagaaccggctatatttcaattataactggtttgagttattttgtattatttatttttattcattatattttagaaccggttctatttttgtttatttctgagacatctaacttttcggcaacgtctctggcgacgttttggcgacactaacttttccggtgactttttcggcaccgatatctttttcggtgtcggtgactttttcagtgacttttattattgttttaaaaatatgggatttcatctttcttttacaaaaatatggcat

SEQ ID NO: 337650 - DNA, 943 bp, Cannabis indica
tatttataataagttgagaaaccagttattacatatataaagaaaatacatactaatacaaaaaaaccagttactaacgtatgcttataatttttttacttttttttttcttacttgttacaatttcatatataaacaggttgaagcaataactactatactataccaagtaaaagtggtaaacaaaggggattttacaataaacttacttgacaagacatgcacatgtagaaggttccaacaagatcagataccatgtgcacatgcaatagcagtttttgctaaaagaggactaaaaacttatgactatgtggctgactactacaaaacatcaactatgagagcaacatatgatacaaccgtacatcctctacctaatgaaagtgaatggagactacctgagagcttggagaagattgtgatgccaccaaaaacaaaaaagacctcagggagacctagaaaaaaagaatcagatctagaggagaaccaaaagttgtaatgaaatgctgtggacaacttggacacaaccgaagaacatgcaacaatctacagatttacaaacaaagcaatcggaagaaacagaagatggacacaaagcaacaataagtaatagaacaagcacttggagaaaaaagtagctttcaaaaactacaattacaaaagctacaaacgggttactttgctattatatatgacatttgacaaaattactttaaaaatagattttttttatttatttgctttttttagagaggaaaatagatgttttgatattaaggaagttaaaaaatatattttttttaaatgtcatcaagataaatagtatataattatcatattgactataaatattaataaaattaaagaatctggttatgcatcaataataaaaattacaaaatatagatacattgaaatttgaataatatgtgcctactagtac

SEQ ID NO: 337651 - DNA, 586 bp, Cannabis indica
aaatcgaccagactgggacccgagattgagatccggatctacacccaagggttggaaaaaacccgtagtcggtgtttggattttggacccagccctggactcgaaccgtgacaaggacccgaacctgaacccacttcccaacccaaaagttgacccgaacctgtatctgtgacccgaaattgaaaccaaaaccggaagttgacggggactggaactaggacttgggcttggaatcataattgaaatttgacctagatctagaaacgtaaccggaccacgacccggactccaaatcagacctagacctgaattgggagccgcacctggatcccaacccaatcctgcgctcgggacccgaacctgaaatcagaccccgaaatggaaccaaatgttgaaacacaactagggtcaggacctagaaccacacccttgtctcgatcccgaacccaaacttagaaatgggacctgggacctaaacctgaacaagacggagacccgtgacagtgatacagatcttgactcggaattctggtaacggggctaggaacagactagtaggcgttgtctagatctgggactcagacta

SEQ ID NO: 337652 - DNA, 786 bp, Cannabis indica
ctctaaaggaatcaaatacaaccttaaacaacaattagaactgaattaccaacaacaatcaagaaccctgattgttagtgcacaatcccttgtgcaacaactgagttcttcttcaacatgtcttcgacctgaaatcccttcagatctgatgatgaagatgacactgaactccctccagtttgaactcagcaactccagattcaaatcattccgccattgatgaccatctacaagctacacgatcttacctgtaatcacaagaacaagaaacaagatacgacactatctccacagacaaccgaaataaccaactgaacgatttttttgataaactatttactaacagaaatcgactatttatatatccataaacaagtccacctggcactaactaacacttaacagaaactgacttaacagaacgctagtgcagatataacagacttaaaatgccagacacgactagacattgaacagaacaaaactgtcacaaaataaagacacttacacattcatctccaaactcgaagggtacaccattaacaaaaaggggggacaatggtttagagatctttgagaagtctttaatgaatcgtcgatagaaaccagcatggcccaagaaactccttactcctttcacagaaaccggggtggaaaattctctattgttgacactttagccttgtccacctcgatccctgcttttgaaattttgtgtcccaaaactatcccttctttcaccataaagtggcacttctcccaattgagaccaagtttgacttttca

SEQ ID NO: 337653 - DNA, 723 bp, Cannabis indica
tcggccccacccacgcccttgacggacgacgggccaccccgagtgccaccgccagccgaacttacagagggcgagaccaagaatcgaccagaaaccagtggggtgtaaatgttaatatcaatgagaaatctaagaaagccaccccgatatactggtttattttcatccaaatccactttaagaacgttatcaatcatatctcccaacaaattaccattggagattgagtgtgagtaggatttcattcaaagagatctcacaataaagaagagatgaaaactataacaaaataacagctctctctctctcatctcctttctctctctcactcagtcccgatctaaggctctctctctctcacaaactcgatctcgactcactctctttctctcactttagtctcgaaatgggtattcaaaacccatgggcagctactcggatacagagaccaaaaaactcggtcagtcgacgacatcgcgagagagaaacccagaagcttctattaacctgttgaaatcggcaccgtcgcaccgtcttcaccctcaccatcgtcgcatcaccctcaccgtcttcaccctcaccatcgtcgcaccatcgtcttcaccgtcctctcacttcaaatttcaccatcgtcgcaccatcgtcttcaccctcaaaaacaacactttctcactcagccaccaactactttaaggtcatttgactcttgtatttatataaata

SEQ ID NO: 337654 - DNA, 842 bp, Cannabis indica
tggaatcgggtatccaaaggtgggtacaattcaaatatgagaaattggggatcttttgttataactgtggcaaattgggtcatcaaagaagaggttgttccctttcttctccagtcacggtatcaagtgagaatggggttcctttccctttgtttgggccttggctgtctatggattcatcatacctggatgtcttctcgggtgccaagtccttcactccggcttcgtcgtcttcggctcaggtaggcactggttcggttcgtgtggggagtcgaccgttggccatggtctctggtgcaaagggatcggttcgacggacccctacttctcggttactgagtcgcacggtgatggcgacgggtcgtagctcgctgggaggaggtcaggctcaaaataggttatgggttcccaaagctcgccctgcctcgcgcatgccaggaatttctgttatggttaatacagctcttggtcgtactctgcttgatggaaagttgactgaaaacttgcctattattagttcaaattctgctgacctaaagaagatgtgtggaaaagagaaaggctttttagatggggttgttgggccggctcactcttctattgggccggtttcaaaaatggatcaatttaaagatggagcttcttctggtgggccttttaataggtgcaatgaatccaatttagcccttaatggagccgagcccactttggagaaccaaaaaacatttctgcctttgcttaaggttaaggggtcgtgtgatacctttgggccgggtgggcttcctgggtttaaaaataataatattgctagttgtgaaaggccaaccaagaccatttccatt

SEQ ID NO: 337655 - DNA, 454 bp, Cannabis indica
taagatgagaaaatgagaaaatggcaaaattgcaaagtggggcccaatatccaacccatggctggccactctatagcaatttatcatttaattttttcattatttaaagaccaaataaatctaacctaaccctaggtggtttcttataaataggtagtgatggcttaagggaaaagatgatgcatttcattccttcagataaaatttgagcctccttcctaattctagccgaaactacacactctctctcttcctctcttctaaactgagcctgtagtgaaagagtgagtgcccacacacatcaagtagtactcaatcatagcgtgtaaggctgtgaagaatccagtttcaagagaaggagattcagactcagatcttggtgatactctgctacagaaaggatacaagggttagagatctgagtggaaagagacattatattccgctgcaacca

SEQ ID NO: 337656 - DNA, 1341 bp, Cannabis indica
cactcgttagttttctcttaaaatctcaccctacacatctcaaaaaatgatgaaatttcacaagcacaaagcaaagaccattgtgcatcacttttttgttagttatattaagagaaaaatcgttttcaagcagtaataatcattctaattgaaatagttaaagttttacatatctaatagttgtacccctttgtgaaatgtggcgcggacccatctcgaaatatttttccccactagtcacaatgaattcgtactactaacacgtgaatatgaagattggtttgaagttaaattttgttaaaatgactcctttttcaaaaattgaaatattcttttatttaggataaatttcaacaagttttttccttactcttacagtccttagtgttctttcaaaatctcaccctacacatcttaaaaaatagtgaaatttcataaggacgaagccaagaccgttgtctataacttttttattggggtttgggggtttacgatttggggttttcagttcaaggttcgagggttttgggtttaggatttggggtttgtggtttgggggttcggggttaagttgttttacattaggtgtttgggtttggggttttgagtttggggtttggggtttttaagttttggatttaaggttttgggttttgggattaacgggttgtgttttgttgtttagagtctttggcttttggggtttcggggtttgaggtttagggtttgggcttttatgactagggtctagagttgaggatcttggaccaagtatttggggtatgagattttaagtcttgggtttggtgtttgggttttagtgtttcaaaattttgggttagggttggggtttgggattttgggtatggtgtttttgtgtttggggttttcaggcttgctgtttttggcattagggtttggtgtttagggtttgatgtttggggttttaaggttttactgtttagggtttggggatttgggatttagggtttcgggtttggggtattgcagttttggcatttggggttttggggttaggggaatcgttatgggaatgggctggggaatgggaatgcgaataggaatagaaattggaatgggaatgggcattggtcgaggaatgggaatggagattgagaataggaataggaatgggaatgggccaaggaattggaatgggatgggaatcgcaatgggaatgggaatgggctggggaatggaaatgggaatgagaattggaatgggaataggactggaaatgggaatatgaatgggaatgggccagtgaatgggaatgtgaatgcgaatgcaaataggaatgggaaagggaatgggaatggg

SEQ ID NO: 337657 - DNA, 1151 bp, Cannabis indica
atgcatactccatacatccaaccaagcttactttgactaatgccctggaaaggatataacacttatccaaggtacaagtaaactacgttgtagattatcatatcagttaaaccatgtgtactgataaatttaggaatacatttaatcacacaatcttgattactttcctatgtgttgacaacacaataaacaagaatatcaatgtgataaagatttggatgaatttattaatcaaataagtaaataaatgatcatatgaaccaaataacacattaaacaagtaatgaaattaaatctgtttctttattgataattgaatagaaaagattacattgaaatagagttttattgagggcacaaagcccaaaaaatactgccattgcctatggcacgtgtctccaaagctggagagcactgccatttcctatggcacagttctccaaagctggagagcacttccatttcctatggcacaggtctccaaagctggagagcactgccaattcctatggcacaggtctccaaagctggagagcactcccatttccttgacacatgtctccaagaccggagagcaccgccattgcctatggcacaggtctccaagaccagagagcactgccattgcctatggcacaggtctccaaggctggagagcactgccatttcatatggcagtggtcacttgttgctcttctcttgtggttttagtgctattttgactttatacataaacccaagtcatttttatgcctaaacaagtcaagtccttattggtttccttggcggattgatgtctctagggtgaaaacgctcgcgcgggcccataaaccctcgtttgggcacacttcggtgtgtgagtcccggcaccaaatggttggttgacatttttgagctctctagaagtgccatggggccctcaaaaaggatatcttaatttatttgacatttatgagtcttggtcaaagtcgcaaggttaaattttttttaatttttcaaaaatcgggtgtaacaaaaataaaatttgtaagcctcaagttcttgtctaacctatctttttcatatttagattgattttatcttgatttaagcttgaatataaaaagaacaaaatcaaagattcaacatcagaattttacaagcttcacctg

SEQ ID NO: 337658 - DNA, 1231 bp, Cannabis indica
gacaaggctccgggacctgacggtatgacactagtatttttccgaaaatgctggtcggttgtgagtagtgatgtaattactttggttcgaaatttctttcaaatggggcagcttcctagaggtttaaataacactagtttagtgttaattcctaagaagaaacaaccaatggccatgggagacttaagacctattgctctttgtaacgttctttataagattgtttcaaaggtcattgtgaattggcttaaagttgttatgccttcaattatatcagatactcaaagtgcgtttctccgaggtcgtttaatatcggataatattatgatttcttatgagataatgcattatttgaagaggaagagaagaggccggaatggtgttatggcacttaagcttgacataagcaaggcttacgactgacttgaatggggatatctttgggctatgcttgaaagaatgggcttcaatggtagatggattaatttgattatgcattgtgtgggcattgtctcgtacacgatctctcatgggggaaaggagttgggccctattgttgcacaaagggggctgcgccagggtgatcctttatcaccatatttgtttattctctgtcttgagggtttctctagtttgttgcatagttatgagcaaagtggatcaattacataatgttaaagagttactgtatacgtatgagattgcttctggctaaaagataaatttttcaaagtcgtcactgttctacagtcacaatactagtacctctcaaagggatatcatttgtgagctgttaaatatttatgatgttgatgagaatgggtcatatttgggacttccatactcggtgggaaagaataaaattgctatccttggttttcttaaagataaaataaaaaagaaaattcaaggatgggaagggaggatattgtctcgtgcggggaaggaggtgttgctgaaatctattgcgcactaatttcttagctatgcaatgagtgtttttctgttacctttggatacttaaagggagttggagcatctcatggctaagttctggtggcaaacggactctgttcgtagatcgagtgttagttggatgagttgggatctttaagtcgtcacaaacatgttggtttgagttttcgaagtctgcgagacttgaatatggccctgttggggaaacaatgttggaggttgtttgttaatgatacgtccttggtgagtaaagttt

SEQ ID NO: 337659 - DNA, 1021 bp, Cannabis indica
tgcaaaattttaagaaatttggaaaagtttaaaatgccgaaaattatgttcaaacagtgtattgcacgcgtgactattttattttatacgcgtgtaaaataaactgtttgaacattgttttctatattataaattattccgaatttttcaaaattttgtaggatatcttaaatagctataacgtacatgaatatgaaaaaaaaatcagagtaaaaaaattttctggatgccgaaacaagttaagggtgcactaatacatctcttttaagggggtgcattgtagaattaccctatatatacacacttaatgccatagctaggttcttaataatatgcctttgactttgtgcaaattttatcaatatctgaacatatatatttgatggaattcatttcatataatagaaaatggggtaatataatagtgtagtcatatatcggcaaaattaatttacaaaagaaaagacattgtcaaccgctatggtttgaaaatattgataagaaacttatgtttaaaagtaattataatttattttttgaaaggggattttctattttattttaatagatatttgtgccttcattaccaatcctttatctcacctactccattaacacattatttcaaaactatatatcgcctctttttcaattcaggtatgttcgactttatataactcaacttacatttaaataggaattaaagttaataaaaacggtgggcaatactaaacatttgaatgaaaataatattaaaatcgtttgacgtattattggtcattattttcgcaattgtgacacatattatgaaggaattaatatattaatattcattcgaaaataggtcaatgtcaacaattaaattatatgaatattttcatttcaaaaaaacaaattatgacaattttgtggagctacggcctagggctaatgctttaagtttaaaataaattagccatctttaaccttaggatgtgtttggaaggagggagacatgggtggatggagagggaaggaggga

SEQ ID NO: 337660 - DNA, 657 bp, Cannabis indica
ctgagggtatattcgtcataatctattttgaaaaaatgcatgcttttgaatttggctgtttatgttttcgaagcacatcattaacattaatgagccatcttttcgacctctccctcgatttctacccgttggatcttttgtcttttaatctaacggagatcaaactcaaggtataaaactgaaaaaggaatcacctttcctccatgtttgccatttcaaaaattcttgagctttttctgcgaaaaagtccattctgattttttgtagctttgcatgccctcattgtcattgacatatttcttgcgcgtacactcagatatactgttcgacctcaggagttcaaaaagattatcacgacattcattccatcttcggttgtagagctttttatcgtacaaaaactcgacttcaaacggtaagtgacccatctccattcttctgttcttttttatttttttgggttatgatccccatgctattagttacatctttgtctctccatttggttttagcgattttaatttaatttttttggataatttttagagtttaggtagagtaaaaatttaggtttatcacattcgtaggtctctaatttaataaatttcatctaggaattgggattgttcttttttgtagaaatgtcccaatctggtt

SEQ ID NO: 337661 - DNA, 930 bp, Cannabis indica
ttggaagattgtgaaggatcaaatccaagagaaggacattcggactcagatcttgataatactctgcaacagaaaggatacaagggttagagatctgagtggaaggagacatattattccgctgcaaccaatgtaaggttttcttaactttatatgtgtttattatcgttttagaagttcatatttaggatgttaaataacatacttgtgagtagatctaagatcctagtaaaataattccaacatatagatttttaaacggaaaatgttaactttacagccagagggtgaagatccatttgtttatgttggatcagttcaggggtctcacaatttcggttatttcggtagtaaggatagggatctattacacagtggatgtgtaggatgtttagcagtggtgattgactccagcagacccgaaacatttgggcctgaggtagtcagagtggttaaagattttcttgacgtgtttcttgaggagttgccgagattaccgccgtagcgagaaattgactttgtgattgatttggcacctggatccgaaccagtttctaaagctccatatagaatggctccagcagaactcaaggagcttaaattacagcttcaggggatgcttaatattgggtttacacgacccagtgtgtcgccttggggagctctggttatgtttgtgagaaagaaagatgattccctcagaatgtgtattgattattgggaactaaacaagttggcaatcaagaataagtacctgttacccagaattgacgatttgttcgatcaactttaggcaaagacagtatttttgaagattgacgtatgatccggttatcatcaactcagagttcgggaagaggatataccaaagactgcattccgaacaagatatgggcactatgagtttctggtaatgtcattcggattgac

SEQ ID NO: 337662 - DNA, 924 bp, Cannabis indica
ccatcaggtctgacttctcctgatgaattactagacatagtctgcccgcctactgctaggcccacaagtggaactcgtgaccagggattgggcggctgatcatttgtagtctgggaagtattcatcgctggatcttcgtccgtctcacccaggggaatgacattcagaggttgctgacctacagtttggtaagcttttcgtatcaacatggtagcttgccgactacgattttcaatctctgtatggtgagcccttaacgcctccatctctctatctctccattcggtaaacatacgcctttgttcttcgaacgcgagatttaccgcagtgcagagtttgtcctgatcatgatgtagggtatttttatgaccctgcatgagtccaagagcgtcgcagagattttgtaactcaatagcatcgtcgatggccgtttgggtgttggttccaggcagaatagttgtcttatgaatgccctggttaggtgcagaactgttattcccaatctcttgcacaccaggcgcgatttcatctataggagttgttacaccattaccgacatttgtcggctgtccaggattaaaagcttgcggaacccttgtgtttcttggttaaattttgaataaagagcaattcttgattctgctcttaatgaaagcaccaaaatgttgaccttgcttttagccaactacaacgagtctgaattagtaagcgataggtgatttatagtaatcgatatataataaagcaatataaggacacaagaattttatagaagttcaaccccgagcagttcggtaatagcctaatcctcgttacttgtattgacttaagaacacggagaaaggttccttttcttatggctcttacaacagtatctctaaatatgtattcttagataatatctttagggtatagtctcgacta

SEQ ID NO: 337663 - DNA, 542 bp, Cannabis indica
ttaatttaaaatatataaaatatcaaaatatctaatctttaaataaaataatatataaatattaaagaaattaacaaatttttaaatctgaccataatttaaaaattaaaataatcaatttttaaatttaaacctcaaaatattaaaattaataataatctattaaaaataaatattattaatttaaaatatgatatttaagttcaaatatatttaaaaataatattttattttaaatttagggttttgaaaattggaaaaatcggatttttgggaaaaatcacataaaaatcggattttatgggtgaatgctgccagtaggctgcaaacgcagcctttgaaggctgcagatggtactggacgcgcgcggatgagggaacccagccgaggtttctcggcggatgcagcatcgcggacgggcgtctgcagcctcctgggcgtgtccgaaagagtgtcccgtgtctaaagacacggggttgtgtccgagtgcacgcgcgcggatccctagttgtccgagtacctggtgcgattgatgcacccct

SEQ ID NO: 337664 - DNA, 1062 bp, Cannabis indica
atactcctctgcaccatgtattgttgcatgtggttgttctgctgaattatataactcagctgtgcatgagtgtattgtgttgtgggatcgataggcccaggcaattgtaggggctgctcctcttcttcttcaacactaggctctcgttgccgcctacgcccttgcggtgcatcaggtggaggttggccatagggatgtggctctttcagcctgttgacaaaggcgatgtccatcttgcgaagtggcaacaccgtgttgtcatactctaattggggaacttcatatgccccgcagagttctgtgataactcccgccaaaccaaaaccacctcccgtggctccttgcacgatctgttcaatgctttgccttatgacttgtccaatgttaatgttgtaccccttcattatggcgtacacatatttcaggcgatccatttggacatcggaaaagtgcttatttggcactaaccgagcacttacaaagtacagccatgtttttgccaccgggttcagttcacaccggtataggatgtttggcgacccctctgtgccatcattgtcatggaacctcaacccaggaaatcccactgtctccgccacatccaccatatcaaactgctcttcctcctcaataattcggaggcgttgttcttccctagtgtaatcttgaacagagaacatcacattaaacgcatcagcagtagcgggaactttctttccacgcactttcacttccccattccggcggtcgggccaattgcaagaaattcacaagccatagtaacattagcccgaccccgagcatccacaaaacttccccacttcattctttctatttgagcctgaattgtttcaaatcgaggttgacgcctcaaaggattctcggggaattcaataccccgatcatcaatataagccctattcttaagtctcatgaagcgattttgggcctcaatgtttccaaagcgggtcctatcaaaacccgttggtaatgggtttgaagacgaaccttccttcacattcctagtccttttaggtgccatttttttatttattatttttt

SEQ ID NO: 337665 - DNA, 551 bp, Cannabis indica
actttttttttttatttttatatttacaacctcttttccctttttccagacaattataatttttatctttaaggggagacaattttaaggcctgtccccaagccctcaatattttttaggacctgcttttcgatcaggacatcttttacatttacgtctaaatatatattttgcttaaatacatatcttgcttaattttgctaaacttttggcctgttttacatttgtccgtgtggtatgctttactacccccctgagtggcatgaaaacattatttttgaggcactcagatttattcataaatttggaggttgcatatactttttggtacaaattttcttaacaaagcctaagtttacattttctaactattggtaatacttccggagatgatcagcgttccaggcccttggcaccatggtttcatccattctttttagcttgtaggtcccggagccgatctcatccttgatttcatatggtccttctcaatttggcccaagtacccccactccgggttcctgagtggctgggaagactcttcttaagac

SEQ ID NO: 337666 - DNA, 584 bp, Cannabis indica
agactccttggacttgggagacttgggggtagaggggtttgcagcagtcagctcctcagaaagatcaatgacctctccagaaggtctcttttccgaaaaagaggacccctcaccgcccttagacttcttggccggaggagaggcgctagagcttccgcccattctcttcctcagagcatcgagcatctgccgagacatgtctgcacagaacgaaaacagtatggttagaaaacagccatcagaaaaacactaggcatgaaaatcaagaagctcaagaataaagtaaaatggaaggtcaccgcccgcacaaagactcagaagtccatcatcacctgacatcgattttatctcaaacatgacagctttctcttttccggcaaaggggggagatggccgaacaggtgaaatgggctcccttatgcgaatctcatgttcaacaggcctggacgtggccgggagtttctttctcctcttcagtggggtcaccttctcatgctcgacctcatcttcaggattcataggctcctgagcatactttttggccctggcacctcccttcaacttagcttcgcgcttaagttgaa

SEQ ID NO: 337667 - DNA, 523 bp, Cannabis indica
cccacacaaccatataaatatatatagagatgccaccattaatattgctcaatatcttcaaaacaaaagtgtagcccaatatatactattgtcggccacaatactataacacactactttctcttacttttcagtattactactcaattattataaccatggaaaatctcaaaaattacattatacttttcatgctatggttagtgtccaccattgtggtccgagccatattctccaaaagccgagccaagggtcgacttccacctagcccatctgctctcccaatcataggacaccttcaccacattggtccattaccacaccaatctctccacaaactctcaaaccaatatggacccttaatgcatctctatcttggctctgtcccaactgtggttgcttcctcaccagaaatggccaaagagtttttcaaaactcatgaatccgccttctcgagtcgccctcccccgagcatcctaaacaccctttcttacccttctcctgacttgacctttgccccata

SEQ ID NO: 337668 - DNA, 548 bp, Cannabis indica
atcaacatatattaaatgtggcccgagctctttttttcaatcacatttatctttaccttattggagttatattgttaacactgctgtttatcttattaatcgtactccttctaggttgcttaagatgaaatctccttttgaactcttacataataggcagcccccttatgatcatcttaaggtttttggatgccttgcctatgcatgtactcttgatgttaagcaccataagttttctcctagagctaaggcttgtatttttattggctatcctcatggtatgaaagcttatactttattagatgttgagtctcaagaaaattttcactctcgtgatgttattttttaggagaatatattccctttacataataagaatttggatcctaacattaaagattttttcaatgcatctcttttgccctctacaggatcaacaaagttctaaggacacaatgattctttgggtttcggcttgccccaaaaagaacaaccagcagctactaccacaccaaatgacactgtcacatcttctccgcgtgtccaaa

SEQ ID NO: 337669 - DNA, 765 bp, Cannabis indica
tgttgattttacttcgagcagcagacctttttcaattttgagtttcctggtcggaacatttgggtcgattccaatctcttctaattcttccacatcttcatgcccgccttgggcgattccctatttggcaatgtcttttcccttttccgaactctgactagaagatacttcctttttagccttggttagggcaggttgtaacattcccgtgcaacttgttgatttcctctcaggcacccgactccattctttgttggaaacttaaggcacgaatgaaatatcgacgtaacaacttttagttcatagaaggttggtcggcccaacatgacattaaaggttgatggaacatccaaatcaaaaactgtgccattacagttatgattttcggagcttgcccaacagtgaggggtaggcaaattttccctagaggtgcaacactctggccggagaaaccgtgtacgggctgaagacaggggttaaatctttgagttggagccccattttttcatatggtgttttgaacaagatatttgtagaggctccattatctatcatagttcgagccaccattttgttagctatctatacctccacgaccaacggatcattgtgtaaaaagttaaccttagcaacatcctcttcattgaacgttatggtgggtttccctacccatgatacttttggcttcctttcttcgacggccaggacacttctttttgtttgtgctgtaatgtttgggcatacctttcccgggctttgcttgaa

SEQ ID NO: 337670 - DNA, 665 bp, Cannabis indica
ttgacgtacttctgtaagtgcgagtttttttttcttgatcagaagttctatttctcgcttcaagttataacattcgttggtgtcgtggccgtggtctccatggaaccgacaaaatcttgtcatgtcccttttgctggtatcttttttcatgggcccaggcttcttgtacggaattagtgactgagttgctatgtacacactttctatatcttcagctaagatagtgaatgcaatgtgtttggcgtgatcacagggagtctgtccgggttttttggcgaactttcctttcttcccgtttccttgcttgtggttgttgcctgaacgcttaccatttgaactgctggaataatggggaagttgggcggacgttccagtagaaggaaccttcactttgctcggcttttgctcaccttctgctcgctgaatggcttcttcgagcttgatgaaaccttcggcccggtcaagaaagtcactcattgagttgacaagtccatttttccttatatccttccacagttcgccaaggacttcaatgccccccagtatcgcgaacaactttctatcctcggttacccgtgataccttggtcgctttcgccatgaatctactgatgtatgcccggagtggctcacctggtcgctgttttacttcgaccaaatctccca

SEQ ID NO: 337671 - DNA, 1023 bp, Cannabis indica
atataggtaggcagttaattacatttaagttcaaatcctataacaatattccccgaaattgtaggctttaattacgctccacttaaatacatgcagttaatagtaaaaaatcacacatctgttatttaaaccgtctttaaggaggtcaacgctgacgtggattaggacacgctgccaaatgtacctcgttgaggtgtctcgcttagtacataagtgagttacttagtttacttgtattctagcaattgcatgagcaccggtgtactaagcaaacataagaactactctttgaccataaggcctagcagactggacaatcatatccttcaagttattacacttagttattataatgtatattataggctaagtgttctaataaaaatttcacctcgtcaatacctctttacatacagcaaagtagatgcctcgctatgcgttatctatgtctccatcgggattatgccatctgatgcaaaatggtttctcatcaatacgtgaatcaatagtttgtacatcctgatctcgcttaagattgtgcagtcagcgagttataaatatactttattaattctgcatttaatgagttatttcattttgtatttaatgatataattaccattatattcgttgattcatattctctgagattgacacgtgtcaccttcgaagtacaaccaaattttgggtataacaatgatttacaataagtagggataaatttaccgttccaccctcaatgtattttatccttaaaacacttagctttctataaatgatattttagtaaaataatataattactgaaataagagttcttccatttatctctattaagccaagctcaaaggaaatcatcatttcacttctacgtctaaataaaagctatagattttgtatctatgataagcgctccaactcaattgtactgtcatgttcccaagatgtatgtgtgacctgaaccaatttgtaagctttaatgaacaactctaagaacataaaaaacactcttgagattgaacc

SEQ ID NO: 337672 - DNA, 1496 bp, Cannabis indica
aaaactcgaatatgtgccttgtaacaccctagctattataggcatgttagcatgattttaaacgtattgtgcagctcgttgttaatcaacgaggttattgaaaatcgtgaacaattaaaatattcttatttaattaaaaatttaaagtattacatatataacatttcgggatcccgtttacaaaatactttataaaagtttcctatacatatgatcaaaagtttgtcgcctagtgactatacagcaaaagcctcgatgtcccaaagatcgtacgctccaggcctaaccgccccgacatgtacaatcttcatctgctcgctctcacggctcctcaactttagccttgcccttacctacacatagcaatagcactatgagtcgacagactcagtaagaaaagcataacataaacatgcaaataacccgggttataacctggcccccatacacccgatcataaccctaatccccgtgtcccacacggtactgagtctagaacgttcatacgacaatactatcgaccataatgtcagcctatactcaatatgctagtcatactctagccatattgatgtgacagcatcgatcagtatttcagccaacatacatttatcagtaatcagtacaactctacgtatactattactgctatcaatgtaatctaacaagcataaacaacatgtatgctaaacatgtaacaacaaatgcataacattatactaatcttacctcgattccgaattcacgtgggccagccaacctgagtggaacaactgctcggcgaattacaggctcctaaatcacatcaatcataacaaaggtaagtgacacgctaaatcactttccagggactgaaacttgaaactaaaagtttccatatcgatgaatagcgtggcaataccctaaacatctcaaaaatgggaaaaactagggttcccataactgcccgaaccggtagaccggttcccaaccagaattccagttcagcggggtttcctagggaccaaccagaatttcggttcctacaggtccccctgaaccgaaattccgatttagtgcaggaaagattcaaaaattcatatctcacttaaaataaccccaaatcataccaaactttccagacctgctccatatatcccaaagaacatatttaaggcaataaaacacaactacatgcactgaaacaaaacttgccaataaagagccaagcttgagtaccaaaactcaaagcttgctcaaacctaataacagcccacaattcaagcctaattcaacataacctagcataatataaccattgaaaacaacaacaaacactaacagtaactacagcaacaaatctcacaaagcatgcataattcattttcttcaaaaacagaaaccaaagagtgaactacaacagacttacctagagtttaagatcccttaatatctgctagagctagcttgtaaatagagaaaaacacagcaaccctagctggttttgagggtttcga

SEQ ID NO: 337673 - DNA, 765 bp, Cannabis indica
tctaagtttagttgccttaagtaagcatatacaaataagagatttttaagatcgatgatttatatcattttgggataatttttttggaatatagtcatctctgccattgaatttcatagaagaaaatagaaagacatcttaagaaaatgacttatgaactatctatccaatgatatattttctaagtaatttttcaatgaaaaagctaagaggaaaaataaagaataatttcgattaaaataagaatccaacgatgtcccagtaggcaagagtcaaaattatttttattttatgaacttcttcattatttcatattttaaacactagtctaagttgtcatctttggatgtacaactaggtgtcgcatttacaaatatatatttgtctagatctaacactattttatttgtctaacgaatgacaatcctttaggatttgtcctattaaaaacaacaaattaagttagaccaacaataaagattcgaaattatactacaacaattaataacagaaaacaacatgatttaatataaatccatacacaattcaaaaattattaagcatttagcaagtaacaaagacatgttaaaatacaaaaactatcatatcttaaataatttcaaaggtttccaacaaactgatagtgtaccgacaggcgagagtcaaagataccattcattaaatagagtagtcagctcatctaaaatggacacccttctagcaaccttttattcgatcaaaataagaatccaacgttgtcccggt

SEQ ID NO: 337674 - DNA, 720 bp, Cannabis indica
cttgtgggcatcacttagcttgtcacgtgccatcttggcatgcacgttacattcttccccacttcaacatgtctatgccctcatcgacaaaccgcaggccaatcttcccgatctcgactcctaagcttactccaagcttcccctgaatcctaagtctgcacttgtccctctacctccgtagaaccaccctcttggtgatgatgtccctcgcccactcttggacttgatcaaagaacctatgctactgtcgctattcagaaacacccatggagtagtgcctccgcactagaatacttccccaacatgaactccttcgagtccatcacaacgtccctcgagtcaaccaagtagcccttgcaacactgaccctgaagctaacacatcctctgatagtagctcacttgcaaatcgtccaatgcatactccatttgacaaggactaagtatggtgcacccctaagggtgaggttcgcaaacaaaccgtactcaacggcacctaccaaacacgcttccactgaagcgaagtccctctggacaagtccctccaaaaacttcacacgctaactccatggcgcaccatcctcctgatggcaatcgagcaagacactcttatcgcaagataaagtttggtgtgtcccacctggacaaggctcgcaagccaactgcacccaatgaagcaccaagtgcactcttgcacaaaatctcttcgtgaagttctcaa

SEQ ID NO: 337675 - DNA, 505 bp, Cannabis indica
tataagacataactgggttacacttggtaaacattatcaggataaaccactgaaagaacataatgtatggattatgtatatatgagtagggttatgcgggtaaggtcataatcaggttagactcgataactataatcgagacaaaccctagtaaggccttaatgtaaaatagaagtgtgtgtgtaacacgtgggtctatgctatatagacattaatagacgtgtgagcgtaacacgtgagtctatgttatataaacattaatagacgtgtgagcgtaacacgtgggtctatgctatatagacattaatagacgtgtgggcgtaacacgtggatctatgccatatagacataaataggtaggtgagcgtaacacgcaggtcaaatagacagtaagtgcggtgacatcattaattatgtgatatttgtttattgtgtatattgatattttttttactatcttgttgggctttgctcacgggtgctctactgttggaaattattttac

SEQ ID NO: 337676 - DNA, 808 bp, Cannabis indica
ttgtaagaggtgaatgaagggagtgatgggacaatttttttacgaaagaatgaaaacaagtaatacaattaggaatgccaaaaagcatctacattctgataacccaccatgagcttactttggagttaagcatacttaacttggagtaatctcaagatgagaaatctttcggggagtcatcttcaaaagcatatgagtgaggacaaagtacgctagaaagattcatattaggatgtagaatcgatagtcgttccagagatttctaagaggaagaatgtgttaacaagtaaagatttacaaggtatcaagatgagtttatgttagtgggtggaaataagaaatgctctaactgaatacctatcataaatgaatacttaacttgttattaagttaagtcagtaggtcaggtgaggaggtctcatataaggaatgtaaagacataattatgaattatgtattctgagatcttatgattttaaccgagtaataacgatcggacatactaagttaatatattgtctgtccgtatagacaatttatacaacaaataagcatatggaatttatacgaaagatgttgggttttatgcccaaataaaactcatttcaatataatcagatttacttattaatatagatcagaaataaaatttaatgttgcatggttcacatgatttatttcatgattatatgtacataatgtataaagtcatctgaaaccctcttcacatacttgatcgtgtttattatgctgtcaacacattggaaagtatcagacacagggttttaactgatatgataatctacaa

SEQ ID NO: 337677 - DNA, 1202 bp, Cannabis indica
ccaagtactcttcttggcagcaagttcccgttccagacgaggagaacgctcaagatcgcgtggctctggcacaatatctctagaatactgccccttgggaagctgatgaaggagcatcccgaggtaattaatgtggttggtcactcacactgcttagggctgagcgtaacactctagtttcattttgagataaccgttgttaaatagtcaaaaatgcatatttactagtgcaaaaatataaaataaaattaattttagataatattttcatgaaattaatgtaatatatttttatttgaatatattatagtcttgagttaattttgcaagaaaaaataatattttatgacacaaatagagaaaaagaagtaaaaagttaagaaaatgtattatttttatacaaattaattagattttttaataaatattttcaatgatttaaagtgatatattttatgttggaaatattttgtttggatttaattttatttgtgtttgaagaagaaaataacatttatggaaaggaaaaggaaaaaaataaaaatggtaaaaatatggcctaaagaaggaaaatttggcatttttggaaacccaacatttgagccaaaaagcccaaagaaagaccctcttcttctctcccagccgacagccacgacacgtggcatcatcctgttcgtctgcagaaggcgcgtcagcgccttgtctccttcaaagccccacgcacgcgtgaagcacacggaccctcctggtccgtgtgtttcgtccaccgcccagccccgagagtggggcttctctctccccgcactccatcagccaaaaatggcttcagccactttccacgtggcgttctctcatctcgccacgtgtccacatgcaaccaatgagagggtgacacgtggcagcttcaaattaagttattttaattgcaaaaatacccacatgcaatttgtaataagtttaattgcgcattattcattttaccattctataaatagaagcttaggtttttagaattcagtacagtttcagtttcagacagaaaaatctagagaaaacgctcagagcgcacagtgttagtttaccgctttcatagttaattttcttatgggtttctaagttcccttattattaaggcggacgataaaacctagtgtatttaattaagtatttatttttattttgattctcaatacaatatatgc

SEQ ID NO: 337678 - DNA, 1051 bp, Cannabis indica
cggggtggttaggcctggagcgtacaatctttgagacatcaaggctttcgttgatttgtcgctaggcgacaaaacttttgtttatgtgtatagtaaacttttataatttattttctaacgggatcccataattttataaatgaaatactttaagtttctaaaacaataagaaaattttaattaatcatgttttcattaatctcgttgattagcaacgagcaacacagtacgtttgaaatcacgttaacatgcctacttagttagggtgttacaatttggtatcagagacgccaggttgtcttttgaagatcgtcacgacatgtacaatcatcatcaacagtcagtttgtttcacggttcagtaagcatttattgctttagtagttaattttaatagtatggtttaaaaaaagcttgttagggagcatgttagtagcctgatagtagaataggcgcatgttttccaatttccaaataagcggcattagtaagttgttctttgatcacgatctgaccaaactagctcttggttacgcaggctgttctaagtagtatggacgccaggaaaaataccaggagccaggttaattcgattggatccaatgatggttagcgagcccagattccccttaatattcgtggccgaggtagaggtcctagaggaagggcacgtggccggggtgatgctaacccgccacaggctgcccaagctgcccatgattgggaaaatcagtttgtagaaatgcaagctagcattattgaacaagatgaggagattcagcggttgagatagcagggtgctcttacagttcccgctccagaaataccagtggcacctgcccttgctgtgcaggccgaacctgtggttacagtgaaccgaatggaacccctgtatgaaaggttccgtaagcaggcacctctagttttcctgggaggtcccgatgtcatgaaagtcgagcaatggctaacagtgattaccagaatcttgaattttatgggcgtcaccggtaatgatagggtggcttgtgccactttccaatttcaagaagacg

SEQ ID NO: 337679 - DNA, 706 bp, Cannabis indica
ttgtaaagtggggcccacatatctatggccgaccacttgctagggtatttaccatttaatttttcattattttaatgcctaataaattctaaccgaaacctaggtggttgcctataaatagatagtgatggctcacactaaaagatgatgaaaattcaagtcttcagtaaattttcctgagccttctcttctattattttcgaaccaaattctctcttcccttcttcatatttgcataccttgagtgatagagtaagtgcccacacacatcaagtggtactcaatcatagtgtgtaaggctatgaagaatccaggttcaagagaaggacattcgggctcagatcttggtgatactctgctatagacaggatacaagggttagagatctgagtggaaggacccattaatattccgctacagccactgtaaggtttctgaaactttacatgtgtttatttacattgttttagaaattcatatttaggatgttaaacaacatacatggtagtaaatctagatcctggtaaaatatattccaaaaactggtattagagccaggttaatgatttactttcaagaaatatgaattaaaatgatattttgtgttgatttggatggtttcatgatggtttatgtgcctatttgatgattgtttagaaatctcagtatatgttgtaaaaatattttttatttcgttctggaaata

SEQ ID NO: 337680 - DNA, 741 bp, Cannabis indica
atgttctaggacttaaatagaattcatacattatgtacatattaatcatagaaataaaatcatgtagaaccatgcaaacatttaaatgtttatttctgatctatattaataagtaaatccgattatattgaaatgagtttaatttagggcataaaacccaacaaaaagttccttcttatctcttccagaatatgatggcaatcctagatatctttcatggcattcacgaattggcattgatagatggcggtggaagaggacttgggctgctaatgtagtgtttggggagaaggacataacacatttgtcaagactgatcatttgtcctaaagcaagatgataagtatctaagacccttttgatggctcgacatgaactttcatctgcttgacaaaaaagtagactatcatccgcaaagaacaaatgagaaatggtgggtgcatgcctcgttagcttgaaaccatgtaaattaccaatatcctgttcatgttgaagtagtcttgaaaaaccttcagcacatatcaaaaaagggtagggtgatagagggcaacattgtctcaatcctctagtagttggaactagagaaccagttacttcaccattaaaaagaaaagaaaactggtttgtagtaagacagctcattataagtgttatccaaccagaagcaaaacccattttcctcataacctcttcaatgaatttccattccactctatcaaaggctttgctcatgtcgagctt

SEQ ID NO: 337681 - DNA, 555 bp, Cannabis indica
gtctgtgtttggctctgagtctggtctgtcttggcttgggctgggtctggtacgggtctaggttctggtcaatgtcctaagtcacgggtcctttggcgcaggtcctagcgcaagtttgggttacaagttcaggtctgggtcttggaaatggttccaggttcgggtcttggtacgattccaagatctagacaccgactacgagtttcgttgaagcgttgagtgttgggtcaagatccgagtcctgggtccctgcccatgtctgtgtctgggtctgggaccaagaccggggtctaatcttggatcccagtcccagtcctgggtcctgatttagagtttgggcccccaatctaggtcttggtactgggtccaggtctgagtatccaatctcggtccgggtcctgggtccgggtatgggttcaactctgcgtctgggttcgggtttgtgtcctgagtcctgatttgagtttttattcgagtcagtgtcccggtcagggtttgggtctgggtcttattcaaattctagttcccagactcaaacctagactcagacttgga

SEQ ID NO: 337682 - DNA, 578 bp, Cannabis indica
ggagaggcgctagagcttccgtctattctcctcttcaaagcgtcgcatctgccgagacatgtctgtacagaacgaaaaacaacatggttagagaaaacagacatcagaaacatgaggcataatagttaagaagctcaaaaaacaagacaaagtagtatgtaaggtgactgcccaaacaagactcaaaagtccattatcacctggcatcgttcttatttcagacataacaactttccctttaccaaacacgggaggggatggccgagtaggtgaaatgggctcccttatgcgaatggcatgttcaactggcctgggcgggacggaagtttcttcttcctcttgagcggagtcacctgcttttcctcaacctcatctttaggattcaagggcttctgggcataatgcttggcccttgcacctcccttcaacttagcttcacgcttgagttgaatgagttcatttcctgatgagctcgttcggtccgtccagcaccagatttcctcttattccccgtcacagacttaggaatgaagtccttgggatagagcctatacctcacaaaattatcctcggaggtc

SEQ ID NO: 337683 - DNA, 954 bp, Cannabis indica
tttttagcatcgcggtgcgggtgcggtttggaaaattggaaaaaacgcatgtgcgggttggtttgaaaaaatggttaaaaaccgcaccacccgcaccgcaaacacccctaatgctcattatttattcacgattggtatcatgagcgtggtcatctaattttaaggctcaaattaatattattattttgtgtaatatcatttcttcccatttttttctgcacccacgatttctataaatgcataattttttttattattattattattagttactgttattacggatggtggtgtatgaactgtttggaaatactcaaaattttgtttaatttgagtatcaaggcacatttttgggaggaatgattctggagggaaatttattatttttgctaaggattgtttgttttctaggcaaatgaagctcaaagatgatcaaaactgattcggggatgaaaaaccccataaacaatggccaaaattgtggttagatcattcattttcaaatgggtctaaatcgggtccaacgtgatccgtgcaatcaatttctgggttatttctagatgtttttcgtgtttgagatctaacagaaattaaaagaggacgaaaagctctctgatcgccggtgaaaattgcccctggaggcttgtttcttgagcgggcctgaatctaggtcatgaggatctgaatcgtggccagtcgggcgaaggagaaggttgaacgacccccaacaaacgacgcgtcgtttggcgcaaaggtggtcctgtcgttcatcgcaaacgatagttgtttatccaaaacgacatgtcattttccagccctgattaaaaaaactaaaacaatttgtatggtgcgtgggggcgcgtggaggtttccttttggaccaaattttcactattttgctctattttaatttttttttcatgtaattgtatggttatatttttgttttggtca

SEQ ID NO: 337684 - DNA, 755 bp, Cannabis indica
ccttaaacagatgcgagtgggcttagaagaatagagtaaagaaccggcaaaagaatgtcgacgaagatgccgtcacatgtgcctccacgcgccagcacatgggaaaacgcacagaaccttcaggcagcacgtgagccccatgcgcgaggtatcggcgaccaaactttggggttttttagatcggcagctgggcaacactcctaagtggacggtgagaataaattcgcactccaaataaaattttcaaaaaagaaccttaaactcaaaccctaatcttttgtttatgaactttaatttcgaattttgaatttcgaatcacaaagctctgataccatgtagaaaatagtgaatcgaattatgtgtatatttcatagaatagtacatatttatatacaaagctaggagactaaatgggaaactactaattacaaaataggaaactactaaatacaagttaccctaacttttttacaactaatattctaacaatgtgtaaagggaggactaaacctagtgtgccaaagtgcaaaaaggattgggcttctatttttagggtgtgaattttgtaccctaaggacccaacaacaaagaagaaaagagaggacgtataccttcttcatgaacatgaaagcagctgccatatttttttgaagaagagtaaatacagaaagtacagagaggaagaacgagaaggaggacccaagtgcaaaagaagagaaggacacaagctttttttgtttgcatttctcttccct

SEQ ID NO: 337685 - DNA, 666 bp, Cannabis indica
ctccatttttactttaatattaatgtgccgcctattggcacaggggggcattattttggcttggaaaattgattttagctttgagtgtatttcttgttctcgtaaccacatcttgggtttggtctacttggatccccctactcaaccttggctattatcttgtgtgtatggtcctccttacctccatgcgaagaaaaaattctggtctgatcttatggtgttaggggataggtttgggggtccttggttaatctttggtgataccaattttgttcttagtcactctgagcgtgaagggtcatcgggtagggatctttttgtccctttcatttctaatctggttgattctagaggtctaattaatttgaatatccaaggagaaaagatgaccttggataaccaccgttctggtagtaatcatgtcaaatcagcacttgataaaggaatagttaatggttcttggcttcttttgtttcctaaagctatcctttgttcctttcaatcgagcaattcggatcataggccgttatgtattgattctagagggaccccccctaagtttaagagatgtttcaagtttgaagaggggtggacgatagacgagaggagtaaactggttgtagcaagtgcttggcgaacggttgatctgttggatatattttacca

SEQ ID NO: 337686 - DNA, 559 bp, Cannabis indica
gctctctctctctctctctctctctctctctctctctctccgtcgattttgcttttatttttttagttttgattttctatgttcgaaattccaaacattgtcttaggccaactatgccatttgctcgctgttgtttcagttgggctgctcatgaattttctcgacactttttgttttttattttaatttttactaccattttattattttttaatttatacccaattttatagatcatatttccattatgtgcattagaaagtaaaaactctaattttaattagttatgtgaggttatatttgggggaaatttacatgatatactaacttttgtcattttcttacaaaaatactgttaggcggaatttttaacttttttactgtgttttttcataagtttcatactgcagtatactgtattaagttttcactggtgttttactagtattctactgttgttttgagttgttctgctttgtgttttactggtgttttacaaaaacacagtatttttgaaaagatttccgtgtgacagtatttttgtaaaagttaactcaaa

SEQ ID NO: 337687 - DNA, 1236 bp, Cannabis indica
aaaataaattccaacactaagaaactattgtttcactttttaataaatatagaagctatagatgtctataattatgattaacactcccactcaattgcactatcgagttcccaagatgtaagtattgagctggttctatgataagctagtaacaaacaagtcaaagaacacatgcaatgcatttaagctagagctcaaccatctcaggattgagatcaaatgatctataatcaactaagtgatattaactttaaaaatatataatgataagtttatgatatctttttcactgtcaatatcagtctagtctgatatatagatgatacatccaattttagtttactttactaatatcttggaaaagacattcctctcagctaagtataagtaaaccttatcactgattatcatgttagtgtaaattcagtgcactgataaattgtgagactaaataatttgaaacatataatcacaattactttccactgtgatgacttttatttagggcataaaatctctacaaacttccacttgcactaataaaaaactaaagtgcatttcaatttaatttcatataattgatgtcttgatcaaatgtattattttacataaactatgtaataggatttgatagtttgtattcggtatcaacctacgccataattacattctccttagtcacaaaatgcatgaatttatgggttcctcacctttatattttactcctcgtagggtaattaattttagatcaacataaatcgaaaaaattttccaattttattttattttattttaatgttaatttcaaaaatgtatttttttttatacattggatttcaaatttaatcaaatatatatttatagaaaattaaatttgagtaaaaaattaattatttaattaattttggaccaacttaaattaagtaattttcataatatttattgaaaaattaatactaaggatgaaaaataaatttttattttcaaatctcctagggtataattttataaatattaagttaaatttatacttagagttattaaaattagtaattttaattaaataaatatatcaatattaaaataaatagattaaaatacatatcaaataaaaatacatttctttaataataagctttagttataaggatattcgatctccattgttggtcttacatggttaatatttcaataggacctcgagatgctagactttgtcccccatatggatggtct

SEQ ID NO: 337688 - DNA, 1217 bp, Cannabis indica
taaattcctatagaagttatagactccatatttatgctagcgctcccactcaattagcagtagaaagctgaggtggcgaggctcggagggaaggtaaatgccttatagacagtattgcaaactttgattacttgggcgattccaaagacatttttcttgagtattgcgcttctcaggtggctaatggagaatccgagacgaccacttctacctcggtcaaaacgttgacatgccccccgctcacacaacagatcctccaactccgaccagcctagaagacttgtatagagagcctgggactccactcgtctgaatacttctctttttatctctttttttatatctatccgaccataaggcctttcttaagacaaagtgaccggccaaccgatctttaaactttaatcctggtttcatgtgcttttattatctttaatgaatttatcctctatttttaatcatcgtgcaactatgtttattttatttgtaccaaatgctttgtacaggtatagctgccccccaagtgaccgagcagacttatgactcttggtcatttataattttttgcaagtatgcttttttgtctgttcggtgttttgggttccaccaaaccttttgtatgcagtggatggtaaattaagaacatgcaagtaacttcgactcaatttgaattttgaaataaacatctttattcatttattgatcgaaatattgttaccgtagtaacttagatcaatgctatcagcttgatccaatctgatctttagcttaacatgaaataaaacaaattgcagaaactagaaattgtacttcagatggtagtcacccgacccgagtactttgtaatattactttgtaaaattaattttgtctgaacctttgggcgtggtccgcccaaaaggccattcatttaaaagtaaatgttctttttgtttagtacttgatatggtcatccgacctggtacttctattggttgtattttcttaaatgttccccattccaacaccttcgtaccagaacgagttgcattttttcatcatacttgcctaatttgtatgctcctgactcgagaacttggacaacttgatatggtccttccaaattaggtctgagtacacctgtcgtactgtctttggtgtttacaaatactcttcttaggaccatatctccagcaaagaatttttgagccttcacttgtttgttgaaatactgagct

SEQ ID NO: 337689 - DNA, 1207 bp, Cannabis indica
attgataacatgaaccaaaacatacacaaatgaatgaaaaatacttttgtttctttattgattttgaataaaatggattacattgaaatggagttttatttagggcataaaacccaacacttccgtgatgtggcggacttcttcagcctcaggccgacccaaattactcccaagggcattaagtatttgtccgctctcttcgtcctctacgcttcccaataatggggcgctccttctccccacgaggtcgcttggttcttcgacctgaagtctacccccaaacaaggcaggtcggggtatttttacttctctcaaccaggcttcaagtggttgagcgggacagacaacaaggccatcagcaaaatagggcgttttgttgatgagtgtttaatggtgaaggatccgaacatcaaccagactcagtttcaactgattctgacatatcaccgtccttccctcacccttactcttagggatagggctcagaagcttgcccagttgccggcggaagacagggatatcatccagttgacctccgatgcaaatctagtgtagtactggctttacccagaggacttttcttctaagtctgtggcggagaagaagggaaaatttgctgctgcccggcatgaacgagctcattcggaggatgagttgattcaactgaagcgtgtagctaagttaaagggtggtgctcgggcgaagcagtatgctcaggagtctgtgaatcctgaagattaagctgaggctgaggctgagcctgaggctgagcaggtggctcctttgaggaggaagaagaaactcccggccacgcccaagcccgtggcacatgccattcgcataagggagcccatttcacgtcttcggccatcccatccttattctagaaaagggaaggccgttatggctgagatgaagtcgatgtaaggtgatgatggacttctgactttctgggcgggcaatcactctgcgcttcacttctttttcagcttcttggcttcgagagtttgtattttttgttggtttttgctaaccacgctattttttcttttgtgcagacatgtctcgacagatgatggacgccttaaggaaaaggatgagtggaagctctagcgcctcccatcagaccaagaagtccaaggtcggagaggggtctttagataagaggccttctggagaggtcattgacctttctgaggagttgact

SEQ ID NO: 337690 - DNA, 511 bp, Cannabis indica
aatggggcccacaaataattaaatcataaataattataaaaatatctaaaattagtgttaattgcttttactaatccaaattactaaagcgttgattacaatgaagcacctgctgcctaggaaggctacgtgtatcctatgtgcgcacgcggaggaggagtttgcaaagtgtcacgccgagttttctcagcgcttgtacgtgggacgcgcgcaggtgtgtgtctgaaccgagtgcccgctgagccttcagacaagatttgtctgagctcctcacccgaaaagggctccttgtccgagttcctggtacgcgtgtggaccatctcgacacaccttggacccaatttttcaaatgccataactttctcgttttttgtttgaattgagtttcgtaataaacaaaattgcttaatttttcacaaggaatccaaataaattattttcatattgaaaataaaatttcataaatcacatacattcatcaaataacacataaaccaacttgaacacatcc

SEQ ID NO: 337691 - DNA, 938 bp, Cannabis indica
acaacctcaagtgtatcctgacacacctacagagtctctaaatacaacaccaggcgtatcaggtgacaatcaagcaagtatctgtgatccaggaagaggaaatgaagttgatagtgccctgaccaaagaaccccaacaagccaaattacataaaaacggacccccatcctgggttgagaaagctcatcctcaggccactgtcataggaaatccgaatgataccatggtcactagacgaaaactgcagaatttgttagcctttgcctgctatctgtcacagattgagcccaaaagtgtccgagatgctttgttagatgagttctggttggctgccatgcaggatgaaatgggaaattttaagagacttggtgtatggataatggttcctcggccagatggtgcgaatgttatagggacaaaatggctgtttaaaaacaagtctgatgaatttgggacagtgactcaaaataaagctcggcttgtggctcaaggatatagtcaggtcgaaggcatcgactttgatgaaacgtttgcaccagtggcacgattagaatccatacgcctacttctcatcattgcatgctttctgaagatcaaactcttccaaatggacgtcaagagtgcgtttctcaatggggtaattcaagaggaagtctatgtcaaacaaccacagggatttgaagatccacatcatccacaccatgtgtacaagctcaataaagccttatatggactgaaacaggctccacgtgcgtggtatgatagactcacctcatttctcatctctcatggcttcactcgaggtactgcagatagcactctattcattaaacatattgacaaaggaatttttgttgcccaaatatatgttgatgacatcatttttggctcaacttgtgatagtgaagtccaaacatttgtcactttaatgactaatg

SEQ ID NO: 337692 - DNA, 590 bp, Cannabis indica
tgactgtctgaaaacacagtcaccttcctaggtttcatttgaatttcacttagaattccttttaaccaaactgcctctttgaatgcttcggtagtggccataaattcagcttcagttgtagataaagccactactggttggagctgaactttccaactaatgcagcactcatttagctgaaagcagcaacttattatcgatttccttgtgtctctattgctagcatagtcagcatcaacaaatccctctagtttcatcttagaaccagttttgttgaatcttaaaccatagcttgcagtgccttttagatatctcaatagccactttaatcctttccaatgctcttctccaggattggacataaatctacttaaaatgctcactgcataggctatatctggcctagtgcttatcatagtgtacataacactaccaatagcttcagcatatggcacttcttgcatttctttctgttctttatcagtcttaggagactgatctgtggttagtatgaaatggccagcaagaggcacattaacctctttagagtctgacattttaaatttctgcattattttctcaatgtaggg

SEQ ID NO: 337693 - DNA, 912 bp, Cannabis indica
ccatatgttgatttaaggaaagttttgttaacaactattataggtttgcacttcttccatccttttattgaagcatcgagtgccacaaacaagtacttgaagttgttgtcttcctctgtttgcatgtgcactattgttccgggattagttttttgcaacatgtgcaaaaaacttggcagcagcttgtatgattcgttggcttttcctcgtaattcttcttgcgcgtgctctttgcttctccatgctttcatgtagttcattctcaccccatacttgtgtttcatttctcctctgatgtcttgtggcgtttgagttgtttttatgttggtaaaccgtggcttgatgtagtttccaatcaattttgttgtagcttgtcttttgtcggcaaatcttatgtttagatcacaagtgtgtatcacctttctgtcatactttcgaatgatgaatgactttgttggcccgtttctggatgccgttagtgcccacttgcattttggatccaaacaacaaatcttgtatgttcttgcacatgattttttcactctgaattggaagttgttcctaattgcatagaaaccaagcacactctgcagtgtttctttgtctttgtatatttgtgcttcttctatttcaggatgttgcggatctgtgattagtagttcgtcataatctgtgatttctggttccctgtttttgttgttttccagttgctcaaccatttcctctgccacaagttttgcatagtccatgaagtcaaaattttctcccccatattccggtactgtagcttcaattgtatgttgttgatttgttgagtcttctgttgttgctgcattgtattcgatcggttcgaaggcgcttgtatgtgtaattaatgaattaccatttcccaagaatgatgcattgatggtt

SEQ ID NO: 337694 - DNA, 751 bp, Cannabis indica
aacaaaattgcttaatttttcacaaggaatccaaataaattattttcatattgaaaataaaatttcataaatcacatacattcatcaaataacacataaaccaacttgaacacatcccaatcaacgaataaagaatattcatcattttaaattcatatttcatcaaagtaaatgattaccatggctttgaggccagttgttgggaatattttcttggatctagatttaccaacaagtatgttgatttacatcctaaatttgaatatctctaaaataatgaaattaaacacataagagtttctaaaaccttacattggttgcagtcgaatataatgactccttctactcagatctttaacgcttatttctgtcgtagagtattatcaagatttgagcttgaatctttttctctccttcaggtttggttaccaccgtcttactcactatgattgagtacttgacttgccatgtgtgggtatggaactctttcactaagggttcgaatatggtgaagaacaatgaaggaggtgaaatcactatagaaggaactctctcatctactagttgtctgataaaaaaaatagatttttggcaggttaaaaatcagtgttaaagtggatgagatgagagcatcatgttccttttatagtgtttcaactagggcttagggctgaatagtatggattaaaaaagaataaaatattaggcaaaaatacacttaaggctggccacttaaaaggaccactttcta

SEQ ID NO: 337695 - DNA, 925 bp, Cannabis indica
taaaatacaattctctaaaggccaaacatcgctttccacgacttccgaacacaatcacagaaattgagtaattttcataaaatagcataataacatatatggtattaaatacctttccaaaatatgtatttcataaatattaatttaatctcttacataaaccctaaatgtttaataattcaaggtattaatcaatgcggtctttacaatcatccccccgttaaaaggatttcgtccctgaaatctaactgaacaattcaggatgctaagtcctcatatcagattccagttcccaagtggcttcttccactttactatttctccagagtactttaaccaatgatatggttttagttcgaaggaccttttccttcctatccagaatttgcactggttgttcatcataagatagatcaggttgcaattctaacgtttcataactcagaacatgcattgggtcagatatatactttctcagcatggagacatgaaatacattatgcacagctgataacgatggaggtaaagccaaccgataagcaacttgtccaaccttctccagaatttcaaaaggtccaataaacctagggctcaacttgcctttctttccaaagcgtctaatccctttcattggtgacactcgcaagaaaacatggtccccaggttggaatgtaacatcccgtcgcttgggatctgcataactcttctgcctgctttgagaagcaagcattcgcgccttaatcttatctattgcctcatttgttttctgaaccaactcagggcctaagtatttccgctctcctgtttcgtcccaatgaattggggaacgacactttctgccatagagcagctcataaggagccattcctatggtactttgataactattgttataggagaattcaatcagaggcaaatacttact

SEQ ID NO: 337696 - DNA, 621 bp, Cannabis indica
aaaaaaaaaatagcatgaattttctgatatgattctctccagtcagttcaggtcagatttatggttctttgattggagaatctttacagagaaacgggtgagacaacaacttcgacgcagaccaccttttacttgattccttttgcaaacaacagtcaatgaagttcctaaactcatccgaaacgccttccggcaaacttggcagctcactgaaacatataacgcacatcaaagtaggccaattaggtgtctgacctggcggaagtagtggaaattgacccatataaagctccattagagtgacacccaaactccaaatatctccagcgtaaccgtcgtaattttcgccataagtcagcgaatccaacctctccggactcatgtaagcacacgttccaacgaaagaattgcaagtatccaaagtacggccgaggattttgcttaccccgaaatcggcaatcttaacttccatttttgaattcactaagagattggctggtttgatatcaagatgaacaattttgtgggagtgaaggtagtgaagaccgttgaggactttctttgctatgtcagcaactttggattcagagaaagctccttccgatttgagaacattctcta

SEQ ID NO: 337697 - DNA, 669 bp, Cannabis indica
acatcgcttgtttctccaaaaaaaaattactgagaaattatcaaccaaaatatagagaatccagttacatgcagatccaaaacgaacgatgagtctaaagtacaatcaattcaccattcaaactgttgaatcgatagaagattagtataaaattccactatgctttgtgttgacgtagtttttcgtcaactaatctaagaagatcgtaaaataaaagaggaccacgataaattaatctgactaataaaaccacaaagaattaaatggacaccagagatttatagtagttcaacccccatgtcatgatggtaatagatctacgtctacttgtagttttattgattagatccgacacatcagagttatgttctcaagagtgtgtagacaaaagtacagcaaaggatttctagatgaaatcttaatcgagatttatgaatataaggcggctcgtggaagacatgataatcataaatctgatctaaattaaaggttgtgaagttcttgtaaacaattaagggtggcaaaatgagtttcgacacatcacacgaacacgacgcgaattttacgggttagggtcaggataattagacgcgggtcgaaaacaggtcgacacgacttgacacgaaataaaaacgggtcaaacacaacatgacccgcttaacacgaatg

SEQ ID NO: 337698 - DNA, 754 bp, Cannabis indica
atttaatttttcatataagataattttaatataatatttcaaataaaaaagataaagttatcttttaatataaaatatgttaaatatcaaaatatctaatcttataattaaataatatataaatattaaagaaattaacaatttttttttaaatctgaccataatttaaaaaataaaataatcaatttttaaatttaaaccttaaaatatcaaaattaataataatctattgaaaaataaatattattaatttaaaatatgatatttaagttcaaatatatttaaaaataatattttatttttaaatttgggttttgaaaattggaaaaatcgaatttttggaaaaaattccatgaaaatcgcaatttgtggtgcggctggcagctaggcttacgcgcgcgcacgaaggcatcagcagggtgtcccgccgagtttcctcggggcctgcagccttcagacagggaaccagcagggtcgttgggtttagacaagattttgtctgaagcatctgcgcgcgcagccttgtcttgtccgagtgcctgtgcgtgcgatgcttgaccctgcgcacccaatggacccagattttcaaacggccataactctctcatttttaatcgaaattaagtttcgtaaaaacgaaagttgcttaatttttcacaaggaatccaaataaaatattttcagaaacagaaaaaatatttttcatggaaaaaattcgtacaacacatacattcatcacataagcacataaacc

SEQ ID NO: 337699 - DNA, 708 bp, Cannabis indica
aaaaaagtcaccggaattggcattgtcgctgaaaaaattatcgaaaaaaagtttcttgatgaagaaaccagtctcttggtgatttttttggtaatttttctggcgagatttctaattttgatgacttttctggcgccgattgcaactccggcgacttccccagccccgacaactactccggtgcttttttcggcaccggtgaaaacttcggtgatcaatgtagtttcatttgttttattttttaaaaaaaaatatatgaggaattttaatatttttcatagtaattcaaagtagcatattccatgtatgttaagtttttattttaaatactatattttttcctattaagtttccttgccatatatatctaaactagttttattttttctatatttatgtaaataccccataaataaattaggtaaatgtagtaagaggaaatgagattgtatacttattttattttatttattttattttttatttttatttttatattctttaaaatatatacacttttattgatgatgttttcattatacctcttaaattaatgtaaattatatactacacttaagtagatgcttaaggtatattgagcagcctactcacaaaagtgagtactttttaatgaaatataatatgaaagtatttttgattaatgaataaaaaaaaaatattcttcaatttacccctaaatgtacattt

SEQ ID NO: 337700 - DNA, 993 bp, Cannabis indica
ctggccaaactgaagaaccatgccctactgattgtaatgtattcgctcaacaaagacataaatttcttggggatcatgcagacaactttgggcctatagaagaattggaggaagtggatgtcgatcccacttctccacctagaagaccaaagattgggaagggtttagcgctagaaataaaatcgttattgataaaattttctaagggcaaacatggacctctttgcatggtcacatggacacatggtcgaaatcgatccatttctgatgatccatgatctcaacattgatccaaactttggacctgcataatagaagaggaggttgttggacaaagaacgcgcccaagcactcaaaacttgtagttgagaggatacaagcccatgacttcataacagaagcattctatccaatttgggtatccaaccttgtgctggtgcccaaacccaacaaaaagtggagagtgtgcatcaacttcaccaacctaaacaaatcatgtcgaaaggattgctttctacgtccaagaattgaccagcttgtagacgccacaactggccatgaaaaccttagtttcatggacgcgtattaaggttacaaccagataaagatgcatcttccagattaggagcaaacaaaagataaatgatagacttaggcctatactgctacaaagttatgcccttcaggctgaaaaacacattggccacataatagaggcttgtgaacaaaatgttcaaagatcttatcgatcgcaacatggaggtgtatgtggatgacatgcttttcaagtccaaaaagaatggggtcatgtggaagacctagatgaatgctttatggtcctctacaaaagtaacatgaagctcaaccccctcaaatgttcttttggtgtaggcttgggaaaattccttggctttaaactcaatgcaatgggaacagaagcaaacccagacaagatccaagcccttttggacatgaaattgttgggttttatgc

SEQ ID NO: 337701 - DNA, 811 bp, Cannabis indica
atattatttatgaagataagtaagataagtaaaacactcacacatatagttatttatgaagttgatcactttcttatgagaaaaataattgggaaagatgaatagcgtgataaagcagagcaaacgattaattccacatttttggttagattattgaaaacaagttgtatttactaaaaaatatggttgtctttaaggtaggggctaggaatgttgcccaaagcccctcaacctaagtggtttcctattagagttagtcacacattattaatgtatgaaaataaattattatatttaagatcagtatgctactttttctattgttgattggttttgagatagaatcacatttaccttattctaaattctaacatggtatcagagccgcttgtgatttgctgtgagccttctcccttttaacctttagacgtgagggggtgtattagagtaaatctcacattgctaatatgtgaaaataaattagtatatataaaataagtgggctactcctcccattgttaattagttttgagatgaaaattcattcactttatcccaaattctaacatggtatcagaactgtttgtgatccgttgtgagccttttcccttttaacctctatttgatgtgaggaaggtgtattagagttggtctcacattgctaatgtgtggaaataaattaccatatataagataagtgggctactcctcccattgctaattggttttgagataaaacctcattcattttatctcgaattttaacacctcctaatagtaatttctttatttttttaacattaacccataa

SEQ ID NO: 337702 - DNA, 711 bp, Cannabis indica
aaaataaaagaaaagggtaagaaaaacccgtaaggttgctttctttaacgtcgttagctcgactacatgttgtgctcatgtgctcttcacgttgggtcttctagcaaagacacttccttatgtatttatcaatggaatctaacacattgaatttgagtgtttcaccatcaaattctattctaagtatccatgctttcgtatccaacttcttacttgcagtgagtaagaagggtctcccaaatagagttgatgtagaattgggatcaccctcatcatccatctcaattatgtaggaatcacctggaatgacaagtctatggcctgcacaaaaatatctttaactatccctaaaggataagcattagtctaattagtcaattgaattaaaacctgaatttctcttaatggaccaagatttaaataagcaaaattagaataagacatattattaacactttctcctaaatctatcatgcaatgatcaaacgtggttttactaattgtgcattgaattgtacttgttttaggcaacaactttctttggagaactacagaaacattctcccccacacttactttctcaccaccattcaactttttctcatttggacacaactccttaagaatgttagcacaaggaggctcttctttgatttcctcaagacatggaatttttacctcaatttttggaatagttttagggatcttttt

SEQ ID NO: 337703 - DNA, 791 bp, Cannabis indica
taggtttggaatttgttagttgaacctacaactaataataattaattataaataaaaaaaatacatattaattataatgtagttttcaatagttaatttgagctattgaattaaattaaagactataaattactatccttattcataaataaaatattcaatccctactataatagccccatataacatagtttgactttgacatgacgaaaaaagaattgaagatagaaaattgcatgatatgggacagattctctaacttgagaacattaaagaattaattaggtaaacatgtatatacatacaattaaattttacatgtgacataattccctcaaaatttgaggcatttaatgtcggtattgtttttcaaaattaacatacatgatgatgatgacatggtatacaaaataaaatactatttttcttacatgtacactgctgcgtccatgtgtgctgcatgtgagaagtagatatttattttggctctgtgtgatatttagtttgtacttgtgtgtctcctatttatacttttctatttactttcaggcagcttttgattagaaataatgaaatagaatagaatagaaaagaaataatttttatttcattctattgtttggttgtatttaaaattattggaataccatttcgatagaatgttctttttattatttttatagaatgactattctattttgaaatagaaagaaagaccattctaatgtaagatttgaaaaaatttaataatttttttaatcaaattttttttataatttttaaattttatt

SEQ ID NO: 337704 - DNA, 508 bp, Cannabis indica
ttgaagcggggacgttacaatgagtcccgtagctaggcaaagaatgtacatgtcctgtgcaggaaagggtctaccagtgatgtattttgaaattcagtttttccgcttaggccagctaaaagacaaagacttgtaataaagctgtaaatatttttgggatcccaactgtttaaaagtttaaactattacaagttttattttcattctgtttaatataaaagtttaaattctgcgctatttttgattagtaatcccatctagggattagggtttcttaagtattttgggtagcgtgcctaattgttagggcgttacacgcatcgtcattttcttccttgtcatctgctaggggatgaccttcctcatttttcttgtgcttgccaaatttcccttgcctgatcagttcctcgatctcatcatggaaaaaccaacattccagagtagtatggccaatatccttgtgatacttgcagaatttttttgggtctctcttgtcacggtttcccct

SEQ ID NO: 337705 - DNA, 476 bp, Cannabis indica
tttatttttaattctcctatattctaggtatcatcttattttttttcctttctaaaaaataatatactttgtttgtttgtttttttttttatttacacacattttaagcactttaatatataagaatgtagctattaatttgggtaattaatagagtcattatcattataaatagtatttttttttctcttttccgtcatcattttcattgttgaaagtttcctttcactgatcacataagcattttctcataatacatcatttctacacatttttactctctagtcatccaaaaccgatatcaccactacgggtgtgcataaatcgatccaatccaatgagaaccgaccgatccaattacaaccgacctattggatatccaattgtgatcggatcagattgaatgttatttttaaatatccaattggatcggatcggatggtggatggggtgtctaaaaatccaatacatccaac

SEQ ID NO: 337706 - DNA, 2322 bp, Cannabis indica
atattacggtaaatttatcataggtaatccaagttcaatatcggtcccttccatgcatactccatgcatccaacccaatcttactttaaccaatgcctgaaaaggacatagcacttttccaaggtgcaagtaaactacgttgtagattatcatatcagttaaaccctgtgtactgataaatctaagaatacatttaatcacacaatcttgattactttccactgtgttgacaacacaataaacaagaatatcagtgtgataaggatttggttgaatttattaatcaaataagtttataaatgatcacatgaactaattaacacattaaacaagtaatgaaattaaatttgtttctttattgataattgaatagaaaagattacattgaaatagagttttatttaaggcacaaaacccaacagaactgttataactccctgaccaaacctttttgacgagagaggggtcgaatcattacaactccctgatcaaacctttctgacgagaaagggatcaaataactataatttttgattaaaaacctatctgaggagaaaggaaaatcaaaagttataaatgagatataacttataactcgcgcataaagctgaatgctaacggctcgcgctaaaggaaagtataaaacgagacttcaaagtgtcttgaaaaagtacttaaacctaacacgtgggtaaaagatctaactactcatgtaagaaataaacatatgtacaaagtgacaaggtcattaaaaatatatttgagttttcttgaaataagatcgtttttgatgatcacgaggcagaatcaatgactgctcgcaaatcgagggagggcagataagctgctcgcgcataaagtaggttattaactacttagcgtcagagagaaatacaagcaatggaaacctctaataaactttatgcatatgattatttaaattgtgaatgaaacgcaagcaaacacccacatgttgaagttcaaacttgaaagtatgaggcattaaaaagcaaagtttgccatccaactttgcaaatttgtcttttaaaaaaaagttcctcaaggggcaaaccattgtctcgaccgaaaggccaatttcaaaaaagaccaagtctacatggtgggagacttggatggatcttcttcttcttcctctgcctcgacctcttcctcctccaatctggacttctcgcagaaagctagagtttcctcttccttctcctccaataagcttgtgtccatgttgggattcgccatctaggctcgatatacagtacgaaggccaaccttgttgcatcgttctgtggtatcgacctccttctcagtgagcttcttctcaaattcatcagcttgggccttgatggtcttctctattgggctttgtgccctaaataaaattctattttaatgtaatcatttctattgaattatcaataaagaaacaaatctaatttcatcacttgtttaatgtgttatttggttcatgtgatcatttaaattcatccaaatccttatcacattggtattcttgtttattgtgttgtcaacacagtaaaaaataatcaagattgtgtgattaaatgtattcctagatttatcagtacataggatttaactgatatcataatctacaacgtagtttacttgcaccttggataagtgctatgtcctttccagggcattggttaaagtaagcttgggttggatgtatggagtatgcatcggaagggaccgatattgaacttggattagatatgataaacttaccgtaatatctattcaattcaatatcttctagttgatcctagattaaatgatctcaatcttgagatggttaggttctagttcagttgcattatttatgttctttaatcaattagttaaagtcgaccaaatggttcttcccgtgatgtataggttaagaacatggtagttcaattgagtgagagccactataagaaaaggcctttttactggcgcagttcgtcaaatgcgccggtaaaagatttcgacataaagcaaaaaatgaaattccacttccatttaggctttgcttttgctggcgcaataatgtgccagtattaataagttttgccggcgcattaatgaatatgtgctggtaaaagtaaggaaatgaagcgccaaaaggcgcgagaagtttgccgccttttatttcatttattctggcgcttatatacttttaccagcgcatctatgcgccgacaaaagtccccaaaaaaaagagagggaaacttcccgtgtggatttccttggtaggtggggatacttttgttgggttttatgccctaaataaaactcttt

SEQ ID NO: 337707 - DNA, 549 bp, Cannabis indica
tttttgaatcccagaaattgtgattaggattactggcatttggtcaggagcacccggggatttagaatctccacgcttgcgggacatcaggtaagacagtagttatcatgtagagttaagcacagtggcacttatgttgaatattataattgtgattaattaaaaattgggattaggattattaccctaaagtgagcagttatagggtttaggattattacactagtgatgattgatgtttaaatgctttatatgttaagattaagaattatgcgttcaaggcataatttgattggacatgataattagaaatgagatggaccgttctaaggccttattgtatttagacgtgtgagagtaacacgtaggtctatgccaattgacataaatcggtgtgtgagcgtagcatgcaggtctatatcaatgagacaaatgtgaaatggcattattatgtatgtggtacgttatttgtgattattgatatttatactgccttactgtgtagaattagggtaaaatcgaatcagtgatcagccatgagtgtgagag

SEQ ID NO: 337708 - DNA, 1212 bp, Cannabis indica
tccttcaaggttttattaaccttctacttgtccattcgcctgaggcctggatactgatgagaagctcttaataatcttattcctctcgcagaacacagtgaataattcaccatcgaactaaattctgttattagatactatcttaatgggtgtaccaaacctacaaattatgttcttgacgaaaaagtcgagaactctcttgcaggttttgaaaactagaggttcagcctctatccactttgtaaagaagtcgacagccactactgcgtattttgctcctccttgccctatggggagtgccccaatcaaatcaatcccccatattacaaatgggtaaggcgaggtcatcatcctcaattccgttggtggtatgggaggtatatgtcacctctgacacttaccatatttcttgacaaattcatgggtgtccttatttatagttggccagtaatatccttgtcgaataatcttctttgacaagcttttccatcctgcatgatctccacaaaagccctcgtggatttatgtgatgatcttgtttgcttctgcgggaagaacacaccgtaggagaggcattaaatagccccttctatacaatttgccttttactatggtatagcgaggcactgtgtaaagagttttcgtgcctcgtttttgtcagttggaagtttcccattgagaaaatagttgattatgggtgtcatccaggtaggcgagctatctatcatctcaacttcttctttctcacatatacttggctcgtttaacacctcaatcgataccaagtttaattcatccagttcattctgggaggccaattttgctaaggcatcagcattaaagttttgttctcttgggttcgattttgaaataatcaaacttttccaaattcttccgaaccttctctaggtactttgccatttttaagctcttagcttggtattcccctaggacttgatttacaattaattgtgaatcactatggcatataagatttttaaccttcaacacttcaactatctttaaaccagtgatcaaggcttcatactcagcctcgttgtttgcagtgtcaaattgaaatcttaaggcatagtgaaacttgaagccttctggcgaaattagtatcaaccctgcacccgagccatgctcattggacgctccatccacgtacaacttccaggtgtctgcgtctcgctgaacaagtgggttctc

SEQ ID NO: 337709 - DNA, 1078 bp, Cannabis indica
attaaacttttcgaacatataatcaggattatattctactgtgctgacaacactataatcattatcaaatacatatgttctggacttaatagaatttatacattaaatacaatcgtgaaataaatcatgtgaaccatgcaacatagaatgcgatttctgatctttattaattagtaaatctgattatattgaaatggattttatttagggtacaaaacccaacagtaaatacatatgcatactgttatactaatcttaccttgtttccgaattcaggtgtgccggtcaacctgagtggaacaaccactcggtggattacaggcccctaaatcatatcaatcataacataggtaagtgacacgctaaatcactttctagggacttaaacttgaaactaaaagtttccctatcgataataacatggcaataccctaaacatcacaaaaatgggaaaaactagggttcccaaaattgcccgaatcggtagattggttcccaaccagaattctggttctgtggggtatcctaaagaccaaccggaatttcggttctgcggggtttcctggtgaccaaccggaatttcggttcctacaggtccccctaaaccggaattccggtttagtgcaggatactttcaaaatttcataactctctcaaatcaaccccaaatcacaccaaaccttccaaacctgttttatagaccacatagaacatctctaaagcaataaaacacctcaacatgcacataatcaaaatctaccatgggagagcaaagtttgagctcttaagctcaaaccttgaacaaatctcataaacagccaccaaaccagctctaaacattatttctgaccataaattaacttcagaaacaacatcaaacaatagcagcaactacaacaaccaaaatccacaaaacatgcaaaaattcactttcttgaaatccatgaaactagaaatgaagttgctaaagacttaccttggcttggattcacaaagaactgctagaaatcacaacaatttgcaaaacaaagattgaaccctagttggttctagggatttcttgagagagagagagaga

SEQ ID NO: 337710 - DNA, 631 bp, Cannabis indica
agaacatcaaacacacacacacacacatatatatatatagttaattaattacatatgctttaaagaagagaccccacttttcaattcgagcaataatatgtatttatgcagccttaaaattatatactgtttttatacattatactatataatatttgtatcgtttattatcaaccatacattaattttttgagaaattataagtaatgaatagttctgtgtaaattaggagctatcattacgtactcatttatgcacattgaagagtatttaatatttaatgttagtaattatattttttaaaaaaaatgatattgctgtcatgatttattaaatcaaaacaacattaaatgataataataataataataataataataataaaatggttataatttttttgtttgatgaatcaaaagaacctaattgaccttataaaatgagaccaaaatgactctatacaaaatagactaattaattacaataattcaaaccaatcaacatctttttgctttacattcttaggcataacaaaaattccatttttaaattgctattttgtttattgtactaattgttgcgagcttgtatttgtagaattacaatgcttgttgtttctagcttgccatat

SEQ ID NO: 337711 - DNA, 555 bp, Cannabis indica
agggttccaaaaattcccccaacaggcagaccggttcccaaccggaagtctggttctgggtcaccaaccggtcgactagttgccacaggtcccccagaaccggaattccggttctgtgctgggaacccgaaaaaactccccttgaactcaaaactcaaccaaacttaaccaaactttccagggtacatatacaatgcataaacagcaatttctaaccagaatttcactatacaatccaacaatactcaacttgccattaaagaccaaagctttaaactctaaacttaaaattgcataaaaccatcaacaccaattaaaaccagctgcaagaagttaaaatcaactcaacaagaccctaaaattctaagcctatgcaattcaaaccttaacagcccctaatttataatttcatatattcaaaccaaagaaaaagctttaaatcacatctttaaaggttctacggctttaccttagatgaaacctccttgagttctagcttaatcccagaaaatggaagagaaaaatttgatctttgcccttgctttgccccagccg

SEQ ID NO: 337712 - DNA, 1035 bp, Cannabis indica
aaattgtagtgaaaagttatatatgctacttgtgagattgttttgaatatatgctatactgtatgtatataggcttgattgtaaacattctagtgttgtgatcttgtcactgtattcatcattaataaagcttcttcaagattcagtttagtattattctcttaaatctcatctatcattcctttactgtgttttattcattttaattgttcattgaattcttattttggtgatttttctttgctattggtgtttgtgttaagacttgttatttctctctacaaatataataatgttgatatcataactgtgaagattggtccctattaattactcaaagccaatcaattgaacacactcggattgctgacatggcatcgaccagttaagagagttaggctaactcagctgtccaaactgatctctaacagaaaacagaatcagttaatctatttttctccctcatgccaagcaccttctattgcctataaaataactcctagactgatcaactaagtaatccgagtaggactatctcacattgaaattagatatgaattaccaagtaattcttagtgttctttgttttacttttctgcatttagtttggtctcaatctgtttgtttttagttttatctaggttcttgttagttctatttatttgatcttttgtttaagtgtgtttttatgtgtttagatcctaacaataattattatatttaattttcttttaaatcaaacacgttcgactctacacccatctaaaaaaattattcacgattgttggtttggaggtccctcttatttttaccccatcaatgtaaagatgaaaacaaaaactggtttcattatatgatttttggttgaaaatgattataaggcagacccactaatttatatatatatatatatatatgaaattccatgcaaacaatgaaattggtcccatttttttaaagaggaaattatgttatggcatttacttggtgttccgagtaacattcttgtctagtatgatatatatattgtatgta

SEQ ID NO: 337713 - DNA, 690 bp, Cannabis indica
gatgagctctcttcaacactttcttcaatctaaaatcccttcagatctggtgatgaagatgatactgaaatcccttcagtttgaacttaacatcatcaagctctgatctgcaactttggattaataccaccaagctcaagattcaaacctgccatggaacataaagacgaaacaggaagaaagaaacgtaatccctaatctccgataaaaaaaggttcatcaacataataacaagaagttatatttatccccagctaaaccaagaataccgaattagacagttgttaccatctgaacacactacaagaaattaggttaataccggcggtattattcccggcggaatagacccgccggtaatagtctaggtattaccggcggatttagtaatccgccggtaatagttattaaataaaaaacgttttccaaaaatatataataattaattataaatgaattattaccggcgggtaggggttattaccggcggaatcccgcctcgaaaaatgagggcgggaattttaccgcccattcaattgaaaatattattgccggcggattaataccggcgggtcccgccggtattaatgtgggattctgaccgtttacatttataccgacggaacccaattaataccgacgggtcccgccggtattaaaagtctatataaacccctccccatttcagaa

SEQ ID NO: 337714 - DNA, 516 bp, Cannabis indica
aacttcttccattcttctattccccttggagcgcacgacaagattatctgccatccataataagaccaactcttgtctttgaaatcgatagccttttgggaatattgaacaaaaagcgaaacaccttttcaaatgtagtggaagatagtagtagctcacttctaaagcagcgggaaggccctcactcctttcatgtgtcaactcccaaatattattagttgctatttgttcccatctccctacatccaacgttgatctcaagatgcctcctagaactttagcagctaaaggtaaaccattacatttcttggaaatttctctaccgatcctttctaaatttgggttctcagtaaactttctagagtttccactggaagcgtgtttcacaaatagtgcccaacactcgtcttctgataattctctaagctggtgtgtatcaacagtacgaatgatatctgcaacttttccatttcttgttgttactattattttgctgccttttgctccaccgttaaa

SEQ ID NO: 337715 - DNA, 548 bp, Cannabis indica
ctatttatactgagcttaataaactctggaaaatatctttctcgcacacgagcacagggttccatttagcaaacctgagcccatgagacatgggagggagaaatagtatgcaatgaaattgtgtagatttcacaaggacattgggcatacaatggatgaatatcttcagttgaaggacgagatagagagtcttatcttgcatggttactttcaacagtatgtgaagagacaaggcaatggacaaaaccagccgaatctgcccaataacccaggcaaccaaagattataacctcctcttgttgaaggagaggacattttggttatctcaggagggccacatctcgctacagaaagtaacaatgcccaaaagagatacgtcaaggaagttaagaacgagcagtcagtctttgctcctgagctataacaccataactaacttaggcatgttagcgtgatttttaacatactgtgcagctcgttgctaatcaaccagattaatgaaaagcgtgattaattaaaaaattgcttatttaattagaaacataaag

SEQ ID NO: 337716 - DNA, 527 bp, Cannabis indica
tccgaaaagctgtcttgggaatatcctcctctcgaatcctcagttggtgataaccagatcgaagatcaatcttagaaaagacagtcttaccctgcagctgatcaaataaatcatctattcttggcaaagggtacttgttcttcactgtcaatttgtttaactcccgataatctatacacattcgtaaagttccatctttctttttcacaaacaaaactggtgcaccccaaggtgaagtactaggtctagtaaattttaaatccatcatcccctgtaattgaacttttaactctttcagctctgcaggtgccatcctgtagggagctttcgatacaggctcagctcctggtattaaatcaatctcaaaatcaatttcacgttttggtggcaaccctggtaactcttctgggaacacatccagaaattctcgaaccactgggacatgctccggtcccgctagtggttccctggtaatatccacaacacttgctaagaaaccaatgcacccctcacacaacaaatccctt

SEQ ID NO: 337717 - DNA, 1388 bp, Cannabis indica
aacaatcaagatgatgaaccagacttggtgagattggaccgctctaatggcaccaatttcactaggtggcaagacaaggtgaggttcctcctaaccaccctcaagattgcttatactcttaagtccaccttggagccgttacccgtgcctaccgacaaggatacttatgaggtcaaggcacaaaggaagaagagagaagatgccaaactactacgataaaaagggcacatcctcaactcactttcggataggctttatgacctatacaccgacactaaagatgcctaagaaattcgagatcaccttgaaaataaattcaaggccgaggaggaaggtaccaagaaatttttaatttctcaatattttggtttaaaatttcttatgatgaacctcttttacctcaaattcatgagttgcaagtaattgttaacaaattgaaagtgctcaaaattaaacttcccgatgcattccaagttggtggaatagtggcaaaattgccaccatcttggaagaataataggaagagaattcttcataaaaatgaggattactcttttgaagaaatccgaaaacatatttgaatcaaggaggaatcgatatgtagggataagcttttggaggggtctaatgaagagacttccaaagaaaatttaacttccaaagttcctaataagaacaagggtaagacaaaaaagagtaataccttgggtccaaagtctaatccaaaccaattcaaaggtgaaaaaagtccatgttttgtgtgtggaaaacttgaacactattctaaggattgtaagcatagaaaagactttaagggacccaaagtgaatgccattgaggaggatatcattgctactcttagtgacgtgaattctgtgcaaggaaaagttaagggatggtggtatgatacatgtgctaccgttcatgtcacatatgacaaatcattgttcaagacctttgaagagtcaaagggtaaccatgagatctaaatgggcaatgaggttaaatcaacggtattaggcaaaggtaccattgatgtattttttacctcaagtaagaaagtcacattggtgaatgtactttatgagcccaacatgaatagaaacttgattagtggtggcttacttaaaaaacctgatattaaggccgtttatgaatccgataaggtcatacttaccaaatataatgtatgtttgggcaaggggtactcttgtgagggaacggtgaaattatgcaccaataatgtaactttcaatgttagcaatgataaagcatctatttccaattatatgattgagcttgattctttatttttgtggcatcttagattagctcatattggtttttctactctgaaaaaagttaaaaaattgtaaagaccgcttagt

SEQ ID NO: 337718 - DNA, 734 bp, Cannabis indica
gggagattttcccaagttttagggttagggttttaaaatgaaaaaaaaaaatggagggaaagtgtgaatgggttggttcggatcggattttattatgtaaataaataaatagaaaaaaggtaatttgcagtcaatttttaagtttagtacgatttatatttgaaaaaatctctataataattttgatcagtcttaaccaagcagtgttatagatttgaagtcatgaccttaaacattataccattcacctcaaccaattaagttatgaatatttattgcttataatacacttaaataaaagcctaatgattttttttattttttttattttggacccctggaaagtgtgggccctaggcacgggcctagcccgcctatgcctagggccggccctgctcttaaggaccaaattttattagggaattttacaaaaatactgtttttggaccaaaactttacaaatatactgggacacggcaaaaataacatttttactgccccagcccaatttctttacttttgtactgcccaagcccaacaacataacatttatactgtgaacagtaaaacacacgggaaaacaacctgcttcgtgtgtggggagtcgccggagacggacatcaccaagaaaaaaccattaaatccggcaagaataaacaaaagcagtaaaatcgacgtcaataaataatcatggcaaaacaacggtaaaacaacactaaaacaatcaaacaaaa

SEQ ID NO: 337719 - DNA, 623 bp, Cannabis indica
ggacatgtgttgaggttcatacccatggaaagattcctatcgcatcggtagtgctcgaagccctccgatctgagcagcagcgctaccaaggccacatggctcgaatccatggcctggagagagaacccggtcgccgaacaatcgaagttggcatcagtgacgaggtccttgagagcctccatcaccttcttcagtagcgaaccctgaaccaaccgcaactccaacatcttcagacctcactgatttcttcgattgggagattttctcaagttttagggttagggttttaaaatgaagaaaaaaaatggagggaaagtgtgaatgggttggttcggtcggttcggatcggattttattatgtaaataaataaatagaaaaaaggtaatttgcagtcaatttttaagtttagtacgatataatccttatatttgaaaaaatctctataatcatttttgctcagctttccttccattaatttttgactttaagcacggagtgttgtaaatttgaacccatgacgtttttttttttatttaagtcgtttatatattacattcagcataacttgagactcgaacccaggacctccaatacacacgcaccccctatggccacttgagct

SEQ ID NO: 337720 - DNA, 763 bp, Cannabis indica
ctttgactagttcggattttaatgctttttctgcatagacgggtgtgaagatggcctacgcctactctcgagctaagtcggctgctgttaagaaccttgctacttccaatacaatgcgaagagaagtggacttggccaaaaaggatgttgaggatgcgcggactcaacttgagaccgtgcaaatagaacttggagaggtcaatcaaaaaattcctgctattgaggccagagttaccgagctgaccagggaactgcaggagatgccatcaatcgagcaactcgaggcagataatgcttctttgtctcaggtcattgccagtctccaagatgaaagagagggtctttggactcttcttcgtaggttggaagatatgcttaaggagaaaaagaccaaggaaaaggaacttgagactgaggtggagaagctcgggaagaaactggatgccttagagacaactggtctcgagattttttatgacttttagaaggccaatcccaaagcaaactttgaataccttgacacttccaaagacatgtttctcgactattgcactgcttaggcggccaatgagaatcctaaggcaaccacttccacttcttcgaccgagcagaatgttgaggctccttctgcccagactgatgatcctccggcctcttcaaagctagctgatcctccggttcctttagatccagtcgacccgtacaaagagcctgggactcccacaatttaattgccttctttttactatcttttttatatgtc

SEQ ID NO: 337721 - DNA, 525 bp, Cannabis indica
aggttccgatattgataatgctctgctacagaaaggaatcaagggctagatatcttaacggatgagtcatttatattccgctgcacccaatgtaaggtttactaaactttatatgtgtttatttcatccgtttttagaaagttcatatttagggtgttaatcaacatacttgtgagtagatctaagatacctggtaaaataatttccaacatattaaaccataaaaatagaaaacaacatatacacataaatgacttctaatcttttattgataacaaaacagattagattgtaatgggtttatttagggcatataatcccaacaattttgtctagcccaaacttcactacaccatttcaccctgtttgaaggagtcgaaaacaagttataccctgcagaaatagagtacttttgtctctgaaaagcttcagcatctgttaaaattcgaatttgatctttgagggctatcatctttttccaataccaactagagtgtactgaagctgagcagctccaccactctt

SEQ ID NO: 337722 - DNA, 833 bp, Cannabis indica
gaaaggtccgcagaggggcaaactccaaaaaaggagtcttggccctcaggatcgagaggaccgaaagagcgtttctgtgcaccaggacccgaagagaaaggagggaggggacggagataccctcccgttgatctaagacatcagatcaacgggaagcatggtgatttgcgggatcacttggacaaaaagaaacgcgcaccggcggtctccgcaagaacgttgaacaaaggaattctggctgagctagccgtactgcacaaagatattgctcgggtctcctgaagacatgattgtgaggaccgggagccatgtgccagacacattttagaggtggaactctccaaaaactttaagatgcccgaaatggcagcttacaccggggacacggaccccagcgatcatttgtctcggttcaaccgagtaattacggtcatgagagtcagcaatgacgctaagtgcttatgcttcccactaacattaagcgggtccgcggaggaatggttcaagaagttggaaccaggatcggtggactgctggaacaagttgcaagttagcttacggagacattttgtcgccgcgaaaaaaaattaatctcgaagtcagtgccctgactaacatcaagcaactacccacgaagacattgaaaaatttaataaagaggttcaaggaaggagcctcaaagactaagaaagttgacgacggacaacagcttgcacttcttcaagctgggatccgtacaggaaccccattcttgaacgagttacagcaagaaggagctgcaaacctccaagatttccaaaagagggtccaaaagtacatcaacttagaggagg

SEQ ID NO: 337723 - DNA, 1638 bp, Cannabis indica
acactctccactttccatttttcatgggaactaccacggggttggcgagccaagtcggatattgtacctcttcgatggtattgttttggagcatttttgcaacttcgtcatttattgcctggtttcgatcagtccccatttttcgcctcttctgttttaccgggatgtagttcgggtttacattcagtctatgagtgatgacggtcagatctattccgggcatgtctgaatgatcccatgcaaatacttggacgtattctttcaataattctataactcgattctttcggtctccggtaagtcccgtgccaatgtaggttgtttttctgggtctgttgggtgaatgggtacttacagcaactcctctaccgccggagatcgttcttttgctggggtcgaggagttgattaattgctataacttgttcttgttcctcaaggatgaggagtagcattcgcgggcccccagctggtctcctcgaatctcccttacctcacccttgcaggggaactttattacttgatggtaggacgacgcgactgccttcattgcatgaatccacggcctgccgaggatggcgttgtaggccgacgggcaatccacaattaaaaatttcactaatttgttgactccattcgcgtagacgggtagttggatgaaacttcgagcaacagcgctttcacccgagaatcctactagtgtaacctgggtgtcttgggctttcaagtcttcaatttccatttctttcaaaaccccggcgaacaaaatgttggcagagctcccagtgtcgacaagcatgtgtttcattcgaacatgagcaacgtccaaggtgatgacaagagcatcgtcgtgggggtgttctaattcggaggcttcccctcggttgaatgacaagagcacgtcagggccatcgctgtcaattgacgtcatagcccttactgattggacccgtcgggcatgggccatcgaagcccgcactgaattcccacacaggtccgaccctcccgagatgacgtttacggttttcttaatgtacggcggaggggactgatcccggcttttggtactcccctgctggatgtggagtgcgacgtccgaaactaggcagtcccggaagaatccttcttttaccagacggttgacatctatcttcagctgcctgcactcgtaggttgcatggtcgtgctccccatggaaagcacaatatcgccccttatctctcttgacggggtccgtggtcattcgtgggggccatttggtttccttcaatccccgcagtcattttatcaattcagtcagggtaatggtcatccgtggtagctcctcttctccccgtggggcgtgcggctgcaccgcctcgcccatgctcatcattactgtccctcaggagttcctttcgttggccgagcggttgtcagttctactatgaggccgtgcagctggtgtccgattcttagatttgaaaaggaaagtatctcccgatgccaaagtttcacgcgacacttcctcattgtgccgcttctcttctacttccaaggccacgtatcctctcgccatagtcaaggcccttgtgagggacaagccaggctccactatgatcgccttctttaattccgaaccatgtatcaatccctgcat

SEQ ID NO: 337724 - DNA, 808 bp, Cannabis indica
ttttcgacacttcccttttagatcttcatacttagctccacatgctgactttttcctttatgcaggccggtttgaagttggcttacacctactcttgggctaaatctgctacttccaagagtgcggctctgtccgacaccttgagggcggaggcggacttggccaagaaggaagctaaggaggccagggcggagactacaactgtttgtcatgagttgggtgatgccaacaagaagttgtttgccgccgagaaaaagatcaccgcacttacaaaggacctcgaggctgttgatcgctttgaggaaaccatctagaccttatctgctgaagttgatcgtcttcaggatgagaggaggtctcttcggcaggtccttctttggctaaagaaggataaggacgctcaggtggccgaggcagaccgtttgaatgagaaggtcaatgctttggagactgtcggcctcgagctcttctttgatttttggaagggtaatccccaggccaacttcgactacttgggcgacgctaaggacatgtacctcgagtactgtgcggcccaagtttgctatggtgggaaagaggtggctgacaaggctgctgatgcttctcctgctcgaacaacagatcctcctgctccagttggcccagaagaaccgaacccaaagcctgggactccacctgtttgaacactgatctttttatctctcttgtttatatatatatatatattatatggcctcaaggcctttaagacatcatgatcggccaagcggtctttagacttggaattatttttcattttttggacaac

SEQ ID NO: 337725 - DNA, 832 bp, Cannabis indica
ctactaagttacaaaatctccgtgacgttcttggactcatgtcaaggtcataacaataccctacatcatgatcaggaagaactccgcgctgcggtaaatctcgcgttcgaagaacaaaggtgtatgtttaccgagtggagagacagagagatggaggcgttaagggctcaatcatacagagattgaaaatcgtagtcggcaagctaccgtgtctgatacgaaaagcctacctacactgtaaggaccagcaacctccgaatgtcatccccttggggtgagaccgacgaagatctagcgatgaatacttcccagactgcaaatatatggttagtcgcccagtccccagtcacgagttccacatgtgggccaagcggtaggcgggcagaccttgtctagtaattcattaggagagatcatacctgatggttccaaccagattaacggtgccattccacatgtcaaccaagaaaatcaattgctgaggcagccatgtgcttctgtattcgaaaggttgggggcgactcatgacctaaggaatgatctgaatagaaggagaggtgtagacgatcagaatgtcacgacgattgtacagcctggagcccgtgctcaaattcctgctcagaaagatgcaaacgagattcaaattgaccagaatgccgagcaggttagcccagtcgtctaggcgcacctagacaaactgaaaaatatgtttcatggcatggttggacaaagaaacaatgatctcgagctagaccgagcacgtggaactcctttctctcccgagatcaatctcctggcgttgcccacaagtttaaaataccaacatggaaaa

SEQ ID NO: 337726 - DNA, 675 bp, Cannabis indica
tcttaggttcttaaataattttttctacaagtgtatagaaatttctagactaaaatgtgtagaaatatgtagcaaattctaatactcctgcttggaacacatttcggtaactccgatcatgtctcgtagtagatatgtctgctacctgctctttagtcttgcagtacttgagctcgatttgtttgtttgcttctgttttcctgatgaaataatacttgatgcttatatgcttagttctattctgaaatactgaattttttgccattgctatagttgatttgctatcgcaatatatcttttagcctccttctgtgattctcccatgtcttttagtattcttttaagccatatagcttagcttgtagtcattgctacaacaatgtactctgcttcagctgatgattgtgcaacagttgcttgcttcattgatgcctaagaaaatattcctgatccaagtgtgaaggcatatcttgacgtgcttttcacgtcgtctatggatcctgcccagtcactatctgtgcagccaacaagttttgagtcacttgtaattccgtaccatattctgtagaattttgttccttgcaagtatttgaggattcgcttggctactccgtagtgaacttgacttggatcatgcatgaatcttgataggagactaactgcgtacattatgtc

SEQ ID NO: 337727 - DNA, 628 bp, Cannabis indica
attctccagatgagctcgttcaggccggctagcaccagatttcctcttcttctccgccacggacttaggagaaaagtcctcagggtaaagcccatacttcaccagattatcatcggaggtcaactggatgatattcctgtcttcttcaagcaactcggcaagtttatgagctttatccctaagagcaagagtgaagggaggacggtggtatgtcagaagctgctgaaaccaagtccgggtaatgctcggatccttcaccatgaagtactcatcagcaaaacgccctattttgctgatggccttgtcatccgtgccgctcaaccacttgaagcttggctgagagaagtaaaagtaccccgatttgccttgcttgggggtagactttaggtcgaagaaccaggcgacctcgtggggggaaggagcatctcatcattaggaagcgtagaagatgaagaaagcggacaaatacttaatgcccttttggagtaatttgtgtggggcagagaccaaagaagtctgccacatccctgaagtacttgtgtaagggcatcagcgccccttgctggctgtgagcccctgaccaggcgcacattcccttatcgggatttgtggtacgattgtcgtgggc

SEQ ID NO: 337728 - DNA, 1169 bp, Cannabis indica
aaatccgtgagggcttggcccaaagcggacaatatcattctaatagagaaatagatagtgtacgacggtccttacaaaaatatctataatcacttttcaaaatagatatttacctaattgaattaattaaataattacttaacccacaaagacttatccaatagggacatgactaagcctaggcacctaccactgtctataggacaaggttggtgttgtctcgaaaaaattttgtcttaacaatttttgtctttttttctatttaattaatttaaaaaatttatttattttattacaaaagtaaacaattattattttttcaatttaaatagattttcttcaaactctttatacaactctttatccctaccattaatagtgtttaaaggtggcgattcgaaaaccatggagctataattcgaagctctagtaaactagattatttactgagtctcatcaacaaaataatcatttatttattaatttcatgattactccactataaatatggaattacactcttaataattgtagaattatatttattgagcttaactatagtgttcattcatataatcaattctagtgattagccctatatgtgttggttcgtaattagctttggtcaaaataccattttaccttttctaattaattttttacctttagttttagtaattcactagtggaagtataattcaagatctcatctgaatttgtgcacaacattccagttccaaaataaaaacttgaagggaatcaatattcaattcgttaggaaagttaggattccatatttgtacatcatatatccagccatcaatgttattagattctcaaaacagaagttgtaagaatcatcttttgtgagaaactttaacaagtgaatcaaagaaactgataaatgaacaggagttcaagataactcaaaatttaagccgatctactattgatcatctttatgatatgaattaggtctttatgataaaaggcatgttgataaagatatttttagtcatatcggtccatgtcatatataatcattattatatacagtaccttcacttcgatgtctcactacatccataatttgaaccaagattagttgcaccgaagagcaaacatcaatgaactatactagcaaccatagattaaagatttcataactt

SEQ ID NO: 337729 - DNA, 662 bp, Cannabis indica
cacccttgaagagtgatttggtaccctcattcttgacgatttgcttaaatgcatccaatgagctcttatatttgacagcttctccagatgtcatcatcattcttctacgcactgtgtcgatggggtaagatgccaatccagcaccaatggtgattccccatcccagcaaaaaactagcaaagaagttatcctgcaaacaagagaaaataacatcacaagcataaccttgcaagtgaaaatcatgatacctagagcactcaaataaattaatgcccaatattaaacaagcatatattgcaaagatcgtaacttacctgcaaatctccaaccaaaacaacaggcttcagagaatcatacattccaaagtagagtccacggtacacaataattccaacacatgaaatgttgaatccacgatacagcccagcaataccatcggacttgagggttttcttataaacatcaatcataccattaaactgtctttccccaccctttttagcagccttggcatcatttgccaaacgtgtacgggcatagtctagagagtacacaaaaagaagagatgaagcgcctgcagcacctcctgatgccaggttcccagcaaaccacttccagtagccatctctgtcttttttgaaattgaaaagcctcttgaagta

SEQ ID NO: 337730 - DNA, 1025 bp, Cannabis indica
taaaataatttccaacacatagcggataaggagatcttttaacactgacgtttcccttttaccggcgtgattcctcgccggtaaaacacagttttaccggcgcatatttagtctacgcgccggtaaaaagtcttttaccgaccaagattctctgacatgctttgccggcgcagtattgcgccgacgaagctttaacggcgcattcagggtacttttgccggatttttgcccccgcaaaagtagggtttcttgtagtgtattcttaatagaatcaaaacaaaagaaaagttgcagtatattagacttgagaattctaaatgttttctttgcaacactgaagatgagaccgtgcctcacttattttttgagtgtcctttctccttggaatgcttggaaaaggcgaaatcatggctgaattggggaatgactgctactaccttagaaagaattgtaaggtggataaggagggcaaaattaagcaaggtgaagaaggcaattttagttgctgtcattgtagccctcgtttacgaaacatggcgcacaagaaacaatgttttatagtagaattctaatacaagtgtagcaattgtaattgctaaagtgaaagcatagtgaaaaaaagaattacatgtatatggccaaaaaaaaaaacaactagaaatgagaaagaattatgtaaagttatatagatatttagattctccttacttgaagaatctactaagttgtataaaaagttttaagcaatacacatatacgattcataaaaacaaatatgtactacaaagttatgaaagtagttgtagaaagtcaattaattacatatgactacagtttgattttatttgtctcgtttacggtatctcaaacctcatattgaagtcacgagggacttcataaattcccttaattattttatatttatatattataggcagattcattcttggaattattacataaacaatataattaaattgatattttatttacaaaaatactttcataaggtaaagtcaacattt

SEQ ID NO: 337731 - DNA, 615 bp, Cannabis indica
taatctttaataaaagaaaataaaaaaaataggttattaaagtttttaatattttttattgttcaaataaattttttatgaagtggactaataaaattttgacacatgacaattttaagaactacaaacaaagctgttaaattatgtacctatagactaacgagaatcttaagcttgtggacttttactataattttttgagatgagagacttatctgtatcaaagtgaacttttggggaacttatttcgcaatttaatatcaacacgtgatatttttggagcaactaacatatgtgttaaaatgaggattaacagacttataggattctcgagcttgagtactattaccgctattttttgaagttgggaatttatctgcatcaaagtaaattttttaaggacttttgttacaatttttcctaattgatttggaactatgtaaaatgataagggataattgcggtaaaagtctccaaaaacttaaggttgatgcaggttagtccctaacctcgaaaattggcggtaatagtccctaaggtcgcaatatttgttagtccgttagtccctttttctaacggatccgttttctaattcaaaatgccacgtgtcgataa

SEQ ID NO: 337732 - DNA, 503 bp, Cannabis indica
tgccccccaagtgaccgagctgacttatgactcttggtcccttgcatttgacaagtatgatttttgtctattgagtgctttgggtcgagcgggccgtttgtatgcattaatggtaaattcataaattgctaattgacattattagaatggtaataaacatctttattcatttattggtttgaacagtcttgttaccgtagtaacttacaattataaaagctattacatgatctaatatgatctttagctaaatttaaacattaaacaattgcacatataaaaggaaattgtacttttaaaggtgttcatccgacctgagtacttaattatttcatcgaaacctttgggcaggatccgtccagaaggccatctactatggagtaaatgttcttgctttgtgtacttaaagtggtcatctaaccttgtacatttactgatagtactttttcaaatgttccccattccaatacctttgtactagaacgagctccatattttcgtca

SEQ ID NO: 337733 - DNA, 758 bp, Cannabis indica
tgattaatattgagatatatttagtattgttatataatgaaaagattgattggttgagtattgataatgtgatgatattatgcatgtgatatatgggctcacttgattaggtgatgtgatatacttggcgacgtaccgagtgtaggtatgggtgtcagtgacatatgatgagtaccgagcgtaggtacgagctcacctgattaggtgatgcaatattcctggcgacgaatcgggtgtaggtacaggcattagtgatatgaaaatgcctagttatgacatagattgaaaccattgttaggtttcttcttggtgacatatcaggtgtaggtacgagcgtcaatgatatatgaatactaggcgtaggtacgggctcgtctaattagacgatgcgatatatttgtgtcaggttgtggcacgggctcacctgattaggtgatgcaattatgtgatatatgagtacaggtttttggcacgggctcacttgattaagtgatgcagttatgcgatatatgggagccaagctatggcacgggcttacctgattaggcaatgcaatacaggattattagattaaagcatcgacttgcctgattagacaacgtgatgtaatgaagatagttacattatgaggtagcatatatatataatttatatgattaaatgaatatgaagtctattattggtataatagttttgtattaccaaatatttatacactgatgtttattcgtggccgatgccagtagtgatttgaattt

SEQ ID NO: 337734 - DNA, 522 bp, Cannabis indica
aagaaacataaaggtttgaaataaaaatggattaagaaaaagtgtctagctggttttttttaataaaaatgctccatctcaaatgtggtattttgatagtggttgctatagacatatgacaggtgacaaggactttttgattaacatccaacctttgcagcgtggggaagtcacctttggcaatgggctagctggaaaagttattggtatgggaactctcaactttgaagggttgcccagattgaaaaaagtgatgttagttgaaggactaagggcttatttacttagcattagtcaaatttgtgaccaagggtatactgtctcatttgacagtgatcattgttatgtacttaatgatgataatcaatgtattttgtaagatttcgatccaccgataattattataccctaaccattgtgttcacttgtcattcagccatcaacaacaccacagatttgtggcatgctaaactcggacatattaagtataaaaaatctgaaaaaattatcaaatgcaggtat

SEQ ID NO: 337735 - DNA, 667 bp, Cannabis indica
ttggttaactaataaagtttcattattaggtaaaatgaacctagtagcaggcacattactgatgcattgaaagagtttgatattgttacaaatgtgcctagtggcacctgagtcaataatccaagaagtgtcaaaaaaatcagatgatcaggtctaggattggtcacagagatgttattgtgttgattagcaagtaagttgagtaattgctgatattgggtggcatttagttgaggtaaaagagtgtgtgcatcctcattttcggtggtggtttcttcacttgattgcacctggtttgccactgcatctttagatttgttgggcttattatatcctgaaggatatccatgaattttgtaacatctttctatggtatgaccatggatgttgcagtgagtgcaaaagggcctccctttctttggtgcttgagatttttggccttgaggatcaggtctattgttcttgtcaccttgaaatgcaaaagcatgacttgtatttggattactttctgcagcaatacttcctttttggttttcttcctgagtaacaaggtggaaaacccggttgatttctgggagaggatccattaacagtatacttccacgaacttgagaaaatttatccgatagacccatcaaaaaggacataatgtattccatatggtgat

SEQ ID NO: 337736 - DNA, 1463 bp, Cannabis indica
cattttacccctagttttggaaaatgcctaagttataacttggagggaatttaagtcatttcttttagtgatggtttggtggcttcctagggtgatgacatgtggcttctcattatttcagcaaaggaattaatttcctaatctttattctattagggaaaaataaggaaattagagattaactaaaaaaattgaagaaaagctctctcttcgaaccagctaggaatcagggagttcttgctgaagtttgttatttcaaccaagaattcaaggaagatcaagctaaggtaaaccctagaacccttgattttgtgtattttcaagttttaagttagtttgaagtagtgaatttgggtttacgtggctgttaagattaggaatacctagggttcagattttatgttcattttaggttgattaaaggttttagtagctggttttaccactttgtgttgaatttatgcaagtttgagctttgagctcaaagctttggtctctaatggcatgttgaatttcattgagtttttttgtgaattactagttggaaaatattgtgtataccctaattaggtactctagaaggtatggctgcatttggtggggttttgaacaaggaatggagattttggggtgaactggtatgaaccggctagccggttttactagtacctgtaaaaccggctagttggttttgacagggtccccgaatgatccattttctctattctcatccatttcagtgtcgtagttgggtgtttgcctatttcccgagttagaataatccctagagagtatagcaaaacctagagttggaggttcgggtttcccgagattagggttttaaccatgtgatttacccagtttcattatgtgattagggcatccatctagcacgagactttccgttcaggttggccagcacacttgaatttggaaagaaggtaagaactgtatataatgtatgctataaataactgagtgtatgtatatgttatgtgtatatacaggcttaaatgttagttgcactaccaacacttgtacagttatggtacacagtgcattggtataatgattattgtataagagtacattacagtgatacctgcacaagtacggaaaagaacagggtgtctgtggtatatcacttagtggtactcggggtacgaaacaaaccctaccaacactcatacagtgaggtatctaatgtatgtggtatagtggctttaccctggtatggaacgttcttactcatctgttaagccttgtagataggtgtatgggcgcctagatacaagtcagtattatgtgatatgttatatgcttttcttactgagtctgttgactcacagttctacttccatgtgtaggtaaagaaaaggcaaaagctgaaccggagtgagcctggctaggatggtattgtacatgtcatggcagcgtgacctggagtgttcggtctcgggaca

SEQ ID NO: 337737 - DNA, 1195 bp, Cannabis indica
gtaagaactgtgtataatatgtaatatgaatatctgagtgcatgtatgtgttaagtgtatatgcatgcttatatgttagttgcactaccaacacttgtacagttatggtacaaagtgcattggtatagtgaatattgtttaagtgtacattacagtgataccagcacaagtacgggaaagcacagggtgtttgtggtatatcactcatgggttctcgaggtatgaatcaaaccctaccaacactcgtacagtaaggtacgtactgtatgtggtatagtggctgtaccctagtatggaacgttcttactcatctgttaggccttgtaaataggtgtatgggcgcctagatacaagtcagtattatatgatatgttatatgcttttcttacaaagttgtcgactcacagttctgcttccatgtgtaggtaaaggaaaggcgtaatcagaataggagttagcctggctaagatgaggttgtacatgtcgtggcagcgcgacctagagtgttcggtctcgggacatctggggtttagtattttgtagtcgctgtgcgacatggttatgtatttggtacattttgtataaaagtttagaaacaggatcccggtgtttgtcaaagactatgtaaattataaagtttaatatttattataaaagtttaatttgacacgtttttcgggaaaattctttgattagcaaagatagcaatgtaattgaaaaagtactatagtgtgccttagtattagggcgttacaataagattgtgggttcagccaggctgtgtctcacaaaaaaagacatttgccctcataaatctcttatagaaatcgcctataacgactgacaacttcttcctggtttgacttaatcaaatggtccctaattttggcatcacttatctccaatttggactgaggttggagatttctgggtttgaatgggagggctaactgcttaggatattctatttctatgaactctacagaataaacttctgaaccagattgggatatctctaaaaaaaagaacaatcccaattcctggatgaaatttattagaccagaggcttaaagaatatgagaaaccaaaatttatatcatgcctaaaccctaaaaattacccaaaatggctaaaccaaatggaatgacaagagcaaaataaatgatcataacccaaaaacataaaaaaaaaaaaa

SEQ ID NO: 337738 - DNA, 1518 bp, Cannabis indica
ccagaaataacctagccttagaattttcttatatagatttttcccggcggcctgatttccacagaatccatcgcgcacctcagataggagtcgttgggcttcttcttgagtaacacatctgagcaatggcattgagaatcctcttttgtacataattccctctattatgatatatcgtgcagccttccttcttattttttgagcttcattccgattatctgggagtttcccagtgttgaggtaggtggctatcgatgtcatccagtttggggaagtatcaatgattttgatttcttccatgctagtgatgctaggctcttcgaggaactagatagcaaccaagttcgccttgtcacttacattattgctcgccaatcgagctaacgcatctacagttgtgttttcttcccatggaatttatctgagactgtagcttttgaattgtgctagcagatcatgtattttgctcagatatgctatcatcttttctccccgaccctcgtattctctagatacatgatttaccactagttgtgaatcacggcagatttcaatgtgttcggctttcatctcccggactagttttaggccagcaattagagcttcacactcggcttcgttattagatgctttgaacccaaacttgactgcaacgtgtaggtgttgccccccaagcgtgacaagggaaattcctacaccagatagttgatctgtacctgactcgtctacatgtagtttccaggtcggcttatcttcacaattactgggctgaggtgtttgtactggcttggggttgctttgtggtatgctttcttccttgcctgtgtattctaccacaaagtctgctaaggcttgacctttgattgttttttgtggttggaaagtaattttgtattggcccgcccacttgagtagccgtccagaagcatccggcttttgcaatatttggcgtaatggttggtcagtgtacacccgaacaggatgagcttgaaaataaggccttaactttcttgttgctaggataaggcagtaagcgagtttctctatcaatgggtgtcggccttcggcctcaatgagtcttgtactgatgtaatagactaggtgctgtatgctactctcttatctgattagcacggtactcatagcatgctccatgacagctaagtatattccaagttcttctctgtccagaggtttttagagtacgggtggttttgcaagctgtgcttttagctcttggaaagctttttcacattcctctgtccactcgaattgcttgtttcctaccaggatattgaagaatgggacacacttgtctgttgattttgaaacaaatctaataagtgcgaggatccgaccagtcgaactttgcacttccttggttttagttgtcgacttcatatccaggagggcttgaatcttctcttgattggcttcaattcctcgggcattgacaatgaagcccagaaactttcctgaggtgactccaaaggaaaactttaagggatttagtttcat

SEQ ID NO: 337739 - DNA, 529 bp, Cannabis indica
ttgcaaataacataaggatattcgacacacaatcgaaaaatgatgtcagttgaaagatgagatagaaagtctcatcgctcgggccatttcaagcagtatatgaagagacagggcaatagacacaaccagcccagtctgcccaacaacacaaacaatcaggggttacaacctcctcctgttgaaggagagcacatcctggtcattttgggagggccgcatatcgtaggggagagcaacaatgccaaaagagatatgtgaaagagataaagaatgagtggttggtatttgccctagaaccttccaagaaggtaaaaactaaggaacctccaatcatattctcagaggaagatgagaagaacgtgagatatcctcacgtcgatccattggtgattactattgagctcaccaataaaaggataaagagggtgttaatagacaacggaagctcagtaaacatcctttacaaggaaacgctgaggaagatggggctcaaaaaagtcaaattgaagccttgcatggtaaatctttg

SEQ ID NO: 337740 - DNA, 663 bp, Cannabis indica
cccgttgtgaccaccacggagatccacgaagggatctcgatctccaccgaaccaggaaaaccatcgggcccatcggacccacgaacaaatttgtccaatcaagaacatcaggccgtaccatcgggcccaacaatcgggcatcggacccatgaacagattttgctcaattaagggcatcgggccataccatcgggcccatcggacctgcgaacagatttttgcccaattaagggcatcgggccacaccatcggaccacaccatcgggcccgatcatcggacccatcggaccacatggaattttcactgttttggcacatcgtccactaccatcgggccccatcgggccttcatcttctttgattaaaatacactaaatcacaccctaaaaatcacacacaaaattacagaacctaaatctatcaagaaaaagcatttttatactaaatcaacaattaaaaaatgaaaaataccatgaaaaatgaaaaatactgtgggtgcggagtgtgggtgcggtctagcgtgggtgggtgcggtggttaaccgtgggtggtgctcgatcggcgttttgggtggaacgccggtggttcggttggatttgggtggtgctttcttagtttggttttgggtttgctttgagagagaaaggaggaagagagagatgg

SEQ ID NO: 337741 - DNA, 878 bp, Cannabis indica
tgattttgtttgaatttcattgacgtccattcgagttctatttttttatcaatttgcgacatatcgcgacattgttcgcgatgttttgcaatttaatcttaaaatattgttggttttttctatgggcgatgttttcttgacatgttagttgtttagcgatgtattttgcgatgtatcgcgatatatgttgtgaacttgtcgtgaagtatcgcagagtagtacctaggattctgtttcacgatgattagcgacatattgtgatatattttacgatattcattttattgatttttaacaaaatttcttacaattttgcaaatggctcctaaacttaaacttctagtttctcaacatttcacaggacgtcttacatatcggggtacagataggtttagatatatcaaggccaagtttactcagcttgattggttgatacagtgaaagctagccctttcggacacttcagggaagctagagagttgactttctcttgtgctttggtccacagcctcctcttacagagaatgaaagtagatactacaaagaaagatgaggtttggtttcgtgtagggaagaatgacatgagattcggaaagatagcatttggacttattaccggcttacctatgggtagtgcccctccagaggaggaaagagaagccaagtccaacgaccatctagttcggacatattttgaagggaagagttctgtgcagttggattcacttttgctccaacttgagaggtgcgaagtaaaagatgatgcctacaagcttggactgatcgctttcattgaaagtgtattagtatcaaaagagggcaatgtccaagtttggcctaagatgtaaaagttttttaacgatcttgaattcttcttc

SEQ ID NO: 337742 - DNA, 1363 bp, Cannabis indica
taacgaaaatctgtgttaacaagtggtataccatatcttgtggtgtttgacaccttaaggtaccccttaacattcctctatttcttaagtgatacctactattggtattggccataatgctataaatacgggttagaaattttgatacggtacaaagccgacacgagtcaagaagacaccagaaaatataggcttagacacgtcatgacacaatgctataaattagaatagcatggcacaaaaaatacgtgcttaagcacgataggacacgagaaatacaaaaagcacgacacataagtacaaatagactagcctgaaaacacagcaaccgacaaactcaaaatgcacaacacaaaatattaaaattcttatacttaataattatatatatatatttataaattataaataagtaaaactaataataaaatttaaatataacactacatattataattctataattaaaattattagataatataaaactaaaacaaaggcaacccacaaaatacttaattaatagaaatttcacataattgaccaaaattttaaaaaaaaaatacttcaacattgaattttttttacgttttgaacttaacacataaaggaaaccaatattagatccgttaggaaattcagaattgcataattgtagattatgtccccagccatccacattattagattcttaaaacagaagttgtataagaatcatcttctctgagaaacattaacgagtgaatcaaagaaactaataacatgaacatgagttcatgataacttaagatttaggtaaatctaccattgatcatcattatgatatgtctttatagtaaacgacatgtttaacaaagacaacttaatcaatatcgattattgtcataaataatctttattatatacaacatcttcacttagatgtgtgttatgctacatcagtaattcgaatcaagattacttgcaccgaataacgggtatgaatgaacggcactaacaactattgattaaagattcctgaactttaatatgttactaagtattttattcattgctaagtgatcttaattctccgtataatacaagtcacaacatcatgtatgaataaagaattttctgatatttatatataaattattcaatattaaaaaattgatacttgcaccaacatataaaccccacaattccacctggtttatatgcttgagcaagtaaggacactgagctaaataatataggcaaaaccgttccatcaataagttggtaggagctgagactagtttgagtgtttgtctcaatattgtctttcttagtggtttctgaatcttcaatagaactagattgagtagtgtccacctcaatt

SEQ ID NO: 337743 - DNA, 687 bp, Cannabis indica
gccatgtggccatacttgccacagttgtagtattttccatcaaatttattattattctgagctcctcctgtttgggagctcccatgatgactatccttgtcatcatgttttctagtatttctactagtatttggttggagtcgtcctttcttatctctactaaagagtacttcttcgtcactcttcaatgagactccagacgtttcttagctaacgcttcttggtcagttagcaagttttttaactcaacaatagaaggtttgcttggccaaccttgtattgcagcaataaaagttctaaattcttgcattaatccatgaataataattcttctaattctagcatctgacatcccagcaccagagtctaatgtagagattttgcgacaaacagattttaccttgaagaagtattggttgatcgtcatgtcgcgttgtctaactgagagaagcttgttctccagaagctgcaatcgtgtatcattcttcttggtgaacggtgatgcaaaagtatcccatgcttccttcggtgtctttgccgacctgatgtgctccaacatctcatcttcgattgtggtccaaatcgcaaacatgactttgcccgctttaatcttctatttattcaaagtggatgcatcctccggttgtgtgactttattgccacgaacgatctcccacaagtcttggc
